United States Patent Application Publication US 2020/0377945 A1 - sequence listing, part 5

SEQ ID NO: 847 - DNA, 23547 bp, Unknown
  gut microbiota DNA sequence
cacgttcttccaggtatccctgccgctgctcgccccggggatcgtgacgacggccctgttcacgatcgtggcgacgtggaacaactacttcctgccgttgatcatgctgaaggattcgaactggtatccgctgacgatcggcctgaaccagtggaaggaccaggcgagcaccgcgggcggccaggcgatccagaacctggtggtcacgggttcgttgatcacgatcgtcccgttggtcatcgcgttcctgtgcctgcagaagtactggcagtccggccttgccgcaggcgccgtcaaggaatgaatttgttaggatagttgacaaaaaaacaaaggagtggatatgactcaacgtagagcctatcgttggccgcagccgttggctggacagcaggaacgcatctggtacggaggtgactacaacccggaccagtggcccgaggaagtgtgggacgatgacgttcgtctgatgaagaaggctggcgtgaacctcgtgtccgtgggcatcttctcgtgggcgaagatcgagacgagcgagggcgtgtacgatttcgactggctcgaccgcatcatcgacaagctgggcgaggccggtatcgcagtggacttggcgtccgccaccgcgtcgccgccgatgtggctcacccaggcgcatcccgaggtgctgtggaaggactaccgcggcgacgtgtgccagccgggcgcccgccagcattggaggccgaccagtccggtgttccgcgagtacgcgctgaagctgtgccgtgcgatggccgagcattacaagggcaacccgtatgtggtcgcatggcatgtgagcaacgagtacggctgccacaaccgtttcgactattccgaggacgccgaacatgcgttccagcagtggtgcgaggaacgctacggcaccatcgacgcggtgaacgacgcgtggggcacggcgttctgggcacagcgcatgaacgacttcagtgagatcgtgcctccgcgcttcatcggcgacggcaacttcatgaacccgggcaagctgctcgacttcaagcggttcagctcggacgcgttgaaggcgttctacatcgccgagcgcgacacgcttgccgagatcacgccggatctgcccctgaccacgaacttcatggtgtccgcgtccggttcggtgttggactacgacgattggggcgacgaggtcgatttcgtgtcgaacgaccattacttcattccgggcgaggcccacttggacgagctcgcgttctccgcgagcctggtcgacggcatcgcacgcaaggatccgtggttcctgatggagcattccaccagcgcggtcaactggcgtgagatcaactaccgcaaggagcccggccagctggtgcgcgactctttggctcatgtggccatgggtgcggacgcggtgtgctacttccagtggaggcagtccaaggcaggcgcggagaagttccattccgcgatggtgccccacgcgggcgaggattccgccgtgttccgcgacgtgtgcgagctgggcgccgatctgaacaaactgtccgacgagggcattctgggatcgaggctcgcgaagtcccgtgtggccgtagtattcgactacgagtccgaatgggccaccgaacacaccgccacgccgacccagcacgtgcatcacgtggacgagccattggcgtggttccgcgctttggccgatcagggtgtgaccgccgacgtggtgccggtgcgcggcgcctgggatgactatgagatggtcgtattgccgagcgtatacctgctttccgaggaaacgacccgcagggtgcgcgattacgtcgtgggcggtggtcgactggtcgtgacctactacacgggcatctcggacgagaaggaccacgtgtggctcggcgggtatccgggctcgatccgtgacgtggtcggcgtgcgcgtggaggaattcatgcccatgggcgacgatttcacgggcgtgccggatcgcctcgagttgtcgaacggcgcggtcgcgcacgatatcgccgacgtgatcggctcggtcgacgggacggccaccgtgctggaaacgttcaaggacgatccgtggaccggcatggacggcgctccggcgatcgtcgcgcacacgttcggcgaaggtcgcagcgtgtacgtgggcgcgcgcctcgggcgggacggcatcgcgttgagcctgccggaaattcttgattcgctcggcatggccgaagcgggcggaaacgacggccgagtgctgcacgtcgaacgtgagggcgcggacggttcgaggttcgtgttctcgttcaaccgcacgcatgagacggtccgggttccggtggaaggcgaagtcgtggtctcctcgttcgcggacgtggacggcgaaacggcctcgattaaaccgaacggcgtgatcgtcactaagcagtaagcggacagcaagcaaataatcgcaacattatgggtgtcggcaggctgatgattgtcaatctgccgacacccatttaatttatactattcgaataaaaactaggcgtggaattccactgcagcccaactgattgctggcaaagtgcagtgaactgatccattgtcgattgttgcatgaagctcttggggtgtcactgcggttgggtcgtctgcggaattacgctgatatggattgtcgtcatgcagaataatggccttgtctatatggaagtcggatatgtcgaaatacggcagttgagacagagaagccgtaaccttatgtgcgtcggatgcgtcgcgattcaccataagcagaagaccggaatgattcgtttcgtcccaagtgattactgaatcaagggcattgaccaagccgaaagattcagtctctacgttgggagagtcgatgactggactgtaggcaatgccatgggcgtgttgtgcggcttcggcaaacggatagaagacagtttgacgccatgcgggaccgttcttttcggccatgattggcgcaatcacattgaccaactgcgcgcgcgaggcagaacgcactcggtcgcagtgcttaagcagagtgatcatcagcgacccttctaccactgcatcggctgcattgtagatatcttcgagcaggcgcggtgctttcggccatgactcatgatgaagatccttgcctgattgggctttccattcagcttcctgctgattccagacgtcggaataccagacgccccactcatcaaatgacagtgctatatcatgatcgcctgtgtgggcatttttggcttcgtctgcacatgccgccacggtggagatgaacgtttgcatgtcttgtgaacttgccagataatcttgcaacgattttgccccacgttcgtagtagtaggcatggcaggagacgaaatcgagattgtcgtacgctttggtaagcacgctgcgttcccaggatccaaacgttgacatatgggcgctggaggagccgcaggccacgagttccaagcctgattccgcgagtttcatggcgtgtgcgactcggtccacggctgcggcatactcgtcagggctcatatgtcccacctgccaagggccatccatttcattgccgatgcaccacattttgatgtccattggttcggtgattccgttacgtacgcggcgatcggcaagctcggtgccgggcgctccgttgacgtattccaactcttccagtgcagccttcaatcctcgggtgcccatattgacggcaagcatgatttcggtaccggtcttcttgctccatcggtagaaatcgtcgataccgacttcattggtttcggtgctgtgccatgcgagatctcgtcgtattgggcgttgcccccgtggccctgtgccatcctcccaattgtaggcagagacgaaattgccgccggggtaacgcacgcaggtcacaccaagttctttgactagattgatgacgtcttggcggaatccgttttcgtcggctgtggggtgacttggctcataaatgcctccgtagacacaacgtccaagatgttctacaaatgatccgaaaatgcggggtggtatatcggcaattgcgctgtttttttgcactgtgattgtgctggttccggaagtcatgccgttcctttcgatgagtggtctgatgaaatgtctgcgttgcgcgagcttcgacggatatgcatacgtctagtatgcaatcatatcgtgtttgcgtagctaaacaaaatatgctaggtaactcaagaaatactgtaaaatcaacgatttgcctatttgtttgcgtaaacataacttttgtgttatcctcatgactgtcggaagggtcaatgaatgattcatagccgataatgttggtcgatgtagaaggtcggccatatttaaaggaaggaagaacgatgaagttcactgcatccaagaaaacaatcgctctggttgctgctgctgcgatgctgactagtgtcgcagcctgcgggagttcctcgaattcgagttcttcgggggcgacagagggtggtaagactgaaattacggtatggtcttgggattccactttgccgcgtaccgtgaaggattttgaaaaggccaatccggacatcactgttaaggtgaccaatgccggcacgaacagcaccgaatacacggctttgaacaatgcgctttctgcaggtaaaggtgcgccagatttggtgcagattgagtattatgcacttcccgaatatcaggttcgtggagagattgaagacctgagtcagtttggtgcggacaagttctcggatttctatacgccgggcacgtgggcttctgtgaaacttaatggcggtgtgtatgcactgccgatggattccggaccgatggcatggttctataacaaggatgtgtttgataaggccggggtcgatccgactcgggtgaggacgtgggatgagttctacgatgctgccaagaaggttcgcgcaacagggtcctacattacgtccgattctggtgatgctggcttcttcgattccatgacatggctggcgggcgcgacgccgttctccactggttccgatggacagtccgtcaccatcaacctcagcaatgattccaaggtcaagacttttgttgatttctggcagaagatgattgatgatgatcttatcgataccaagaccgcaggctggagtgatgattggaacaagagtttgaatgacggctctatcgcttcgctgctgaccggtgcttggatgccgtacaacttgctttccggtgctcctgacggtgaggggaagtggcgtgttgctcagatgccgactccggatggatctgaaaccaattccgagaacggtggttcttcgctggcgatggtcaagacggatgacaaggccaaggccgaagctgcatacaagttcgctgaatatgcgtgccacaatgccgaaggcatcaagactcgcgtcgctggcggcgcattccctgccgataacgacactctcgcttctgatgacttcctgaacatgacctctctgactgattccgatggcaatgcgcacgaatacttcggtggtcagaagttcaatgaggagctcgccaaggctgcggccaatgtttcgactggctacaagttcctgccgttcgaggtttatgcgcgtggcgtatatagcgatgatgccggtggtgcatataccgacaagtccgtcacccttgctgaaggtgttcaggcttgggaaaagaatatcaaggattatgcatctcagcagggctacaccgtgaagtagctgcatgattccatagtggaatcggtaaatatgagcgtctgtggattgagggattgtcaatcggcggacgcttttttgagctatcagtggattgcgtggctgaatcgaagagattggaggattgtacgctggctttcgggtgactgacgtacactcgaatgcgtatgtctacgtacgttttcgtacgaaaacgtcaaacggaaggaatcggcttgaaactggtgaaacgactcatcgccatctgctgtgcggccatcatggcggccagtgcggccgcatgcggagccaacgtcgattcccgcaccgaaatcaccgtgtggtcgtgggaaccgagcatgaaacaggtcattgccagcttcgaaaaggaaaaccccgacatccacgttatttggaagaacacaagcggttacgacaatctcaacaacgccattcaagacggttacggcattcccgacgtggtgcaattggaatactatgcgttgcgccagtacgcggtaagcggccagctggtggcgatcaccgggcgtacggaaggctacggcgatttctacacgcccggtacgtgggcttcggtgcagctgaacggccgcgtgtacggccttcccatggattccggtccaatggcgttcttctacaacgacagcgtgttcgagcaggtaggcatcgatgcctccaagattcgcacgtgggacgactattacgaggcggccaaaaagctgaaaagcatcggcgtgtacatcgcagccgattcgggtgacgccagcttctacgacacgatgatctggcttgccggaggccgtccgttctccacctccaacgacggcaaaaacgtgacgatcaacctcaccgacgatgagggtacgagaaccttcaccgaattctggcagaaaatgatcgacgaaggtttggtcgccaccaatctgaccacatggtccgatgggtggaaggaagccgtgggggaggggaagatcgcctccatgttctccggtgcttggctgccgtcgctgctcatgtcgaaccttcccggaaccgcgggtttgtggcgtgtggcacagatgcccacgccggatggcagttataccacgtcggaaaacggcggttcggcgctggccgtgttgcagcgttcgcgcaagcccgaagcgtcatatcgtttcatcgaatacgcatgccataacgcggaaggcatcaaagcccgtgtggacggcggtgcgttccccgccgataacatcacgttgtctgatcgggaattcctgcgcaaaaccaccgtgaccgacgaacgtggcattgaaatcccgtatttcggcggtcaggaatacaatcgcgtgctttcccaagccgcggaaaacgtgtcgaccggttaccagtatctgccgtttgaagtgtatgcgcgaagcgacttccgcactaccgtaggcaaggcctacaaatggtcgagccggttgcgcaaagagcaggacaggctgaatatcatcgcggccggtggcaaagtgtccgacaaatccgccatcggcgacgcgttgaaggaaactgattccgctgatcgtctcaaattgaaaagcggtattgcgctgtggcagaaggatttgaaggaatatggagccaatcagggctttactattcagtaaatagttaattatttgctatagttgtaaaaataatgatggctgtcttgtttttcttttgaattcaagacagccattatttttatatattgagattgtatgttgacgaaaagttattgtcgaatattgcgttcgtaaatatgcagcatgcctttgaaaatcagatcagggtcataaatgtcgatcatgtcggtatcgtcggcgaacacgcggcttaatccgcccgtcgcaaccacgcggaaatcctcgtcgatttcacgatggaattgcgcgatcgtacgttcgatgccgccaaggaagttgtaatacaggccggcctgcatggctggcctggtgcttttcgccagaatcgacgaggggcgcgtgatctccacttccggcaactgggccgtggcatcccacaaggcggccgcgcctgtgcgaatgccggtggtgatgagcccgcaaatcaccgacgcatcggcggtcacatagttgaatgtggtggccgtgccgaaatccgccaccagaatcggcccgccatactcgtagtaggctcccgcacagtcggcaatgcagtccgcgcccatattctgcggattgtccatgcgaatattgatgccggttttgactcccggtccaacaatcatcggatcgatattgaggaatttcacaatgctggcacggaacgaatgcatgaccttcggcaccaccgacgtgatgatcacatcgtccacatcgcccggcgcatagccgctcagccgcaggaattgcgtgatcatcaggccatattcatccgacgtgtggttcgccttcgtggtgatgcgatacgtgccggcgatatgcccgtcatcgagaaagccgatcaccacattggtgttgccgatgtcgaccgcgaccagaagcatgtcgaattctccttacgattgctgtattgacgctatttcctgtgatgttggttgatggttacgatgcttgcgattcagcggattcggtattgcgcaacgctgccaattcggtgaggatgcgttccgccaattcctgcttgctcatcttgttccaatgctcgatgatcggttcgtcggtggtttcgccgggtttcagcacggtcaccacattcgtatccaccgcgaatccggcgccgggagtgttgagattgttggccaccagcatggaacaatgcttggatgtgagttttttcgctgcgttcgattcaagatcctgcgtttccatggcgaaaccgcacaaggtttgaccggcggttttatgcgcgcctgcccatgcgagaatatcgggattcgaagtgagccgcagatcgatattgacgcgcccgttcttcttgattttctccgaagactgctcaatcgggcggaaatcgccgacggcagcggccataatcgtcaaatcggcctgcgtgaaatgctcttgcaccgcgttgaacatttgctgcgcggtggtgacgtgaaccgtatcaatgccgcggggagcgctcaatgtgacagggccggataccagcgtcacatccgcgcccatatcgcgtgcctgctcggcgatcgcatagcccatttttccagtggaatgattggtgaggtagcgcacgggatcaagtggctcctgtgtggggccggcggtgacgagcacatgcaatccgtgcaatggcaacgtttctgcgggctggttcgcacgcagcagatcagctacggcagcttcgatcgcagcaggctcctccatgcgccccttgccaacatcctggcaggcaagcataccggatcccggctccacaatggtccatccaagttcacggcaggcattgagattgcgttgcgtcacggcattctcatacatgtgcacgttcatggcagggcataggattttcggtccctcgctatagacaagcacggtacttgtcagctggtcgtcggcaatgccgcatgcgattttcgcaatgatatcggcgctcgcaggagcgatgacgagcatgtccgcccatttcgcatcatccacgtgattgatatgcagcggatcggatggcgtatgcgcaacatcgccgtcattgcgctgtgctgcgaacatggacgtgcgcgtctgcgtatgcgtgagcgagctgaacgtcaacggggtgacgaactcctgcgcggccgcggtcatggccacgcgaacctcatgtccctgcttgctccagtcggaggcgagatggcaggccttgaatgcggcgatgctgccggtcacgccgagaagaatatgcgccatagccgatattgtccttcccttgacgttggcaagacttacgaaaactgcgtcaagtatatatcgaaccggctgaagcatgcggcattgcggcattgccgtcagatgaatcctgcgggcatggcggattgtagaatcagactttggtgatcgacccgtacaggcggtcaaccagaacaaacacataatcaaacaggagcaatcatgtcgcaatcttcaggtgcgtacggcgaagccgacgcaaccgaacagaagaacgaacaacacaacaatcagcccgcaacctcggcaagcaccgacgcaactttgaacgctcgtgccaaatcgccgaaatccaaggggcccaacaagtggatcatcgccatcattgcagtgatcgcagtggtcgccatcattgtgggcgtcgtcgtgttccgtaacaacaacgcatccagcgataccgcggaaaatggcgcctccaacaccgtgaccattggactgaaactcgcccccgtaagcctcgacattcgccaccagtccggatcggcgatcgaacaggtgctgatcggcaatgtgtacgaagggctgctgtcgcgcgattccgacaacaaagtgcagccgggactggcgaaaagctgggatatttccaacgacggcacaacgtatacgttccatctcaatgagaacatgaacttctccaacggagacacgttggacgccgaagatgtggcctggtccattaaccagctcaaagaacagcagtattacaacgccaatcaggtcgaaagcctcgaaaaagccgaagcggtcgatagcgacaccgtgaagctcacgctcagcacccccgattccaacctgctgtggtacctgaccggacgccccggcctggtgttcgataaggacgccgaatacaacgcgaaaaccgaagccgtcggatcgggtccgtacacggtggaatccttcgattccgccagcaaaatggcgctcaaagccaacccgaagtattggggaagcgcacgcaaggccgcaaccgaaaacgtgatcatcaaattcctcaccgacgataacgcagccgtcaacgcgctgaaaagcggcgaagtcgacgtgctttccccggtgaacgccacgctcgccaaatcgcttgacaccaacacgtatcaggtgtccgcggcggacggcagcgacaaatacgtgctcgccttcaactgcgcgaacagcaagcttgccgacaagcgcgtgcgtcaggcaatccgttacggcatcaaccatgaggaaatcatcgcttcgcgcggtaacgtcgactatgcgctcggcgggccgatcccatccgtggacccgggctatgaggacttgaccgacctgtacccgtacgatgtgaacaaagccaaggaactcatggctgaagccggctattccaccgataatccgctgaaactcaccctcacctacgccaacacgtacggcacggaactcggcgaccaactgcgtagccagctcgccaaaatcggcattgatctcagcatcaactacgtggaattctccacatggctgcaagacgtgcacgccaacggcgactatgaactttcgttggtggaccacgccgaaagccacgacttctacaagtggaccacgcccgactactacttccactacgacggcaagcaagcccaagaactgtatgccaaggcgctcgccgccaccgatgaggaatccagtgcaaactacctgaagcaggctgcgaaagcagtaagcgaggatgcccccgccgactggctgttcggctatcgtgtgacggtggcataccacaagaacgtgcagggattccccagcaagctgagccagacggtgctgccattgtggcagatcaccaaggcgcggtgaatcgacgaaaaacgatggaaaatcggcggaaaacaagtgatgaaaactgatgtgtggcggtgtttgcagcggcatcgttgcggcaccgccacacgttggcgcgatattgttggatagggtaatgacggtgaataggtgcgtatcgctgcaaacgcacggatcgagcgatagaccaatggtggttcaactatgagatttgtagtcaaacggctgggactgttcgtcgtggccctgttcggtctgtcgcttctggtgttcgtgctgttgcgcatgctgccgggcgatgtggctgcggtgatcgcaggaacgaacgcagcccctgaacgtatcgcgtcgcttcgtaccgaacttggcttggacaaatcgtacgtggcgcaatacggcgattggatgctgggattgctgcatggcgatcttggtgtgtccaccatcggaggcaaagcggtgtcggcacaggttgcgtctcgtgcttcggtaacgtttccactgatcatcgtgagtttgctgatcgcattggcgatcggcctgccgcttggttgcgctgctgtgctgacccgtaatgcccgcttgcgtgggctttgtcacggtattgcgattgttgccggcgccattcccgcattatggggcgggttgctgttgattctgctgttctcacgcggttcaggactgttgggattgctgcctgctcaaggttttcccgataatggctggggcgcgcccttgcaggcgttggcttctttgatacttccggcgctcgccaccggcgttaccgcaggcgcgtccattatgcgttacacgcgtgccgccgtgggggacaaggcctcgtctcaggcggtcgacatggccatggcatgcggcatgacccgcaaacaggcggtattgcgcgtcgctttgcgtcttgccacaccgcaattggtgtcggtgatcggtttgacgttcgcccagatggtcaccggtgtaatggtggttgagaatctgttcgcgcttccggggcttggcaccatgctggtcaccgatgttggcaatcgagatctgattgcagtgcagagcgaattgttcctgttggctacgttcttcctcttgcttggattagtggttgatgtggtgcatcgtgcgcttgatccgcgtctgaaagatgccggattggtgtcgggggaggtgcttgcatgatgaaacagtctgctgagaaaactacttcgaaaaacgctgtgaaaaccgtgattccctccatatggcgtaccgctggtggcaagtattcgctgatcatgcttgcgatatggctggttgtgtcggctatttcgctggtgtggacgccatattcgctgcttgatactgacggattcaacacgtgggcttcgccgtccggcgctcacatgttgggtactgatggtgttggcgctgatgtgttgagctggctgatggccggttcccgtacgaatcttgcgatcgcactgcttaccgtggtggttgccgcggccatcggcctgctgctggtggcggccatggtgtctcgccatggcgcattggcttccacgtcggtggttgtggtggatgcgttgatttccattccaacagtgctgatcgccttgatgctttccgtgccgttcggcgcgtcggcagcggtgatcatcgccgcatgcggacttgcatacgggctgaatttggcgcgtattctacgccccgcggccatgctcgccgcacgttctgactatgtggaatcggctttgtggtcgggtgcgagttcgttacgcgtgtttttcacgcatattgtgccgaatacggttccggtgttatgcgttcagctgtcgatgagtgcgggcacgtcgctcttggcggaggctggattgacgtatctgggtgttggcgtcggtgcgggagtgcccagttgggggcattcgcttgccacgtccgtgaaattcatcagcatttatccgatggctgtggtgtggccgggattggtggtcaccttgatggtgatagcgctgaatctgtttggcgatgcgttgcgtgacgccatcgatccgctgacgaatccggcattgcggcaaggtgaagccacccatgttgaatcggaggaacgcgcatgagcgtcagcatccgtaatctcaatatcgtcatcaatggaatgccgattgtgcatgatgtcgatatggacatcgccgacggtgaacgtgtgggtttgatcggttcgtccggttccggcaaatccatgatcgccaaatccatcatgggcttgctgccgctttccgcacaggtttccggcagtattgacatgggtggtactgaaatcgtcggagcgtcggatcaagcgatcgccgatctgcgtggccgttatgtgggcatggtgttccagaatccttccgccgcattgaatccggtgatgaccgtggcgcagcaggtcgcgctgccactgcgtttgcattacgatctgacccgtgacgaacggttggaccgtgtcaaagcaatgttcgccaaagtcaggctgccggaagatgtgctgaacaaatatccgcatgaactttccggcggacaacagcagcgcgtcggcatcgcggccgcattggtcacgtcgccgcgcctgattatcgccgacgagccaaccaccgcgctggattcgatcacgcaacggcagatcgtcgatctgctggcatcgttggtggacgattccggcgcatccatgctcttcatcacccacgatttcgcggtactcaatcatgcaaccacacgctgttatgtacttgctgatggacgtgttgccgaatcaggacaaaccgccgatatcctgcagtcgccgcacactaaagtcgcttcgcaattggtgacttcggcacgtgcgctgtcgttgcggatcgatgccgaaaccaaataaggagaacggttgtgacgggcgaaaacgaaaaaaccacaatgctgcaaggtcgcggcatcagcaaatactacggtgcgaaacaacagcgtcgtcaggtgctgcacgatgttgatatcgacgtacgttcgggggagtgccttgcggtgatcggcggatccggatccggcaaaaccacccttacacgagtattgctggggctcgaacacgctgaaacgggcgagattacgtatttcggcaagcctgtgcaaggcgaagtcgccggcgaactgcggcgtagctgcggattggtgttccaaagcccattcggctcgttggatccgcgttggagggtcggcagatccgttgccgaaccattgcggttgcatcaccctgattggtcgcaggaacggattgcggaacgcgtgtcggaagccttccgcatggtgagtctcgaccctgccgcatatgaaaatcggttccccgtggacctctctggcggtcaggcgcaacgcgtggccatcgcacgtgccattgcggatcatccgaaagtattgcttgccgacgagccgatgagcgccgtcgacgtggccgcacgaacgcagattctcgcatcgttcgctgcgattcgtagcggcgaacctgatatggcgctgatcatggtgtcacacgatttgggagtggtgcagcatatcgcagatcgcattatggtgttgcacgacggttgcgttgaggaatgcggacttacggaaaccgtgttgcaccatccgaccagcgattacaccaaacgattgctggacgcggcttcgctctgatttgtgacactgcgcaaaaagcctgcgatcatgttgaaatccgcatgattgcaggcttttttgccgctatatgaacaggtaagacacgccgatgtcgttacgtgtgctattgtgtgagccatgttcaatttctcttgttgttgctgtcgctgaccaaccgcccgaggggcgcgtggttcatcgaagcataacttgagacagggcattctttttcggcatacgcaacttgcgttgcatgccagagtatcgcagaaatcatcccataaccagtgccttacgcggttggtattacgcggcatatgtggatgaaccgcagcgaaaacaccatcacatgtcccgtttcaaatcattgcaagtgataaacgcgagcttctcgaaatcaaaacaacgaaatcattcatcggaagccaacggaaatcactcttcgcaaggaaacgacatgaccatccacaactccctttccgagctcatcggcaacactccgctcgtcaaactcaaccatgtgaccgacggcatcaaagccaccatcgcagtcaaagtcgaatatttcaatcctggcggctcctccaaagaccgcattgcggaacgcatcatcgacgcggccgaacgtagcggcgaactcaagccgggcggtgtgattgtggaaccgacctccggcaacaccggcgtaggacttgccctcgtggcccagcagcgcggataccgcaccatcttcaccctgccagacaaggtttccgaagccaagcgtgcggtgcttcgcgcctatggtgcagaagtggtggtaacccctaccgatgctggtccggatgatccgcgctcctactaccaggtggcggaacgcctcgccaaagcgattcccggcggataccgcccgaaccaatacgacaacccgaacggaccggaaagccactaccacaccaccggtccggaaatctgggaagccagcgaccatcaggtcacgcatttcgtggcgggcatcggcactggcggcaccatttccggcaccggacgctacctgaaggaagcttccgacggcgcagtacaagtgatcggcgccgacccggaaggatccatctattccaatccgaacgacgtgcatcagtacagcatcgaaggcgtgggcgaggatttctatccgaaagcgttcgaccgtgaacttcccgacgaaatcgtgcaggtcaacgatgccgaagcattcgaaatgacccgccgtttggctgcggaagaaggtctgctggtcggaggctcgtccggcatggccgttacggcagcgcttaaatacgcacgcgagcacgatttggacgaagaccagctggtcgtggtgttgctgccggattccggtcgcagctatatggaaaagatcttcaacgacgattggatgcgtgccaacggattcgccgacgttgtggaacgcacgtccaagccaagtcttgcggagcggtatctgtagaccaccgatcagctgtttcacgatcatgcccatcattcgttcaacccaaaccattcgatattttcaaggagttcccatcatgaccatctcgaccaacaccgaagccctgaacgccactgcactcgccacccgcgccattcacgcaggtcaggagcccgatccgaccaccggagccgtggtcactcctatttatatgacgtccacgttcaagcaggacggtgtcggcggcctgcgcaacggttatgattacagccgttccatcaatccgacccgcaattccttcgacgaacagcttgcagcggtcgaaggcgcgaactacgcgctgagtttcgcttccggactggccgccatcgacgtgctgttgcgtgccaccctcaagccgggcgacaatattctgctgggcaatgacgtatatggtggcacctaccgtttgctttccaaggtgttcgtgccgtggggcgtcggtcttgacgtggtggacatcaccgacacggcggccgtttccgtggcgctcagccagaagcagtaccggtacatttgggtggaaaccccgtcgaatccgctgctcaacatcactgatatcgcggccacgtcagcggtcgctcacgcgcatggcaccaaagtggtggtggacaacaccttcgcatccccggtattgcagcatccgttgtcggatggcgccgacgtggtcgtatattccaccaccaaatacatcggcggccattccgacgtggtcggcggagcggtggtgctcaacgacagggaaatccgcgatgaagtggcgttcctgcagaacgcggccggagctgtgccatctccgttcgactcctggcttgacattcgtggcctcaaaacgttggatctgcgcgtcaagcagcacagtcgtaacgccatgaaggtggcgcaatggttggaaacccgccctgaagtggaacgcgtatggtacccgggactggaatcccatccaggccacgagattgccgcacgacagatgcatggcggattcggaggcatgatctccgtgcagatcgcagccggattcgaagcggcaaagaagttcgccggtgccacggaagtgttcaccctggccgagtcgttgggcggcgtggaatccctgattgagcatccgggcgccatgacccatgcttccgtcgccggtaccacgctggaagtgcccgccaatcttgtgcgactttccgtcggtcttgaagatgctgacgatttgatcgcagatttggaacaggcttttcgtcgtgtttgagataagatcgcagcctcgttacgattttgtgtaatcagtcaaaaaggcagaacgtgcataaatcctcgccatcggattcgccaaaagcgtatattatgctatttcgaatctgcttatagcgagggtttgccatataatactttcgacaacgttcgtgttcatctaccagcgcattctctgtggaatcgaacgcccatgattatcgagacgaggcggcatgctgcaaattcaaggcatctccaaacagtataaaaccggcgacttcgtgcagcgggcgctggataacgtcagccttaacctgcgtgacagcgaattcgtggccattctcggaccttccggctccggcaaaaccacactgctcaacatcatcggcggacttgaccactatgattccggcgatctggtgatcaacggcatttccaccaaacaatacaaaagccgtgattgggactcctatcgcaaccacaccatcggtttcgtgttccagagctacaatctcattccccatcagaccattctgtcgaatgtggaacttaccctaaccatttcgggcgtatcgcattcggagcgtcgagagcgtgcgcgcaaggcgcttgaacaagtgggtttgggcgagcatgtcaacaaaaagccgaaccagctttccggcggtcagatgcagcgcgtggccattgcgcgcgcattggtgaacgatccggacatcgtgctcgccgacgagccgaccggtgcgcttgattccgacacttccgtgcagatcatggatctgctcaaagaggtcgccaaagaccgcctcgtggtgatggtgacgcataaccccgaactggcctaccagtatgccacgcgcattgtggagctcaaggacggtgtgattcgttccgactccgacccgttcgaaccagcccagaacgaaacggctaccgcttccgtgcacaagaccatgggccgcgtatccatgtcgttcggcacgtcgttggcattgagcttcaacaatttacgcaccaagaagggccgtgcgttccttacggcattcgcaggatccatcggcatcatcggcatcgcattgatcatgtccgtttcggcaggcgtgaacacttatatcgacaatattcagcgcgagacgatgactgcttacccgatcagcatcgacgaacagaccttcgacctgaccagcatgatgacttccggccagcagagtgcggacaatcaaggcaagaagcataagagcgacgcgatttatccggatgatgccgccatcaagggcaccgcttcgatgaccagcagcattaccgaaaacaatctgagcgcgttcaagaaataccttgataataaggacagtgacatcaatcggtatatcggttccgcgggaatccagtattcgtatgatacgaggttctccgtattctcacacgatccagacggcacgcttgtcaacgccgatggtgtgacggtgggcaaaaccggcaccaaatcgatggccgaccagatggcggacggttcgctgatgtctgccgactcatccacctttacgtcgacgcgcgtgagcatgctcacgggtaaaaccgaccagaatgctgcaccgagctcgttccatgagatcatgccaagcgctgatggcaaaaagaacgtcggcaaggtcatttccgacaattatgaggtagttgaaggatcctggccaaagaacaagaacgaggttgtactcgtacttgacgagaacaattcattgtcgttaaccgctgtgtatgagctaggcctcaaatccgccagtgaataccacgatatgatgaaccagctcaattccggcgacgatgtgaaaaccgataccaagaagattgactattccgacgttatcgaccgcacgctgaagctgctgccggcctgcgaccagtatgtcaaaggcgataacggccattggacgtacgtgggcgacgatgtggaccagattaatgcgctgatcgactccgacaaggccatcgatctgaagatcgtgggcgtggttaagccggtagaggatgctgacgcaaccccgctttcctccggtgtgggctatacgcgtgctctgaccaatgagctgatcgaccgtgccgaatccagtgaaatcgtcaccgaacagcggtccgataaagatcacaatgtgctcaacggcatgacgttctcgccgtccgacgatgccaccaaagctcaggatgcccgcgattacgtcgcatccctcggcgtaagcagcaaggcgcagatggcgcagaacatgatggcggccgcaggcgcatccggaggtgactcccagcaggccgcggccatggctcagatgggcgaacagcagctcgccgaccaattcgacgcctatatcgccaccgccgacgaggccacgctggtcgccatctacaaccagtacgtgtccaccggctcctacaacgacaatctcgctgatttcggcgtggtcagccgtgacgcaccaagctccatcaacatttacgtcgacagcttcgaagacaagaattccatcaacgacgccatcgacgaatacaataagaccgccaaggaaaaagacaagatcacctacaccgactacgttggtctgatgatgaactcggtaaccaccatcatcaacgtcatcacctatgtgctgatcgctttcgtggctgtgtcattggtggtctcgtcgatcatgatcggcattatcacctatatttccgtgctggaacgtaccaaggaaatcggtattctgcgcgccatgggcgcatccaaacgcaatgtgtcgaacgtattcaacgcggaaaccggcattatcggcctgctggccggtctgatcggcgttggtgccaccgtgctgctcaacttcccgatcaacagcgtgctgcaccacttcatgggtaccaccgaggtcagtgccgtgctgccggtcggtaatgccatcgctctggtgattctcagcgtagtgctcaccctgatcggcggcctcatcccaagtcgtggcgcctccaagcaggatcccgccaccgccctccgcaccgagtagaagcggtttgatactagactgctgcgtatgacagagtttacgtcggcgcgtgacgccctacgcacctacttcggatatgacgccttccgtcccggtcaagaaggcatagtcaatgcgattatccaaggccatgatgcgctcggcgtcatgcccaccggcgctggcaagtcgatctgctaccagattcctgccacgcttcttccgggcatgaccatcgtcatttccccgttgatctcgttgatgcgcgatcaggtcgacgcactcaacgacgtgggcattccagccgcgttcatcaataccacgcaaagtcccgacgaacaggatctgatgttcgcacaggcgttgtcgggacggatcagattgctgtatgtggctccggagcgtttggaaaccgaacgttttcgcacgttcgccagtcgtgtgccgatttctctggtcgccgttgacgaagcgcattgcgtgtcgcaatggggtcaggatttccgctcgtcatatcttggtatcggcgattttctgaaggcattgccggtccgtccgacggttgccgcgttcactgcgaccgcgacggaacgggtgcgtcgcgatattatcggaattctcggattgagcgatccgtccgtcaccgtcaccggcttcgacagggccaacctgtatttcgatgtgatcaggatggaaaggaaatataaggcttcgtgggtggcttcatatattgcggatcatcctgacgaatccggcatcgtgtattgcgcgacccgcaaggaagtggagtcgcttgccgaatcgttgaatatcgccgtgtgcgagctgcgtgctacgaaaggtgaggatgcgacgcgacttggcatggtcgcagtcgcctatcatggcggtatgtcggccgaaacgagggaacgggcacaacgtgatttcgtaaccgaccgtgtgcctgtggtggttgccacgaatgcgttcggcatgggcatcgacaagtcgaacgtgcgttatgtgatccaccataatatgccggaatcgatcgaagcgtactatcaggaggccggtcgtgcggggcgcgacggcgagccgagccggtgcacgttgctgtggaacgaatctgatattgctacgaggcgaaggctgcttgattcggattatgagaacgagcgtttgaccgccgaagagcaggaggtcgtgcgtgcgtcgaaacggcgtctgctcaacgccatgatcggttattgccgtaccacggattgtctgcacgagtatatgaccaggtatttcggtgaggccgggggagcggccgtccgtgatgacggcacatgcgtgggaggatgcgcgaactgcgggaatacgtttgaaaccgttgacgtcacggatatcgcgcgggccatcagccgctgcgtgcatgacgtgaaccagaaggtcggttcggggaagatcgtcaaagtgctgcgaggatcgaaagcgcaggatttgaactatcttcatcctgccgatctaccgacgtacggcatgttgagcgcgacttcggaggcgcagattcgtgacgtgctcagccagatggcgacggatggttttctttccatctcggaaggttccatgccgatcgttcgcttcggtgaacgtgcggcggaaacggtcgcgccgaattttcattatgaaatcaaaaagatcgaacggaagcacgctgcgaaacgtgcagaatcgccgtccgcaggctctcagactatgggatcgtatgtgccgggcgacggagacgaggaattgttcgccaaactgcgtgcgttgcggcttgacatcgcccgcgaactcggtaaacccccgtatatcgtcttttccgataaaacgctgcgcgacatggtgcgtatcaggccggtcaccggcgagcaattctcgcaagtcaatggcgttggtgcgctcaaattggaagcgtatggcgaacggttcatggaagtgatccgcgatttcgttgcatgaatcaggtgacgtgtcagcttgaggaataagcgtatcgattattgcaaaaccatacgttttatatgatacgtaacacgttatcggcaacatgtatggcggtgaggttgacgtatgccggcaaaacggcgacagtagagacgaacagttgttgaagaaaggattgatgatggcagaagacaagccggttgtggaaagcttccagctcgaccacaccaaggtgaaggctccgtatgtgcgttatatcgacacgcagaccggtccgaatggcgatgtgatttccaattatgatttgcgtttggtacagccgaatgagaatgcgattccgaccggtggcctgcacaccatcgaacatacgattgcggtgctgttgcgtgaacgtatcgacggttatatcgattgttccccgttcggctgccgtaccggtttccacctgctgacatggggcgagcattccacggaagaagtggctcgcgcgttgaaggaggcgttggaattcatcgcatacgaggccacatgggatgacgttcctgccaccaccatcgaaagctgcggcaattaccgcgaccatagcctgttcacggcgaaggaatggtgcaaggatattctcgccaagggcatcagctctgacgcgtttgagcgccgtctggtctgatttgcgtgcgattgcacgtcttttttcgggcatattgcgaatactgtgccgtgggcatggtatttttgacgctcggaagaagacaaggtgatgcaaaggtgaacgagatgggtgaggagagcgtcattacctctgaacggcg

SEQ ID NO: 848 - DNA, 36377 bp, Unknown
  gut microbiota DNA sequence
atcatccggattaatacggtaatccgtatgctcgttgccccagaagcgcagtcccgacggcgtaagctggtctccacggccgtctgtggaacgcctatacaccacttcaccggtttcctcatccacgaatctgcggcaatatggatgcgtttcacgaagttgtttcacgcttggcgccggagcattcaccgccggctcgaaaggtaccttcaactcgcttagaccatccggagccggaggcaggcagagaccgctatgagccatatccaccgttaccggagccataaccgccgagggccagatccaaatccaatagctagtggataacgacacgcgcaaccgatgtccggctggaatacgttgggacacgttcttcagcggaatggccacgtcatacgattcaccaggcacacatggctcaggaaactcgtgcgaattcctatggcacagattgagattcccccgcgtaatcagttcggacgttccgtccggccaaacgtcgcaaagacgggcggacacgaacccctgccgtccatcaacgcctacgcggagcttcacaaccggctgaccggaaatgaccagatcctcttccaaaggcgcgctggtgaagcataggctcctcttgtcatccggggtctgctcctgcggcaaatcaatcggcgatcccattggcagccaagtatccacctgcgttccagtcaccaatgcgctgcgatgtttcacacgagaggcatccacgatttcggtgaagctttccggatcagtggaaggctcgcatgcgagcgcgccgccgaagggcatgatcatggcctcagcatcagcgcctgtatggaacgcgtccgcctgataccaagcaccatctctgtcggtcatgtctggggttgagtgcgccgaatcctgtgtgtagaaacgaatcgttggatcgttctgcgccccgttattgatgcctttgagccatttgtcccaccatcgcacgcatgcctgcaagtagccgatggaagggcctggcacgcctcgttccggccaagtatgcccccacggcccgatgatggcctgattgcacggcgttttgttcaaccccttcatgagtcgaagaatcgcgtccgtgtaggagtcggcccatccgccgaccgccatgaccgcgcattggatggcatcgtaattttcgattacggaaccttgcttccagtaggcgtcacggcgttgatgcgacatccacaattcgctgagattggtgttttcgctcagtcgctcgatgaaacgggatttccacgaatcgcctacgagggcgggatccggcgggcgcacgttgaattcgtgcatgatcgccccccaccaattcatgtagaacgcgagcaaactaccgcccatataatgcacgtcattgtcgtatcgatcatcggtcgagcaggtggtgatgatcgctttaagatgctctggcgtatgcgaggcgacttgcagactgttgaatccactccaggaaatgccggtcatgccaacgtttccattgcaccattgttgggcggcaagccattcgatcacttcgcagatgtcgagttgttcccgtggcgaatattcgtcgtcgagcacgccttcggaatcgccgctgccgcgcaggtcaaggcgaacgcacacgtatcctcgttccgacacgtatccgaatcggaccgcatcgtcgataaggcacacgtcatccttgcggtatggaatggcttccagcacaacaggaaacacttccgccacgccttccatcacgacttccgtcggtcgaggcatccacattttcgcagatagtttttttccgtcgcttaaacggatttcgacgtggtcgagcacgtccacttcatagagtttttgcgtcatgttcgtacctccttcatgcttccttttccgctggcgcaacccacatgttgttgacgttccattcggcgcgaagtcgatctccaacggcaacgcgcgcatcgttggacgaaatgtgggcgaggatttcaacgcttccattggtgagcatcgttctgtaatgggatcccatgaaggtgacattgtcgacggccgcgtcaagaccgactacggcatcgctgccatcagcggttcccgccgtgtgcacccgaatgctttccgggcgaatgaccgcaacgattcgatccccgatcttcatgccgtcaacgccatggcaaacgcatgtgattcccgcttcgggaagatcgacctgatattggccgtccgcttccacgttgacaatcgaaccggcgatgcgcgtggatgcacccaggaactgcgccacgaattcgttcaccggcttgcgatacaaatcttctggagtggcaacctgcagaagcttgcctccgcgcatcacgccgatgcgatccgacatggcaaacgcttcgccttgatcgtgggtcacatatacgaaggtgatgccgacttcgcgatggatctgtcgcaacaccgtttgcatatgctgacgcaatctcaaatccaaagcgcccagcggttcgtcaagcagcagcgctttgggcttcaacaccaacgctcgagccaatgcgacacgttgctgcatgccgccggaaaggctgcccggagacacttcctcctgcccgcgcagctccacgagatccagcatttcctcgactcgtgtcttgatttcctgtttgccgattccacgatttttaagaccgtacgcaatattctcggcaacggtcatatgcgggaaaagggcataattctgaaaaacggtatgcacgctgcgcttattggcgggggtatcggtgatttcctcattatcgagggtgatacttccggaagtcggaaattcaagaccggaaagcatgcgcaacgttgttgtttttccgcaaccggacggtcccagcaaagagaaaaattcacctttgttgatctcaagagtaacgtggctgacggcttgtttttctccgaaatcacggcacacatcgtcaagcaggatgcccgcgaccgggcctccgccgatgcgctcatggcctggagtggtaaatccgatattcatgattacttctttcgttgttacgcttgttccgccattcagctgcccttgacggcgctgccggccacttgtttgataccgatgaatttcacgacgatgagcaataccaagaagttgaatacgctcataatcacgccgatggcgttgacttcggcggatacgccctttttgatcatgcccatgatgagcaatggaatggtttctgcggaagggcctcccaggaacgttggcgccacaaccgaatcaagggaaaaagtgaatgcgagcagtccgccgacgaaaatcgacggggcgagcaacggaagcgtgatcgtccacacgatacgcgcttggcttgcgcccaaatcctgcgccgctttttcatatagtcctgaaatattcgtaagtcgtgcggaaatcgtcacgaatgcgtaagcggaataaatcagcgtttgcgcgataacgacccaagctggtccaagtttgaaaccgagcatgcgggcaacgacgaacaatccgacgacaattacgatttccggcaatgtgatgcgtaggaaaaccaaggaatcgtacgcgcctttcgccttgccgctcattttcgacattccgatcgcgccgagcgaagcgagcaccatggaaagcagcatgaccacaacggcaatgccgatgctggtcaggaacgcactgcgaaaacgttcgctcgacagcgcttcgccgaaccacgtgaaggtggctccgccccaggtgagcagggtcttattggcgttgaacgcatctttgaacaccacaatgatcggcaggaacaggaatacgaaaaccactgcggacatgaccgcggaaaaccaatgttgacggagtttcatcgtactttcctccactgcatgatctgctttccgatgatgatgagcagcactgcgaccatgagcacggacgagagcgccgcaccgcgcggatagttgcctgtggtttggaattcgctggcgatgacattgccaatcatcaacgttttgcttccgccgaggattgccggaatggtgtattcgccaagcgctggaatggccacgagcagacttcccgcgacaatgcctcctccgcaggatggcatgacgatttggaagaatgcctgcgatggtgtcttaccaagatccgcagccgcttccagcaacggctggtcaagctgctcaaacgtggaatatacgggcagaatcatcatcggcagatatgagtagaccatgccgatgatcaccgcagtggtcgaatatcgcagatccgtgccatccgcaacgagatgcatatgtaccaaagcctgcgtgatcacaccgtgcgcacctaacaattcaagccaggcatacgtgcggaccacaaacgacgtccagaagggaataacgatcgcgccgatcatcagcaactgcaattttcctttgcaggacgcgatgaaatatgcgatcggcagtccgagaagcaggcatcccacgaccgtagcaagagtgatgagaatggatctcagcaacgcctgcagataaatggatttgaaaatatctccataattgccgagattccaattcgtggtaaccgtgaatgtggtcagatcaatcttccaaaaggaatagagcacaatgaccacaagcggcactgcgaagcagcatagcgtcaggataccgtcgggaaaggcgagaatcgcaccgacgacaccttcccgtttgcgattgttacgacgtgacatgatacctgcttctttctcaggaattctggatttcctgccaggcagaagcaaccgcctgctggatttcggcgctttgcagggttccgtaaatcgtcttgcctgcggtttccgggttcaacgcctcattcttggtgagggattcatccagggagtccgttaccgactgcatgatccagctggcctgggtcgtgttgatgaaatcggcgtaattggtcttttcaaggtggaaatccatgagcttgtacaccttgtcgaggtttgcggtgcccttgagcggcacccaaccatcgaggtatgcaggcatgccttcgctcggcgacacccatccgaccttgtcgccgttggctttggcagatgcgtaatcgtagtcgtaaacgaccgcgatggccacggaaccgtcatagacctggctggcggcgtccgaatccgcaaacgccttgacatattgcttgatatcgagcacggcctgcttggcttcttcaatatcgtccacattggtggtgttcacgtcgtgcccagtggccagcagtgccacatcgatcacgtcggacgaatagctgggcatcaggagcttgcctgagtagcttgccgcctgttcgaacaattccttccaagaagtgggaggattggagacgagttccttgttgtagatgatgccgatcttgccctgttcgaccggaataccccaagggaacgcttcggtatattggctatcgatattcttcagattcgggacctcggaagcgtcgaattcctcgagaagtcccgcgttgtcaagcgtttcggcgactttcatgcctgcaaggctcatatcgtaggagccggaattctgacgaatgatgttgacctatgcggaatcgcctccgtcgggagtggaaacctgcttcaacgtgtatccggtttcgtctttgaaggctgaagcctcgttttctccgatccaatcggggtaattcatcatggtgatggtatccgatgcggctttgctttccgcaggagctgaagtcgaaccgccaacttggcatgcgcacagcgagagtgccatggcaaccgcgccagaagcggcgataatgattttcttatgattctttcccatgagtttttcctctcactcaatgtcagattgtctgacaataaagctgaagctatccttgatttgttacgaaagtattaggtctaaaatcgttgcaaattacaagttcgtaacacatctcacagaaacttgctttcaacagacaaatgaaatttttttcaaggagacagagcatgactgtcagactacgttccatttttgatgagatcccaacatatcgtcccggcgaatgcccggacgaagaggaaggcgatcagctgattaaaatgtcatccaacgagctcccctggggaccgtcggaacaactgaaaacctcactgctttccgcatttgagtcaatcaaccgttatccggatttctataagcagaatctttcgatcgaacttgccaaatacacgaatatgcagccggagaacatttttgccgacgatggttccggcactctgctgcaggatctggtacgtctggtcgtcaatgatggggacgaagtggtgttcggctctccgtcttttgccgcatacgatattgacgtgctgctcgcgggcggcgtttcagtgaaagttccactcgacgaatcctggacgtacgatctcgaaggcgtggagcacgccattaccgacaaaacgcgcatggtgctgttatgcaacccgaataatccgacgggaaccttcctcaccaccgcgcaaatccgcgtatttctgcagaaaatcgagaacaccggcatactggtggtaatcgacgaggcatatcgagattttgtcaattgcgaggattgtgaagcatcttcgagtctcgtttcggaattcgacaatgtggtgctgctgcgcaccttctccaaggcgttcggcatggctggattgcgtcttggctacggtcttgcgcgcccggaaatcgtggatgccgtcaacaaagtcgtggccgaattctcggtatcctcactctcccaagcggttggagtcgccatgttgcaagacgagacgatcatggctgatctgaaggcgaaacggaacattatcgtcgcggagcgcgaaaaatatcaagacttccttcgcgagatgaaggtggatttcattccatcccaatccaacttcattatgattccgggcgattccatggaactgttcgctcaattcaggcagcatcagctcatcgttcgtccgtttgacgaccctgctggagtgcgcatcaccgtaggcactcccaagcaaatgctcaaggcgcgggaggtatgggaatgaaatccattgccgtactcacttcaccggaagtgcctcttccagccgaaggttgcgcactacttgatacgctcccctgcacaacaaccgtctgcactcccggtaacgccgcggaagtggtcggcgcatcggaggcctgcttcgtttgggatacggatctgacctcctatatcgagtcccaatgggatgcgtttgcccacctctcgtggatgcatgtcgcagtcaccggagtggattcctttcttttcccgaaactcgtcaattcgaacgttctcttgacgaacgcttcgggaatctacaacgattcgatagcggaattcgtactgttttgcatactgtcacatgccaaacagcgccgtcttctggaatcgcagcaacgcaaccatgaatggcggcatgcaacgagcgcaaccgtcaaagaatccaacgcggttatctacggcgtcggaagcattggacgcacggtcggcaaaacactcaccaagcttggcctgcatgtgcgaggtatcgacccctataccagcgttgcggaaggttttgaatgtatttaccgcaatgccgacatgcgcgaagcggccgcttggtcggattatttcattatctgtgccccactcaccgagcagacccggcatagcgtgaacgctgaaatctttgatgccatgaaagcgagctgccatgtaatcaatgttggacgcggtcccattatcgacgaaacagcccttgtccaagccttgacaagcggttccataggatcggcaagtctcgacgtgttcgaaaccgaacctcttccttcagacaatccgctgtgggagatggaaaacgtacacatcagcccgcatatttccggcgatgcgggagatttcgaacttgcattgattcggcaattcgcggatcttgctgatatgtggtttcacggtcacgactttccatcggccgtggataagaagcgaggttatgcccatacccggcaaaactgaatacgacattattcctgcgtgtgttcgtattcactatttcttgtgtttcacgtgaaactctgtagatgatccggcttggaaagcacttgataatacgccataagaaaaaggaatgcgtgaaatcgtgcagtgcgcggctggttgctttggtggttcgctacagtgggaatatgagtgatttgcgagatgtgattattgtcggatccggccctgccggatataccgcggccatatacttgggccgggctggattcaaaccactggtcatcgcgggtgcgctgaccccaggcgggcagctcgtcaacaccactgaagtggagaattttccaggtttccccgacggcgttatgggaccggaactcatggataatatgcaacgccaggctgagaagttcggcgcggaaatcgtttgggatgatgttgtttccgtgagcaacaatgacgtcaccggcgtgaaaaccgtgagcgtcgatcagggagacgtttttgaaacccatgctttgatcatcgcaaccggatcggaatatcgcaaactcgacatccccggagaggcggaatattccggcaagggagtgtcatattgcgcgacctgcgacggcttcttcttccgagataagccgattattgtggtcggcggcggcgatagcgcattcaccgaggctgattttctttcacgatttggatcgtcggtgacgttgattcatcgtcgttctgaattccgcgcatcgcagattctcgtggaacgcgctcagcagaatccgaagatcaccatcgtcacggattccgtggtggaggaaatcttgggtgacgacaatggagcccaatccgtgaacattcgcaacgtcatcaccggagaaaccagcacgattgccgcaaacggcatttttgtggcgatcggccactcccccgccacagcttttattgacggcattgtgcagcgagatgcgggtggatatattcaggtggacggcgccagcacacgcaccagcactgccggcatttttgcagccggcgactgtgttgatagtatttaccgtcaagcgatcagtgccgccggcatgggctgccgggccgccctcgatgcccaagcctacctccagcagtaacacttcccatcacggtcataccctacaaaaacttgaaaaacgagcggaaggggcggcatattctgttcacgactgtaagcttggccaaacggccttgagtgtgtcgtgaacagaatatgccgccccttccgcggacaccaaaaaacttaagaaatactatttttcggcagtgggcatgagcaggtcgacaatgcgcttcatgtcgtcttcggatttgaacacgatttcgatgcgtccatgctccttggatcccttgatcgacaccttcgtgccgaacctcttttcaagaccgacctgcatcggcgttccggcccaagggttcagcttattggttttcgctttcttcggctggtccgattcagcgaccttcatcgacacgatttcctcggtgctgcgtaccgacaacccttcggaaataatgcgcgtcgcaagctgttccatgtcagcttccgtcggtaatccgagcaatgcgcgcgcatgaccggccgacagcaagccggaagcaaccttcttttgtacggtcgcaggcagattcagcagtcgcagagtattggcgatttgcggacgcgacttcgacaccgactttgacaattgcgcctgcgtcaagccaaaatcgtcgatcatctgctgataggcggccgcctcttccaatggattcaacgcaacgcgatgcaggttttccagcaaagcgtcacgcaacatatcgtcgtcggcagtggttttgacaatcgcaggaatcgttttcaaacctgcgatctgcgatgcgcgccaacgacgttcacccataatgagctcgtacatgctatccatgcgcccgtcgaacatattgtgcgactcggcatctttagcggcgttctccttacgagcagcctcaatctgcgcgagtggacgcttccgtacgacaataggctgcagcacgccgacttctttgatggaatcggcaagctcacgaagatcatcctcatcgaaaatggtacgcggctgatgcaggttcggtccaacatcactcagtcgcaattcaacgagataaccgccctgcaccggcaacagttcaggttcgtcattcttcttatcttcggtcttttttaccgcagcggtttcacgtgaaacactttcctgcttcacttcggaagtggcaacaggactggtggaaccgaagaacatgtcggcaggatgagcagtctcattcaacgtgatggaaggcatactggctcgatggccactccccttcttggtttcacgtgaaacgttcttcttcatgtcatggacggcatcgacggaagccttggcggttgccacggaactcttgaccgcggtcttccccgcggattgcccggcaacagtcgcaccaccggctacgttttctgaaacctttccagcgatcttgttatcagcctttgcacccgcaacagccacagccggttcagtagtggcttccgatttcgccgactctcctggaagagacggaaacagtgcgccgagacccttgcctaaacgtgatttcgtagccatgatcagttctcattccttcttgcatcgatagccttcagcaccgtctgcgagcgacgtgcgatttccaatgcggcctcacaataggcaatcgctcccattcccttgggatcgtaggcgatcacgctttgattgaagcttggagcttccgatattttcaccgttcggggaatcgtggtattcagtacgatagtcggataatgatttttgacttcgtcatgcacttcacggctgagtaacgtcctcttatcgaacatggtgatcagcatggtggaaaccagcagcgacggattgaaatgctcctgcaccagtccgatggtattgatgagctggccgagaccttccagcgcatagtactcagcctggatcggaatcagcatctcatgcaccgcacacatggcattaattaccagcaggccgaggcttggcgggcaatcgataatcacgtagtcgtagtgctcctcgctggtttccagaaactcgtcaaccgcggtcttcagaagcacattacgattttccatgtcggcgacttccagctcggcaccgctcaaatcgatcgaagctggaaccacatcgagcagatcaaaatcagggcatgtgcgcttgacttcggcgatggtcttcctgccttcgatcacgtcgtacaccgaaggcgcccccgacgcatgcggagcgcccaacgcggtcgacgcattgccctgcggatccatatcgatcagcagcaccttggaaccgaactgagccaacgcagcggaaagattcacggccgacgtggttttgccaacgccacccttctggttggcgaccgcgatcaggcgcgtctgctccggctttgggcaaacggccttctgcaaggtgcgatagcgagtcgattcgtcggcaatctgcgaaccaagaggagaatccgatcctccgaaaattcgtttgatggtttccgttgccgattccatcgatgtcaggttatctggtccttcaggtccagtcatacactagccttccttacgatatgcttaacattcaagtttcatcattcgggtggacagaatcagctcatctcacccactgtgcacaaatgtgaatagctgtggatagtcggtggataacttacgttgttcgcaaaaagttatccaccgatctttcgttgctacttcaacatttttccgccgctttttttcgtcgattttccagttgtggacaatgtgcataactcaccgaaatggtggataacttactttttatccaccatgagcacatgggtcgattccaagcccggaccaacctcggcatccaccacccgcggacgaatgccaccgcatttggcgatctctttggaagccttttcgatctcctcttgcgcggaccgccccttcagtgcgaccaaacgtccaccgcgctcaagcaacggcagcgtccaccccgaaagtttggtcataggagccacggcacggcacgtcaccacggcaaacggatgtttcgcctgaataggcttgccatccaaatccagtacaggaccgcgaacggccactcccctgccgttcttgccgcctttgccgttcctggcgcttccattgccacgattgccgccttgagcgccagtagcacccgcaatggcctcgatcatctcattggccctggcacgcaccacggtaacgttattcaactccatatcggccacgcactcgttcagccattcgacacgacgttccatcggctccacaagcgtgaaccggtgatccggcaggcaggcggccgcgacaataccgggaaaaccgccgccactgccgatatcggcaaccgtcttgaactgcttcttggccgtggcttcctttacgaaaggcacaatggcggccgaattcagaatatggcgttcccaaataatgccaacatctcttggcccaatcagaccgcgaggttcgccttcttcggcaagtttcgcatggaaaacacgaagcttgcccaacgcatcccccagcacttcctcaagcatcggcgaatcatcaagttcgtctgtcacatcactcatgggcaccatcctatatcctgctcttcctcattgccggtattccagcaagtacttcccgaccattgacggcaatatcacatgtccggcgcacagccagcatgaagtcactcaaaaaatcgcaataaaaaagcgccaccaaatggtgacgccatgtttcacgtgaaacgagccgaactcaggcctcatcctcgtcttcagcatcttcggcagcggaagccttgagatacaccgtgacgtaacgacgcggttcctcgccgtgggaacgggacttcatgccctcctcacgcaccacatcatgcacgatcttgcgttcgaaggagttcatcggcttgagatcaaccggctcccccgtctcgcgcacctcgtcgatggcgtccagcgcgatgtcgtgcaaacgctggcgcttgcgcttcagatagccgtcgacgtccacaatgagatgggaacgctcgccggtcttctgctgcacggccagtcgcgtcagctgctgcagagcgtcaacgacttcgccgttgcgtccgatgagatgcttgatgtccgtatcatcatcggcgacgatttgcacggtagggcgattgttgcgcacgcccatttcgatatcgccttcgtaatcgacgatatcaagcagtccttcaagataatcggcagcgatatcagcttcctcgttgagctgatcgatggtcttttcctcatcttgcgccatagtggttgtactcctttgagcggggtttctattactaaagtcttattgtgtaaagtctaattcctgtttaccacgtcgacaataaacgctgataaaagtggtgtgtcccgcgtttcacgtgaaacacgggacacacttttactcacttctttttctttttacggctcggctgctgacgctggtagccgctcttttccttcacttcggcggcttccttggccttctgcagcgcctcttcctcgagggatggcagaccggccttggctcggcgggcgttctcatgaacatgatcacgcttttccttcgcttcggcggccggagatcccggagtcgggaagacgtggatctgccagatggaacgcaacagattgcagatgttgttggtgagccagtacaccagcacagcgaacggcatggcaataccggagaaaatgtacatgatcgggaacatccacaacatcatcttctgcatcatttcggtctgcttgtttgccgcagactgagccatgttacgcttcatgctgttgtactgcatgaaccacaggcagaagcacatcaatgcaacgaagatggcgataactactttgccatgcacggcggcggtcgtgaagttatcagccacgttcacaccgaacactgtggtggacgtgaactgcttggctgtggcgatgtcgaaagcgccaagaccctgtccgtccctgaatttgccgcgtgcgatgtacggaatggctgacagcgtatagaacatgcacatgaatacgggaccctgcacgaacatagggagcatggaagtgcagccacccatcgggttcgcatcattgtcctggtagagcttcatcatctcgcgctgcatggcttccttgctggcgggatcgttcttgcccttgtatttgttttggatacgctgcatctttggctgcaggacggtcatctgggcctgcatcttgcgcatacccttcatggacttgtagaacagcggaaaaacgcatgcctggaccacaagtactaggaatacgatggacatgacccacgagaaaccgatctcgttcatgcccagcatcaccaggaacttatggaatacggccatgatctgcgtcatgagccactcgacgggatacaggagcttatacagccagccccagaaaccgctgtcgaggaggaattgattttgattcattacaggccagtctccttatcgcctataggtttttctacgttcagaggcgtgagccgaggttcctcgtgtgccttcgaccacgaacatctgtaaaacaaggaataaagctgcggaacgtcgtcaattcccccacggttccactgattgcagcgaagaaggcgcaataacgcaagaaggccacccttaaggcggccaaatcgttcaatcgcctgaatcgcgtaattggaacaacttggataatatctgcagcaaggcgcggtattcgcggaaatatgacgttggtaccagcgaatggcacgaatcatccaatttccgttacgaccggcgttcattaccgacgcacggccttacgattcaccgcttcaaaacatgctgcgatctgctgttccaacgatagaaaatcggcatgcgcagcacttggcttggcacgcaacacgatatcgcaggattcaggtaaggcagattcgtactttcgtgcaagcacgcggaaacgacgcttgacggcattacgcgtcacagcgttgccgacagccttggaaacggccaaaccgacacgtcggccccgcatcgccgcagaatcgtcgataatggcatcgtcgtgcaccaaataatgcacgacgatgtcttctcgcgataccctacgacggcgtttgagcaccgcgacgaaatcgcgatggcttttcagccgttccaccgctctatgccgttaaatcaggcagcgagggacttgcggcccttggcgcggcgacggttgatcagagcgcggcctgcgcgggtgcgcatgcgctgacggaaaccgtgcttcatgtgacgacgacggttgttcggctggaatgtcctcttcataattaatgctcccggtgttttttgccatgccaaggcacggctcctcatgagtcaagctctaccaagttactctgacccctgaacagagatgaatgcgcatatcaaatccttcacattttcatggggattctccccacaaaacaatccacagaaacgttggtatgtcgccaaactccccacaaaagttatccacaaactacaatgatgttattcacaattcagtcttttcaacacgcttaccggtggataacttggggaaaagagagtacaaataaacagttgcacacttggaaaaagtctgtcgagaaaggggaatccgtggccgacacgacaactgaccctctcgagcaggctcggggagtctggtccgacgcgctggcgttgttgcaccagaatccggcgctgtccatccgagataaaagctggctggaaaacgtctttcccgaaggcatgtggggtcctaccattgtcttatgcgtgccaagcgcggccgcacagcagacgttgcagaacgaattgaaccagcccctgctggaagccttgcgggaagccgccgaacaggatattttccccgcattcaagattgtggaaaagaaggaaccggcccaacctgccgtcgaggaatacccccacttctcccccgcgccacatgcggaggaaaccacgcaggggcagctgccgattccggttgttatgccgccggagcgccacaacaacttccaacgcggccaaaacaggcctttgctggatcctaagacccatttgaataagaacgccacgttcgacaccttcgttcctggcgattccaatcgtttcgcacgtaccgtcgcgttggccgtcgcggaaggttccggtcacgatttcaacccgctttgtatttacggcggatcaggattgggtaaaacccacttgctgaacgccatcggcaattacgcactggtcaaggatcccacgctgaaagtccgttatgtgaccagtgaggaattcaccaacgaattcatcgaagcgttgggtgacaccaaccagaattccggtcaaatcaaggaattcaaccgtcgctaccgcgaagtcgacgtgctgctcatcgacgatattcaatttctgagcggcaaggacgcgacgcttgaacagttcttccatacattcaataccctgcatcaggcgaacaagcgcattgtgatcgcatccgatgtgcctccgaaggatctgcagggattcaacgaacgtctgatctcccgtttcgaatccggcctgaccgttgacgtcaagccgccggatctggagacgcgcatcgccattctgcgcatgatcgcccacggcaccaacgttcaggacgatgtgctcaacctcatcgcggagcggttcaccgagaatattcgcgagctggaaggcgcgctgaaccgcgtgaccgccatggcatcgctgagcggccagccggtgacccgcgcgttggcggaacagacgttgcaggactttttctctaccgatgtggagatcaagcccaccgacatcatcacccaggtggccaagtacttctacattacgttcgatgacattgtcggacgttcgcgtacgaagaagatcgcgctggcgcgtcagatcgccatgtatttggtgcgtgagctcaccagcatgagcctgaacgacatcggccaggtgtttggcggcaaggaccacaccacggtgatgcatgcatacacccgcatcagcgacgagatgcaggaaaagcaggagatctacaactacgtgacggaactgaccctgcagctcaagcagcgttccggcgaaaaataacgttttctatgcgactttgcgcgtttgcatgtgttttcgtgcgtctcaaaaaacgattttaggcgttttctgcctttctcaggcgattttcacaagccaagtatgagtatcagtaaattctttatcagctgttttaccgaccatcctgacacgccggcctgtggaagatttttattgaagttatccacatggttatacacaaatcaatgatttctcggtggaaaacccgttggaaacgccagaatcgccggtggatgaattgtggactatccacatggttttgtggataactttttcaaagcgacgaggctgtgtataacctgatgatttgtccacacttcgtccaaaagttatccacaagcaatgagatgttgcgagccattgcaaaacgtgtggtctgagcacttacccacattatccacaggccttattatgacgaatgtaggttgttatacgaaattcatcatcgtcgtcataagtggggaattccccacgcttcgtcaaacgccgacagtctcgctagaatgacttatggaccgaacgaaacgaggaaactagccatgaaagttgaagtcaattcccaagcgctggcagacgcagtaacctggaccactcgcgtgatcgacgctcgtcctgcatcccccattttggcaggcattcgcttggaggccatcgacggcaccctccagctttccgccttcaattacgccatttccgcacgccaccatatcgaagcaggcgttgatgaaagcggatccattctggtgctcggcaagctgctggcagatatcaccaagtcgcttcccgccgcgaaaacctacctgtccactgacggatccacactgaccatcacgtcgggcaagtccaccttcaccatgcagctcatgccggataacgaatatccggatctgccggtggttcccgccaaactggggcaggtggacgcccaaaccttcgcccaggccgtcgcccaggcgtccgtcgccgtttcccgcgaggagaaccgtccggtactgaccggcattcgtgtgcagttccaaggcaacaaggtgatcatgagctccaccgaccgattccgcttgtcgcgttcgagcttcacctggacgccggaaaacccggacatcaacaccaccgcactcgtgcgcggcgcactgttgcgcgatgtggcccgttccttggacgagcatcaaaacatcgtcgtggatttcgatccggagaatccgtcgctgctgggctttgagaacgccggacgcgtatccacctcgcagctgatcgacggcgaattccccgcggtggaccgcctgtacgctgacgaatacccgattcatgcggtcatcaacaagcaggatctcatcagcgccatcaagcgcgtgtccctcgtggccgaacgcaacgctccgatccgcatggccttcaccagccaggaactcacgctgaccgcaggctcggtggatgaagcccaagccaaggagatcctcgacatcgacatggatggcgaagacatcaccgtggccttcaatcccgcctacctgatcgaaggcctgagcgccatcagcgagccgttcgtacgcatgaagatgaccaccgcggtcaagccggtggaattcaacggccagcaggaatcgaattccgaagaatccatggactaccgctacctgctcgtgccgatgcgcttcaacagctgaactaagctgacctacacgaaaacgcggatacatcgcaaaaaatagggctgaacatggctgttattgccagttcagcccatttgcatgattaattgcgattatttacgtaagaaattcgcactatctcaaggatcttgcatgtatatttcccgactggcactcgaccactaccgatcgtgggaacattgcgtgctcgatttcaaaccgggaatcaacattctgcaaggtgccaacggactcggcaaaaccaatatcgtggaagccatcgaagtgctttccacaggatccagccatcgcgcgtcatcatcactgccattaatcgaaaaagggtgcacgtcggccaccatccgagccaacgtggaagacggtgaaacgcagcacacctacgaggcgaccatcgtggcacggggtgctaaccgagcgcgcattgacggcggaaaatctcaatatatgagggatctcatcgggcgcacgccctccgtctcctttacccccgaagatcaacgtctggtagcaggggatcccgcaacccgacgcaacttcatcaaccaggccgcgtctctgctgctcccccactatgcgcagaccctgcaacagttcacgcacgtggcgaaacagcgcacggcactgctcaaacaactcggcgacggcacgaatctcgacccgcaatacggccagcaggcggtcttaagcgggctggaaatctggacggggcaattcatcgacctcggcatgcagctgacgcggaaccgcaacaacgtgatctcacgcttggaagagccttttgcgcggatctacgcgtctttggcgggagatgacgaacgggcggcgctcgcctacgagccgtccttcgacgaagtgatgctgttcgacgatccggccgcggagatcagccgccatttccaacgcatctaccccggcgaagtggcgcgcgggcagaatctgatcggtccgcatcgcgacgacctgactttgctgctcaacgatatgaacgcacgcgaattcgcgtccaacggtgagatgtggaccatggctttggcgttgaaaatggcgctatatgaggcggtttccgcacattttgaaagcaagccaatcgtgattctcgatgatgtgttcgcacagcttgacgaggcccgtcgtgggcagatcctcgattttgcgatgcggcaggaccaggtgctgatcaccgtcgccgcggcaagcgatattccgcgcatggatgctgggcgctttcacgcggacgcgcatgtgatcgacgtggccgcgttgcgcaggcaatcgcaagatggacagcatgacgatttgacggcgatgatggcgcaacttgtcgcgggacgggaatctgcaacgcaatcgtctgcagcgcaacagtcggtgaatcgacaggagcagcgctgatgccgaatcctccaatctgcgaaacattgcatctcgaccaacgcaagttgcccgccgaagtattcgaacgtatcagccgacgtgccggccgatataaggaacgtgaggaacgtgcgcggcaggcgtgggagaatttcggcaaacccggacgcgacccgcagacggtcggcaatattttcaacgtgatcgcaacgcaaggttcttggacgccgcatctgaaaatcgcgcagatgcagaatcattgggatcaggtggtcggcgtcgaaaacgcgcgccactcctaccccgtcgacctgcgcgacggcattctgacgatccgatgcgacagccccgcatggaccaccaccttgacgtacatgattccgctgctgaccgacaccattcgccgtaggctcgaggggctgaccatcaacgaggtgcgcgtcaccggcccacaacaacagggattcagccgaggacgaatgacacgaaggccgcgatattagcgcgacaccacgtgctatcagacgttcgttgaaggcgcttcgtcgaagaattcccctgcgacgcttccaagcgggccgttcgcaacggtcgaatgttgttttccgaaagcgaaaaaacaggggtaaacggctggatttcaaggataaatgcctctggcgctctgtccccctccatgagtagaatatcaagcagtgtatgtaaacgcctagaaggggcctttatttgcgttctaggtggtatcacctgcgtgaatgaccctcattggcgggaaaaatgcaggaaggaatctctgtggcagaccttgatgcggattcgctgaacgaatcagctgaaaacacgcaggaagatcagatccagaacgatcagctcgaagatgcgcagctcgatgacaccttggctccggagcattacgacgcttccgatctgagggttctggaaggccttgaggcggtgcgaatccgcccgggcatgtacatcggctccaccggcccccgaggcttgcaccacctggtgtacgagatcgtcgacaactccgtcgatgaggcgctggcaggctacgcttcgcacatcgaagtgacgattctgccggacggcggcgtgcgcgtggtggatgacggccgaggcattccggtcgacgaagtgccgggcgaaggcgtttccggcgtggaaaccgtgatgaccaagctgcatgccggcggcaagttcggtggcggcggctatgcggtttccggcggtctgcacggcgtgggcatctccgtggtgaacgcgctgtcgacccgcgtcgacatcgaagtgcgtcgacagggcttccactggacccagacctacatcgaccagaagccgaccgcacgtcttgccaagggcgagccgatgggcgaagacgagtccaccggcacttccgtgaccttctgggcagacggcgcgatcttcgaaaccaccacctacgatttcgagaccctgcgcaaccgcttccagcagatggcgttcctcaacaaggggctgaaactgtccctgaccgatttgcgcgaaccggatcaggccggagacgaagtcgcgggcgaaagcgacgacaatgccgaaccgaagcatcagacggtcacctaccaatacaacgacggcatcaaggattatgtcgattacttggtgaagtcccgcaaggcaacccccgtcgaaccggacgtgatcgatttcgaagcggaagacctgaaaatcggcatttccgcggaaatcgccatgcaatggaccaccgcatactccgaagcggtgcacaccttcgccaacaccatctccaccaccgaaggcggcacccacgaagaaggcttccgcgccgcgctgacctcgctcgtcaaccgttacgcacgtgaaaagaacatcctcaaagacaaggatgagaacctctccggcgacgacgtgcgtgaaggcctgaccgcagtggtgtcggtgaaactcaccaccccgcagttcgaaggccagaccaagaccaagctcggcaattccgaagcgaaaaccttcgtacagcgtgtgatgaccgacaagctcggcgactggttcgattcgcatccaagcgaggccaagaacatcatccagaaggccattgaagcctcccgtgcgcgtcttgcagccaagaaggcacgtgagaatacccgccgcaagtcaatcttcgaatccgcgggcatgccagacaaactgaaggattgccagtccaacaatcctgaagaatgcgaactgttcatcgtggagggcgactccgcaggcggctccgcaattcagggacgcaacccgatcacgcaggccatcctgccgctgcgaggcaaaatccttaacaccgagcgtgcaagcctcgaccgcatgatgaagtccgaaaccatcgaatcgctgatcaccgcggtcggcggcggctatggcgaggatttcgacctgaacaaagtccgctaccacaaggtcatcatcatggccgatgccgatgtggacggcgcgcatatcgcaaccctgaatctgacgctgttcttccgctacatgcgcccgatgatcaccgctggttacgtgtatgtggccatgccgccgctgtaccgactcaagtggaccaaaggcgcgcacgacttcgtgtacaccgacgccgaacgcgaccgcgtgctcgccgaaggcaagtccgccggccgtcagctgccgaagggcgaaggcatccagcgttacaagggtctgggtgaaatgagctaccaggaactgtgggaaaccaccatggatcctgaccaccgcattctgaagcaggtgcagatcgaagacgcggccgcagccgacgaaaccttctccatgctcatgggagacgaagtcgaacctcgccgtctgttcatccagcgcaacgcccgcaacgtcagctggatcgacgcgtagggatttcaaggacttcaggcaaggtttcataaggatttagaaggacttagaagttggcagacgaaaacaacagcaacgaagacggccagttcgtgcctgacggctccatggagccgttgagcccgcaggaggccgacaacaccgattacggcctgatggtgggcgaacgcatccagaagaaggatctgcagcaggaaatgcgcgattcctacctggcgtacgccatgtccgtgatcgtggaccgtgcgctcccggacgtgcgcgacggcatgaagccggtgcatcgccgtgtgatctacgcgatgtacgacggcggctaccgccccgaccgcggctactccaagtgcgcccgcgtggtcggcgaagtgatgggtaagtaccatccgcacggcgattccgcgatctacgacacgttggtgcgtatggcacagtcgtggtctatgcgctacacgctggtcgacggccagggcaacttcggctcccccggcgacgatccggccgcggcaatgcgttacaccgaatgccgtatggctccgctcgccatggaaatggttcgtgacatcgacaaagacactgtcgatttcctgccgaactacgatggcaagacacaggagccgaccgtgcttccggcacgattcccgaacctgttgtgcaacggttcgtccggtatcgccgtcggtatggccaccaacattcctccgcacaacatgcgcgaggtggccgacggcgtgcattgggcgctcgaccacccggacgcaagccgcgaagagctgctcgaaaacctgatccgtatcatcaagggaccggacttccctactggcgcaacgattctcggacataagggcatcgaacaggcctaccgtaccggccgtggtctgatcaccatgcgcgcggtggtgaacaccgaagagatcaagggccgcatgtgcctcgtgatcaccgagctgccgtaccaggtgaaccctgaccgactggtcgtctccatccgcgaagcggtgcgcgacggcaagatccagggcatcgccgacatgcgcgacgaaacctccggtcgtaccggtcagcgtctcgtgctcgtgctcaagcgcgacgccgtgccgaaggtcgtgctcaacaacctgtacaagcactcccagctgcagcagaccttcggcgccaacatgctggcgctggtcgacggtgtgccgcgcacgctgtctttggatgccttcatccgccattgggtgggccaccagctggaagtcatcgcacgccgtaccgcatacctcaagcgtgaggcggaggaacgcgaccacattctgcagggctatctgaaggccctcgacatgatcgacgaggtcatcgcgctcattcgtgcttccgaatccgcggaaaccgcgcgcacgggccttatggacctgctggacgtggatgaagtgcaggccgacgccattctggccatgcagctgcgccgactggccgcattggaacgtcagaagatcctcgacgagcacaacgaactgatgcgtcgcatcgccgactacaacgacattctcgccaagccagagcgccagcgcaagatcgtgggcgacgagcttgacgaaatcgtgtccaagtatggcgacgaacgtcgaaccaagatcctgccgtactccggcgaaatgaacgtcgaagatctgatcgcggaagaaaacgtggtcgtaaccgttacacactccggtttcatcaagcgcaccaaggccgacgaataccgtgcgcagcatcgcggcggcaagggcatcaagggcgccaagctgcgcgaggacgacgtggtggaccacttcttcctcaccagcacgcacaactggctgctgttcttcaccaacaagggacgcgtgtaccgcctgaaggcgtacgagctgccggagggatcgcgcgattccaagggacagcatgtggccaacctgctgcagttcgggccggacgagacgatccagaccgtgctgtcgattccgaactacgaagtggccaagtatctggtgctcgccacccgttccggcaaggtcaagaagaccgcgctcgccgaatatgattccccgcgtcagggcggcctgatcgcagtgcgccttatggctggcgagaacggcgagaacgccgacgagctgatcggtgccgcactgtgcaacgccgaggatgacatcattcttgtgtcgaagctgggcatgagcctgaagttccaggccaacgacgagcagctgcgcccgatgggccgtcagaccgcaggcgtgcagggcatgaagttccgcgaaggcgacgaactgctggccatggacgtggtctggggcgattccgacaaggatctgttcgtggtcaccaacgagggcttcgccaagcgcaccgccatcagcgaataccgtttgcaaggccgtaacggctttggtgtcaaggccgtgcagctcgccgaaggccgtggctccctcgtgggcgcggtgatcgttgaggaagatgaccagatcatggccatcatgaagtccggcaaggtcatccgttccaacgtcgacgaggtcaagcgcaccggccgcaccacccaaggtgtgacgttcgccaagccggacaagaacgacgagatcatctccatcgcacgcaacgaggagaaggatgacgaatccgcggaatctggcgaatctgcggaaaaaacggaatccgcggaacatgggacgaacgcaaccgtgaacgagggtgcttcggcatcgtctgaagccgctactgaagccaacgctggcaacggcgatggcgagaatgtagaggcatgaagacaagacaggcaatcgtctgcgaaaactggtagcctcagctaagaactgggcacaatcttgcaaggagcaacgatgagcgagaacatcgaaggacagcaaatgccggaggttgggcaggcaccgcgtgtggcacgttccgcttccagccagccgctgattggtgcggatcaggttcaggcgcacgagggtgcctcctccgcttccggcggtgtgaaggtccgtgagaagcgtcgcggcggcgctccgcgtgcacgccgtatgagcctgtctctgacgcgtatcgatgcatggtcggccgccaaggtggcgttcatgctttccatcgcgggaggcatcattcagattgtcgcggtggctttgctgtggggcatgctgaacgtggtcggcgtgttcgaccaagttacgcagattgtgtcttccactggcttggacgctggcggattcgacctgaccaacgtgttctcgttgggcactgtgctgagcgccgtcaccatcttctccattgtggaagtggtgctgatcaccgtgctcgtggtgattttcacgctgctgtacaacgtggtgagcaccctcgtcggtggcatccacgtcacgcttggagatgattaatagcgcagtgcgctattaatggcagcgagcggcgatagcgtccgcgagcgtcgcatgcaatgctgaaatagcgcagtgcgccgtcagtagcggcgatagcaaactcaaacgcaacaagacggtctgtgtcgtgattcccatcacgacacagaccgtcttcgtattttctagaccagtctgtctcttaccgtacgccaaaccctatctgcctctccccctgcctgcaatctgcccatatctgccctatatatggcagattttgccttccgacctgtaccatctcgcttatatatggcaggtcaacttgcgaaaaagccagttcgggggtatactttgggtcatttttcctaccaaggctgccatatataagcgagatatcaccgtacgaactctcaaatctgccatatataagcgagatagcggagctgcgcgagaggaacttgcggttatagctgaaactattgcgatttttagagatagtttcagttataaccggaactatcgtgattttgagtgattgtttcaaatgtaactgcacctagattgggtgcgctgaagtatgtgttgaaatacgaaaagagggcctgtctggaatgaaaccagacaggccctcaatgtatttcgatgagccagccgtattggctagattggctaaaacggctagatcagagcacgccctgggcgaccatggcgttggcgaccttcacgaagccggcagcgttggcgccgagcatcagatcaccctcgtggccgtattccttggcggcttccagagagttggcgacgatgttctccatgatggacttgagcttgccgtcaacctcttcaaaagtccaggaaaggcggtaggagttctggctcatctcaaggccggaaaccgccacgccacccgcgttcgcggccttggcggggccatagagcacgttgttggcctggtagacggcgattgcctccggagtggaaggcatgttggcgccttcgcacaccacggtgcagccgttggcgacgagagccttggcggattcctcgtcgatctcgttctgggtggcgcacggcagggcgatatcgcacggaacggtccacacgcccttgcagccctcgtgatattcggagcccggcacacgctcggcgtattccctgatgcggccgcggtggcccagcttgatgtccttgaccacgtcgagctgaatgccgttcggatcgtagatgtagccgttggaatcggaggcggtcacaaccttcgcgccgagggcctgagccttctcggtggcgaagatggccacgttgccggagccggagatgaccacggtcttgccttcgaaggaatcgttgcgcagcacgcgcattgcctcggcggtgtagtagcacaggccgtaaccggtggcttcggtacgagccagggagccgccgaattcgaggcccttgccggtcagcacgccggaatactcgtcgcggatgcgcttgtactggccgaacaggtagccgatctcgcggccgcccacgttgatatcaccggccgggacgtcggtgaactggccgatgtgacggcacagttccgtcatgaaggcctggcagaaacgcatgacttcggcgtcggacttgcccttcgggtcgaagtcggatccgcccttgccgccgcccatcggcaggctggtcagggagttcttcaggatctgctcgaagccgaggaacttgatgacgccttcgttcacgctcgggtggaagcgcagaccgcccttgtacgggccgatcgcggagttgaactggatgcggtaaccgcggttgacctgcaccttgccctcatcgtcggtccatgcgacgcggaacttcaccacgcgctccggctcgacgatgcgctcaagcacgcccgccttctcatattccggatgcttcgcaaccaccggctcgaggctttcgaaaacctcgcgaacggcctgcaggaactccggctggtcgccgtcgcgcttttccacctgcgcgtacacgcgcttgacgtactcgtcagtgagcatattcttccccttcgggatagttgggttaccaatagacggtctcattctatgtgcacgaatatggacggcacaagaccttgttcaggatttggagacgctttttgcgagtgctggttctgaacctgcttctttttacgggattgccgtgccttgtgttgcctataggatggaaatgcggaaagcgtgggagagagtacgtccgcaacagcatctcacgatctcacataatgggagaatcatcatgattgaaggatttaagaaattcattgcacgcggcaacatgatcgacatggcggtcggtgtcgtcatgggcggtgccgtcaccacagtggttaactctattgtcaataatgtgattaatccgttcatcgccatgattttcggcaaaccgaatatggatggtctgctggcaatcacattcaataatgcgacggtttcgttcggcgcggtacttggcgcgatattgaatttcctgattatcgcggcggccgtgtatttctgcattctcgtgccgatcaacaaattccgtgacgtgaccgaggcgttgctcgccaaaaccaagcttgcggaagaacggagcaaagccgaggaggaagctgccaaagagccggaaatctccaccgaagagcagacgatcctgctgttgcagcaaatccgcgacgaacttgccaagcagaatgcacggaatacacagaacgtgccgaacgattccgacactgttgccggtgcagtcgcagtgcggtagtcatcgcaagcgatcgtaagtatcgcaagcgatcgtaagtattgcaagcgatcgtaataatcaataatccgaggccgtttcaagcggtgacgcaagtcccgtctgagacggccttttgcaatggtctttcagcggggtgattcttccatgcgctggaataatacggactctggaaggcacctcagcgggtcatttgttccagtgactggaggaatctggactgtgaggtgcttggttgcgtctagttttctccagtgactggaggttttgggatgctgggaggcttgttggtgggaggattcctccactcggtggaggtttttggactgtgaggtgtctggctgcgtccggttttctccagtgactggaggaattgggatgctggtttggatttcggatttgggtatgaaaaaagggcttccggaaatcaccggaaaccctgaaagtggagctaaggggattcgaacccctgaccctctccatgccatggagatgcgctaccagctgcgccatagccccgtggagctagccgggttcgaaccggcgaccctctgcttgcaaagcagatgcgctaccagctgcgctatagccccatagttgaaaaaaagcggccgcgccgctcttaatcaccgtgggcccgggaggacttgaacctccgacctcatccttatcagggatgcgctctaaccacctgagctacgggcccgttcctgctgcactgttaagcacaacgaattgaaataatacgcgaatttcagagaaagtcaatacaaggtatgtcttcggcgtgtcgtgacataatgcagacatgccgaacaatcatcgtagccagcgtaacaacagtgggagagccagcaggggagcgcgcaatcataatcgcacgctatccgaagaaaccacgcaaatcgctggaatgacggtgaccatcgtgcgtaaagccatcaaaaacatgtacctgcgcatcaaaccgccgaacgcgcaaatcgtcatctccgcaccttctcgcatgtcgcaagcggcaatcgcacgatttgtgacggaacgcaaaccatggatcgaacgtgcgcgacgcaccatgctgcaagccaaggatgaacagatccgtcaaagcgatttcaatggtttggaccgtgtgaatggttcgcatggtccggataatctgaatggcctggaaaattcgggcggcgtgggcgatcgaaacaatccaggcgatcccaatagcttgaataatccgcgcgctttcgtgtggaacgacgcggcgaaggaacgggccgtacgggccatcaatgcgcaactgccggtgctgcttgcgaaatggtcgccgattatcgggcggaagccgacgcatgtcacgttacgcatcatgacgtcgcgatgggggtcatgcacgccgaaaaccggccgtatccgactcaacctgcaacttggtcttatggatcccagattcctggaatacgtgcttgtgcacgaaatgacgcacctgtgggaaaacgggcacggagaggactttcagcggcgtatgagcgcatatttgccgcaatggaggcaattgcggcgggagctgaaccgtcatgttgtgttgtgatgctcgcgatgctgttgcgttcgccgttacgctgccatgctgcgatgagcttgcgtagggcgatgttgttgcgttgcctgtgatgttgaaatacttgcgatatcacgccactgccgtcacattgcgcggattgccatgacttgccacggcttacgaatgtttgataacgacgtataggcgattcgtatagctttttgtgtccataagatgttcaaaatgctgaacatccgcgatttgcaagcctacaatcatgtcagctgaaacgtttgcatgcgaacagtcatgcagaaagatcgaacaagtgaggaagggaccggccatggctgtattgagaaaagtcggcattatcggcatcggacacgtgggcgcgcatgttgcaaatgccttgctttccgcaggactggccgaagaactgaagctgtgcgacatcaacgagcaaaaagtagtcagcgaatgtcaggatttaagtgacacgttgggtttctatccgcataactgtgtgatcggcaactacggcacgcaatacgagcagctagccgactgcgacgtggtaatcaacgctgccggcgacgtgaaaaccagcgccaaagatcgtgacggcgaactgttcgtcaccaccgacattgtacgcacctggatctcccgactgttcaatgcaggcttccacggtgtgatcatcaccatctcaaatccgtgcgatgtggtcgcaaccgaaatctggcacatcaccggctacgatccgcgcaaaataatcggcaccggaaccgcgttggattccgcacgactgcgcaacgccatcgcgaaacgcgtcaacgtggatcagaaatcaatcggcgcatacatgctgggggagcatggcaattcgcagttcgcctactggtcgaacgtgaacatcgcatgcaagccgctcgctcaactcgcgcaagacgatccgcaacgattcacccttgacgaggacgaaaccgagcaggacgcccgacgaggcgggtaccgcgtgtacgccggcaaagagtgcacggaatacgctattgcagccactgcggcacgccttacgcaggctgtgctctgcgatgaacactatgcgaccgcctgctccacgctgcttaccggcgaacaaggcgaaagcggcaattacgccagcctgccgtgcatcatcggtgcgaacggcgttgaagaagtcctcaatcccacactcaccgaaagtgaacaggccaaattccatgcgtcctgcgagcatatccgtgccaatatcgcgcagcttgcatggtggaacgacgaatgccatcccatgctgcgcggctgaatctgcaataactcagcggatttaataacagagcagacttgcgattactgatgttgattgtgtaaaaaatcaacatttacataatcgcaagtctgttttatttttgattattttgtagctttcgcagcatcgccgtcaacagtatgcttgcggatttccaacgtttcgatacgacggccatccacttgcgtgacggtcatatcataaccgtcgtcggaaggcagcacgtcgccgatttcgcccatctttccagtatgcgccaggaaatagccggcaaccgtctcgtacggaccgtcttccagctcaataccggtcaaatcggcgaaatcctcaatcgtcatgccgccttcgatcgtggcgacgccattgacgaacgtggtacgttccgtgcgttcgccgcctttctcttccggcagatcatattcgtcgcgaatatcgccgaccagttcttcggtcatatcttccaacgtgacgatgccgtcggtaccgccatattcgtcgatgaccaccgccagatgaatgccgcgcttacgtagcagctcaaggcttggcagcagtttcgacgtgcccggcagcgaaatgccctcgcgcgtcacgtcggcaaccgtcttcgcctcgggatcgcgaatgtcaagcaggtcgcgcacatgcacgaaaccaagcacatcgtcgaaatccttgccggtcaccggatagcgggaatacggcatttctctcacatatgcggccgccttctcaatcggcatatcgccatccaaaaaaaccacgtcggcacgcgggcgcatcacttcggccacaatcgtttcggacgcgtcgaacacgtcgtcgagaatcgtgcgttcgtccttgctcaagttcgtattggtgttgacgagtacgcgcagctcttcgtcggacacttcgctgtcggtttcgttcgggtcgaaaccaagcaagcgcacgataatgttcgtgttcttgccgatcagccaaataatcggcttgcacaccttcgcaaacacatgaatcgcaggtaccacggcacgcgcgatctgctcgttgcgttgcatggcgatacgcttcggcaccaactccgaaatcacgatcgaacagtacgaaatgatcaacgtcagcacaatggtggtcaggggagcggccacactcgtcggcacgccccaactttcaacgatcggcacaatataaggcgaaatcgacgattcgccgaacgatgcggaaaggaaaccgctcaacgtcacgccgatctgtacggtcgacaaaaacgtgttcggatctcgcgcgatctgtgcgacgcgctttccgcgggcatcctcctgttccatctggtcgatctgcgatccacgcaggctgaccaacgccagttcggtgccggcgaacaccgatccgagcaacagaaaaacgaaaatcaggagaatgttcaaacctagagacatggttccactctatcggggcagtatgtcaaagtgtctgtatctcctgattttcttggattttctcaattattcttagattgcttagcttcggattgttctttttggatctctgttttgcaaatctccgttttccgaattgtaatccgtttcagaagctaagaacctcgactttgccggagtccagctggtaccttgcgccgacgatcatgagtttgtcggatgccagcgcctgctggatcgcttcggattgttccaccaagagttcgatggtgcgcgcgatgtgcacgcgttcgaaatcctcgctggattccaattccgactcgtgcgcctgccagattgagaaaccgacggtgcgcatcatgagcgaatccgaagcgcagatgcgttcgtcgatgtcggcaatgctgtcggcggccatcagcgaatcctcggcatcggcggtcagttcgtgcagtaacgcctcgtaatccttggaagcttgcttgatcgcaccgcaattctggtggccgagcaccaccagcaaacgtacgccgagcacggtcaccgcgtattccagggacgcaagcacggcttcgtcgatgatttgaccggccgtgcgaaccgtgaacaggtcgccaagaccggaatcgaaaataatatccgggcttacccgcgcgtcggagcagctcagtacggccgcttccggtgcgtgtgtgtctacaagtgctgcgcgtgcttcggcgccacgattcggatgttccggtttgccctccgcaaacctgcgattgcctgccagcatgcggctccatacgccgcttgccgtaccttcgacctcgttctggtctacaaacagttcgtctgccattgactccacccttcattgttcaggctagccaacatcatacgttttggtctgaccgttcgctgggaaatagagcgatatttcgcttatgtatggcagatttcgtgttctgtccggtgatatctcgcttatgtatggcagtcccgaaggtgaaaaaccggaaaaatgtacccccgaagtgggtttttcgcatgatggtctgccatgtataagcgagaaggctcatgacaaggctccgattctgccatatataaggcagatatgggtatgaaaaagggtccccgatcggcagtgcgaacggggaccctgaaagaaactggctacaatcagccggtgttctgcgggcctgctgcgacacccgacacggtgcacaggatcaggtaggtgttactgcagtctgcagaagatgaaaagaataagagctaaaacaagaaaggcggcaccgcttattctcattaaggatgtgtatagattgctcggatctcctttttgagtccagaggaaattgcttattttccagagttgccttggaaaaataagcatacataatcctagcagggcaagtgctgtgagatatatgtactgcactgttctccttattttaggtagtcggagatgcaagggtatggtccttgtttatttattccgttgcttgaatctttgaagaaatcgatactctcaaatgtaatccctttatattgcttcacggtaattactttaaaatgaaggttaattctgtcttctttcttgtacttgttggtgatatttccattaaatttccattcaatatattcgttgtctaataaaaagaagagtgatgtattgttttcattgggattgaattgaattttatctatgatatcttcaaaaataatatcatctcctgtattgtagtcgcgaagataatcgactgatataccacttttttcgtcataaaattgattgttaagttgtttgatgtcaagggttggggcttttgttgttcttggttgatctgggttggcgttgtatcggaacgtggtgccatcgttagccaggtagtcgattagatcggtatttgggacgtcgatgatcgttggaagacttcttccattgccgtaatattggcggtaataacactgccaatttttcccgctgtcatcttcggtgaaacgagcgtcccatgttccggtgccatcgctgcttgatctggtgtatgagacatactggtttgtccctactgttttattgataacccttttgcctgaggttgtggacaaggctagaactatattggctccaaaatcgacggggttagctctatgcgcgtgcatttcgaaactggtcacacggctggagacttgagggcgcatatagaattcgcccccattggtgccattgttgaaaacaatggaaggtgaaaccatataggtggaatattgatcatttgaactttgcccatcgagattgactacccggtcgatgacgttattggcgacaatccatccaacctgccaccaatttacagcaaaggctggagtggtcataactgtgcataggcaaactgagataattgtggagataaaaaaaactcttctggatttcataatttcctccatgtgaaaatttaatctcaatcgacaatgattaagatattaagagtattctaatggaaaatgagtaggggtgcactttaggatgtgattttctagtgaaaatagcaaaggttctctctcgtggaagttacaaacgagggcttcgctatgtgtctgtgtttcaggagtcatgcagttgttactgaatcatgagtggattgaggataagtatgctagtgctgcatgttaggcgctgaacaaaaaccttcgagtgcggtgtcttccgtcaacaacacaactcgttcagaaatacacccaatatggtcaaacagtaagacagcgctatgatgcgaacaatcttcttcc

SEQ ID NO: 849 - DNA, 11679 bp, Unknown
  gut microbiota DNA sequence
cacgttcttccaggtatccctgccgctgctcgccccggggatcgtgacgacggccctgttcacgatcgtggcgacgtggaacaactacttcctgccgttgatcatgctgaaggactcgaactggtatccgctgacgatcggcctgaaccagtggaaggaccaggcgagcaccgctggcggccaggcgatccagaacctggtggtcacgggttcgttgatcacgatcgtcccgttggtcatcgcgttcctgtgcctgcagaagtactggcagtccggccttgccgcaggcgccgtcaaggaatgatcgcaacggtcgcatgctgaaatttcggtaaagcgcataccgatttttcggcaatcgtccgaaaagaacaaaaaataagacctcgggggtgtcatcgtggacatccccgggaccatctcaaatatcttagtaaatatatatactagattttataaaaagattttacgagagctttcgaagggaagctgtcgagctggcatcctcagcgttatagcggatgccatacgcacacaaaggagtaatccatgcatcgcacgttcaaatggccggaactgctgaccgacaacggcaaaggcatcgcatacggcggtgattacaatcccgaccagtggtcggaagacgtgtgggacgaagacgtccgcctcatgaaacaggccggtgtcaataccgtggccgtggccattttcagctgggatcgcattcagccggaagaaaaccgttgggatttcggctggcttgaccgcatcatcgacaagctcggcaaagccggcatcgcggtcgatctggcctccgcaaccgccaccgcgccgctgtggctgtacgaaaagcacccggaagtgctgccgcaagacaaattcggccatcccgtcaacgcgggatcgcgccaatcctggagcccgacaagcccggtgttcaaggaatacgcgctcaccctgtgccgcaaactggccgaacgctacggcaccaacccgtacgtcaccgcatggcatatgggcaacgaatacggctggaacaaccgttacgattactccgacaacgcgctcaacgccttccgcctgtggtgcgaacgcaaatacggcaccatcgaaaacctcaacaaggcgtggggcactaccttctggggtcaggaaatgaacggtttccacgaagtgctcatcccgcgtttcatgggcgccgactccatggtgaaccccggtcaaaagcttgatttcgagcgtttcggcaacgatatgctgctcgacttctataaggccgaacgcgacgccatcgccgaaatctgccccgacaagccgttcaccacgaacttcatggtctccaccgaccagtgctgcatggactacgccgactgggccgaggaagtcgatttcgtgtcgaacgaccattacttccatgagggcgaatcgcatatcgacgaactgttctgctccgacgctttgatggattccctcgcgctcggcaagccgtggtatgtgatggaacattccacttcggccgtgcagtggaagccgctcaacgcacgcaagcgcaagggtgaaaccgtgcgtgactccattgcgcatgtggccatgggtgccgacgccatcaacttcttccagtggcgtgcctccgcattcggagccgaatccttccactccgcactcgtgccccacgcgggcgaagacaccaaactgttccgccaagtgtgcgaactgggcgcagcgctgaaaaccctcggcgacgctggcgtgcagggtaccgaactggaacagtccgatacggcgatcctgttcagcgcggaatccgaatgggccacacgctccgaaaccctgccgagcatgaagctcaaccattggcatgacgtgcgcgactggtaccgtgcgttcctcaacgccggcacccgtgccgacattgtgccgttgaaatacgattggagcgcatacaagaccgtcgtactgccgaccgtgatcatgctcagcgccgaagatacgcagcgtttggccgatttcgcagctgccggcggccgtgtggtcatcggttacgcaaccggactaatcgacgaaaacttccacacctggctcggcggatacccgggagccggagacggcctgctgcgcgaaatgctgggtattcgcggcgaggaattcaacattctcggcgcggaagccgaaggcgaaccgtccgaaattcgtttgagctccggtgcggtcacccgcctgtggcagaacgatgtgaacgtcgacggcgaacgcgcgcaggtattagccacctacgaaggtgaagaagccgacgaatgggaactcggcggcaccgccgcaatcacccgcaatccgtacggttccggcgaaacatacttcgtcggctgcgatctcaacgtcgccgatcttacggaattcgtgcgcgagaatatcgtggaagattccgcaaatgtcgccaatccggccgattccgacgtactgcacaccgtgcgcaagtccgccgacgcaaccttcgatttctatctgccgcgcggcaagaaagaaatcgcattgcagggcatcgaaggcgaaccaatctacctgttccaagcggaagcagaggaacagacgggcagctacaccgtgcatcgcaacggcgtactcgtcgtaaagcgcgcataattccgcataatttcgcgcaattgattgcgtaacacaacaatctcacacaacctgagcccgccattctgaaactcaagaatggcgggcttgccataactggtaaactttttaccggcatattcaacaatcacggagacgaacatgggcgagtcaaagccggagccgaagccggacaaaaaacgcgtcaccctacgagacgtggccgaagaggcaggcgtttcactcaaaaccgcatccaacgtgatcaaccattccggccgtatgaccgactccacgcgagaaaaagtccaggaagtcatcgaccgactcggataccgcgtgaacgtgtccgcgcgcaatctcaaccgcggcaaaaccggtttcatcacactcgccgtaccaacattgaccgccccatacctgtcggagctcgccaaccgcgtaatcgacgcggcccgcggctacggctactccgtatacgtcaccacctacgccgaaggatccgcacaaggagcgcaatcactcctgcgcaacttcaacaccaccgtctcggacggcatgatcctgtcgatctccgaagtcgaaaaccttgaagcggcggacttggacgtggactatccgctcgtatgcgtgggcgcgcgttccacacacggcaaagccgaccacgttacccccgacgatattcaggaagcccgactcgcagccgaatacctgttcgaccatggcgcaacccggctcgcggtggtcggatcgcgaaccgaaccggagcatatcgattccgtgcgtgaagcagtggaaggcaatgcgcaactgcgacttcgcggcgtgctcgaagcgtgcgccgcgcggggagcggcattcgattcccgactggtaatgagcactgggcaggattggacgattggttccggcgctcgcattacgcagcagcttattgattccgggattccattcgacggtattgtggcgttcaatgaccagcttgcgttgggtgcgctgttcactttggctgcgaacggcatttccgtgcctgaacagatgcaggtgatcggcttcgacaatattgaagaagccgcatatttccagcctccgctgaccaccatggattcttgtctcgactggattgcgccgactgcggtcagccgcattctcgaccggatcgacggcacgcgtgtgctggagccgagttacatcaccacccagtcgcacgtgatcgcccgcgccaccacgcgcgtgtagctcgccgttggtttcgtgccgtcgcccttcgagccatcggtttcgtaccgttgtccttcgtgccgttgatttcgcgctatcgccctttgtgctgttgatttcgtatcgttggcttcgcgacgcagctcgcgatgtttgtgcagacccgaatcaacctcggtgttccggcaattcctgcgcgaggcggctgtgcggacgcagatgcgccggtcgaccgtgcggacaccgaaatgggacccacatcaggaacgaccggagagcgtgagaattacaagaatcacgttaagtgcgacaatcagcgaaacaactaccatattgatcgcgaatttcaccggaccatccacataatcgcccattaaagaacggtcgtgcgtgtatttcattaacggaataatcgcaaatggaatgccgatcgacagcacaacttgccctatgatcagcgcttccgtcggattcttagcaaaccacaacaccaccaacgccggtacgagcgtcaccacgcggcatgcccacatcggcgctttgatccgcaacagtccatgcatgatttcggcgcccgcatatgtgccgaccgacgtggaactcaggctggaagccagcagtccgaccgagaaaatcgtgccgatcaccggacctagcacatgctgaatggcctgttgcgcaccctcgatcgtatccgtgccggtcatgccatgcaatgaattcgccgcaagaatcaatagtgcaagattcaccgatccagcaagtaataatgcccagaacacgtctattttgcttccgtgtagcagggtctttacgctcggtttgggctctcctggcacgtaatggtcgttcaccagcgtggaatgcaggtaaatcgcgtgcggcatcaccgtggcgcccagcatggaagttgccatcaataccgtttcggttcctttgaaatgcggaacaagaccttgcaaaacttgcgcaggatttggtggatcaataaaaaggcctgcaataaatccaaaagtaatcaccagcagcaatgcaataatcagcttttcaaaaatatgatgcgtggcactcttttgaaaaataagcaagaccgtagaaataatgccgattatgcacccaccaataaaaagcggaagtccaaataataatttcagtgcgattgcgccgccaattacttccgcaagatcagtcgctattgcaatgacttccgcttgcatgaaaaacatgaatcgaccgccgtcgccaagtcgttctcccaggatttcgggaagactttttccggtgacgataccaagttttgcggactgatattgaatgagcacgctcatacaattggcgagtaccagcacccacaccagcagatatccgtacctcgcgccggatgtgatattcgccgccacattgccgggatccacgtaggcgacggccgccacaaaagcaggtccaagcatgccggcaagcgcgtgcccgtggcgggaagagaaatcgtgattcgcccgtgccgtttcccagcattccacgccatccgtcgcacccgcattgaccatgcctcccatgccgtccatatcgttcgcgtcgtctgtactgttcatgttcgtcgccctcttatccgagcaatgttatagcgcacgaggctgcgcggttatgttacgtacgcgcatatcatctgtcggcatatgcgcgactcatgcaacggcgcatccgaaccgtttcaagacgcaatgcgaggcatgtgccacgaaatatggccgaattgcggcgacctgcggctaagctggaacaagcataagaacggttgagaataatcgcctgaaacacagccttcgaaaggacaacgcatggcaactttccatacccccatggtcacattgaacgacggcaatctgattccgcaaatcggcttgggcgtgctgcgtatcgacgatgagggcgttacctccgtagtggagagtgcgctggaagccggctaccgtcatatcgacggcgcggcggggtacaacaatgaggccggcgtgggtcgcgcgctgaacaatgcgggattcacggaaggtgagcagcgcaaaaacctgtgggttacgacgaaactgcgcgattccgagcaggggtatgacagcgcacgcaaggcgttcgaccgccagcttggcttgctgcagctcgattatgtcgacatgtacatgctgcattggcccaccccgttcgactggcgttccagcgaaacgtggaaggcgttccaggaattccgcgcggaggggcgcgtgcgcacgctgggtgtgtgcaatttcctgcccgagcatctcgaccgcttgcatgaggagaccggcgaatatcctgccgtcaaccagattgagctgcatccgacctggcagcagcgcgaggtcgtggactattgcaaggcgcacggcattgccgtggaagcatattcgccgatggctcgcggtgctgatttgaacgccggaaacggtgcgattgagcgcatcgcagcggagcatggggttacccctgcgcaggtgattctgcgttggcatatcgaaaatggcacgatcatcattcccaagtcggtgcatgcggatcggcagaagcagaatctcgatttgtttggattcgtgctcacccctgaagaacatgccgcgatcgacgcgcttgacggtccgacgcgcgccggacatgatccgatgacgttcacgtacgcctgatactccgtaattccgtaatttcgtattatttttaataattatgcctcgaaagaataatcgtaattcttataattatcggaatattgaacgcgacgtgcgtgatatccagcgggccggcaagcggttcaaaaaaagttggatcaacgccgacggtccgctggaacgtattcttattttgctggtagtcgttgcggtaatcggcgtcactatcggcatgctgctgccgaaagtcaatccgaccgtaggcgaaatcaccggcgagtacacggcaaccggcacagctgcggaaacgttggaaaaacttaccgtcgacgacaatcccagcaaggccggatatgatcgcgatgcgttcggattccgcgaaaccgacgacgatggcaacggttgcgacgtgcgcgaagacgtgctcgcgcgcgatctgacggacgtgcaatataagaacggccgtagctgccaggttgcgtcgggcacgcttgacgatccgtataccggtcagaccatccaattcgtacgtggagtgaaaacgtcttcggcggtgcagatcgatcatgtggtcgcgttggaaaatgcgtggcagtcgggcgcgaacacgtgggatcatgcgaagctgtaccaattcggcaacgacatgtacaatctgctggccgtggatgggcccgcgaatcagcagaagggttccgcttcggccgcatactggctgccgacgaacagtgaataccgttgcgattacgtggcccggcagattggcgtgaaagacaagtacgggctgactgtcactttgcaggaaaagcgggcgatgctttccgtattgcacggttgcccagcgcaggaattgccggaaagctgaagctgctcatttaggcgcggatatttgcgggtgctggctgggaacggtcgtagttgtagacggtgaacgttcctttgttgaatcgtttggtttcgtacagcgccaagtcggcctgtgcgacgcattggtcgaaatccacgcttccgatcgcgtctccatcggcgcgccccgtgtcaaggctggcaccgtcagcggctgcaatgcggcacacgcctacgctgcaatgcacgtcttgcccgtgctgttccgaggtgcgtgccaactgttggaagaacatgcccagcgtggtttcaagcacctgttcgctggcggtgttgcgaataagcgccaagaattcgtcaccgccatatcggcagataatgtcatcttgccggtagatgtgccgaagttgggatgcgacctcgcggatccagaaatcgccgaccgtgtgtccgtatgtgtcgttgatggttttgaaatcgtcgatgtcgacgaacatcagcatcgcttcgtcgtgcgaatccatgcggtcgaaatatttgcgcatgtgtttccatcccgcttccttgttcagcaaaccggtcatgccgtcatgttcggcttcgtaccgtgctttttcgtaggcggcctgttgcgagtggaatcgcatgttcatttccacggtgtccatgacgaacataatctgtgtggaaatcacgatcgccaaacattgcaatgaaaaactgtatgccagtgcttggtagatggtcgccaatactggtagcacgaagaacgacatcatggaaaggaaaataatgcgatcaagattcttgcgatatgagatcaacatgaagaggcataatgcgattcccaagaccgcaattgcctgcgaaagaagatagaaattaccgcgatggtaaagattgtggtcatcgaaatagtagaaaagaccagtgaattgtgtgatgataagtaagagaattccaattacggataatgcgtagacagcacgcaatgcggctggtttgcgatgctgatgtttgctcactgtcaaccaaacataggttgcgaagaaactcatgaaaatatagttgatgcagaatactgagaaattgcttatgcgaaccatatagtatgcggtttcgtctgcatctacgcgaaaataccagctgagcgcgtcggttccaagaagaagcatgcaggcgatctgcatgagtattttgatgcgagttcgtctggttttgtgtggtgttgcaatgaaaattccgcctgcgcaaatcaggcatatgaaaataccccacaactccatgcagatgtggaacatggccctgactgtcattatcctccacccaccccccctcgacgctgcctgcgtcgaaaacttgcctacctctttcgtgtgccatgatacctctaaataggggagcgttaccccgaaatgacaaaaacaggaatccgcaggcgaatatccatgcctctgtcatacgggctatcatatagtttgtgcgtttgaatgtggagaaggtgattgatgtcagcgaagcggagcatgtcccgagcgcttactcgagaggaatcgtatcaggacggtcatttaacgcgcacggcgtttatttccattgcgattcttacatttattacgttcgtcggtaatttcacacaattgcagttgagcgccgcgttgccgacgatcgtcagtgattttggtatttccgttacgaccggtcagtggctgacgtcgattttccagctggtcatgggcgtgatggtgccgcttacggcataccttacgagacgtttttcgacgcgcgaaatcgtgcttgtttccatggttgtgttcacgatcggttcactgttcgcttggcttggtccaacttttttgatggtgctgatcgggcgtttgcttgaggcggttggcacgggtgtgatgtggccggtgttgcagatcacggtgttttcgatttatccgctgtctcgccgtggtttcgcaatgggtacggttggcatggcgatgagcgtggctccggcgatcggcccgacgcttggcggtgtgcagacggacttgaacggttggcgttcaattttcctcacgttgaccattatcggcgtgatttcgctgcttcttgcctattttggattgcataatttcggtgagaacgataaaaccgcgaaggctgactttttttccgttggactgtctattttcggtttcggcgggctaatgttcggctttacgaatattgaatcgtattcgtttgtaaatcctatggtttggctgccaatggtgattggcattgtgggaattatttggtttgtgctccgccagattcatggcgcgcgcaggcagattgaaaatcctgaagcgcagccgccactgttgaatttgagcgtgttgaagaatcgtagttttactgttggcacgatcacggccgcgctctcgttcttcgcgttcagttcgattatggtgatcatgcccctgtacattcaggattgccgtggctattctgctgcgattagcggcctggtgatgcttccgggtgctttgggccagtgcatttcgcagtttttcggtggtaaggtgcttgaccgtttcggcgcacgtccggtggcgttgataggcacgattaccttgtgtttcggcacggtcatgatgagtttgatttccatgacttcgtggatttggtgggtgtcgatttggcagtttgtgcgccagatcggcatgggtttcgtgttgatgccgatcaccacatggtcactgaattgtttggaaccggaagaggtgagcgccggatccgcggtgacgaatacggttcgtcagattgcgggcgcgattggcgctccggtgttggtgattttgatggagacgttcacgtctcttcgttggactgcgcttggtggcacaaaagccgtgtatgcggctgccaacgtgttcggcattcagtgggcgcttcgtatcagtgcggcaatctgcttcgtgatggtgctgatggtgttcttcggcgtgcgcggccagggtgccggttccacgcatgaaaccgtgcaacgcgccctcaaccgtaggcgtgccgcctgaccgtgcatgctgcgacggctactcctcttcgttgggcttgtattccactacgctgagggccaccacgcctgcgctggtgtgcacgaacacattggcgctcccgcctacggcttccaagccttccaccaagtgtgagatcggctcggaatcgagcactggcagcacttgcgccacgccgtctgcgtcggtgacggtgagcgtgtcgtccaaatatccggaggcgagcgtttcgtcgatggcgctttcgaattcggccagcttgctgatttcctcttcggcggccttgtttgcggccacttccacagcttgcgccacttcttctcgcattgcttcttcgctcatgattgcctcttttgttaagcaccgttttgcaacctatagattatcggatgaacgtatcagaacgattccaaatgccggaaagtgtccatatagtggcacttttgtgaaagcatcaccctcaatgcacgcgggaaacatatgcggggatgaacgcgggtagcgttcacgagaagagatgttgtgagagatgttgtgaaaaacgatgcgtaagactatcggttgcaacatgtgattgcatacgattgcggattgcgcggaacaggaagtgaaacgggaagatggaatgggaaaggagtgcgcatgactcgacttggcgatgtccaacgaagtgagacgcgtcgtgaaacgcgcacttcactgcttacggcgttgctgtggttcgcatccgccgtcatcgtgttcgcgatgcttctgcgcatgctgccgaacagtctcgatggcaaacggtacgtgcctctgatcgtcgcgctcatgccttggcttggcttgctttccgtaattatcgcagtttgtgcaacagtttttcgtactgttggcaaacgaaaacttttgatcgcgttgagcgtattgtgcgtgatcatccagattatctggcattgggggtatgtcgttccgaccaatgatcgtgccatacaaccttctgcaacagtgcgtgtcatgacgttcaatacgaagcaaggttgtgccgatgcgcagcaaatcgtgcgaacaatccaaagcgagcatgttgaaattcttgcaatgcaggaagtttcatcaggattattagatcggttgcatgatgctggaattgaggattatcttccgtattccgtttccgcgcaactcacttggcacgataatggcggtgtgaacgtactgtacagtgcgcatcctctgcaggaaacaacgcaggatctcattcctattgaatccagtagtattcc

SEQ ID NO: 850 - DNA, 23784 bp, Unknown
  gut microbiota DNA sequence
ccactcacccgcctcgaggcaccccagccggggaaccacccgccgagcggcagcgaagagtcaatttacacgaaccccggcgatcacgcaaatcgacccttccaaagataccctaaaaccgttgcaaataaacacatccctcggcgtgtcgaaaaaggcctccgaacggccgtacagccagtctagaccccgaagacaacgcccacatgaaccaaaaacaaactataaacggcgtgtcatacccatacacatctcattcccatgtgatgaacacccaaatgcaatcgcaaatcatgattccagcggaacagaaagaacagaaatacaaaagagacgcgaagaagcatgaaacctggctgcacttgcgacggcacgcacgctgaaatacaacaagagccgccgactcagggaagtcgacggctctcgctgtttcaattgttattcagttatgttttgacctgtgagaaggaagtgagatcaggcagtgacctcagccttggccttcttgcgatccatgtagcgcttgatagccagagcctcaagtgcgatcaccaggattgcggtcacgccccaagccacgtacatggcggtcttccagatcggggtggcgaccttcggctcaccgtctgcatactgccagctgttggcggcggtgtacagaatattgtgggcggcggtacgcatggccttcacggaggttgcggacttgtcggtgatgtggttggtgatggaggtggtagccagcatggaatcgttgccgttacggatctcctgatcaccgttctggtagccgtagccgccgaaataatcggtcaggacgaagcccttgaagccccactcgtcacggagcacggtgttcagcagaacgttgttgccaccggcataggtgttgccgatgtagttgaaggcgctcatcacggcctgtgcgccgccttccttcacgctcatctcgaacggcttgaggtagatctcacgcatggcctgctcgttggtccaggtgcagagcatctcagtacgcttggtttcctgatcgttcagtgcgaagtgcttcatgaaggagtacacgcccttctccttggcgccggcgatctcgttggatgccatgacgccggagagcagggaatcctcggagaagtactcgaaagtacggccggagaatgcgttgcggtggatgttcatagccggagcgtaccaaccagcaacatgcatgtcgtgagccatatcgccgatcatctcgccgaactgcttggccagatccttgttccaagtgcaagcgaatgcggtggaagccgggaagccgatggagccaacaccagtgaagttgttgttcaacgaggccgggccgtcagcgtcggtgagctggatcttgccgacggaggagacggccggagtgccgtagccgccgttggcaatgaggttgtccatatcgtcgaaggtcagctcgtcaagcagcttctcccaatcagcatcgtcgtaatccttgccgtacatgtcggccaggcggaggccattcttggcaccggtggtcggcatctcgtcggaatcgtcgttgaactgagacggatcgtagttggtgttgttgtagaaggtttcctttgccttatcagacatttcgaagttggtcggagcggcggtggcttccttgtagtttgcgaaatgtcctgcacggctcaggtaggtcacatcgcctgcagcatcatcgaactggttggtggccacggtctggtcgccattgtgggtgttcgaatcggagtcgtaggtgatggtgtcgtccacggtgatcttcttggagccgatcacagtgtgggagtcggagttgatggagatgttgtaatcgcccttttcgagcacgtatgccttggcattcttgtaatcataggaagccatgtcatcgtcttcgaattcgacggtcacgtcctcggaagcgcccggctcaagcttctcggtcttctcgaagccaaccaggttggcactggccttttcgatgccaccttcggtgtacggcgggttgtagtagacctcaacaacatccttgccagcggtgtcgccggtgttggtgacggtcacatcaacggtgaccttgccatccttgtacgtcacatcgttgagcttctgctcgaaggtggtgtagctcagaccgtaaccgaacgggaatgcaaccatggaatcgtaatcgatggcaccttcggccgctgcggtctcatagaacttgtagcccacatagatgccttcggagtagttcacaaagcccgggatggcggtgacttcgtcaccagtgaagcccgtgtacttggcggccttgtcttccatgttggtgtattcgaacttgccgaagttgttgtaagacaccgactgggtgagatccttcaggaaggtgtcggaagtcttgccggacgggttggtatcgccggcaagcacgtcaccgagtgcggagaagccggtctggcctgcaggcgggcaccacacgacggatttgatctgcggatagtcgttcaggaagtcgaactggaaggtgttggcgccgttgtagacgagcgtgaccttgttgaagttcttggtgaccaggtcgagcatatcgcgctcggtctggctcagctgcaggaagctttcgccgtccttgaagtcctcgtaatccttggagttgttctcataggtgatgccttcggccttcatgttcatcggaaggtcagcgccctcgccaccgacgcgggtgagcactacaacagcctcatcggagaagctcttggcatcggagatcagggaatcggaatactggtcggccggaacctcaggcagggtccaatcctgtgcccacatgccaacaactgggcgatctgcacggtaatcggtgtacagcttggtcaagtcggcgttggtctcgatgccggcttccttcatgccatcaagcagggaaacggtgtcatactggtcagacatggagccggagccggtgccgccgtataccgggttggtggagccccaaccgaacacgttgaccttcttgttagccagcggcaggttggaatcatcgttcttcagcatggtgatggcttccgactgcacttccttggccagctcgttggccttggaaacagtggtgtcagacagcatgtacttggtgatggtcgcgttgttgagcagcgtcgacagcggaccggacagcatcatggaaaccgcgacgacaatgccgaccaaagccacaagccaagactcggagtggatgatcttacgggtcgccacttccttcaccgtcttcttgttgacggcaaaagtaatgatcagcgcgagcacaaatagcacgccaatcgcaatcaggtacggcgtcaacgaaccgataacgttcatgacgtcagccatgttgatttgcagcatggtctgcctcctccttgattctcataaccaaacgacatgcaggctccgatttcctcatcgaaaccagaaatcatgcaacgctgccccgcgtcacgcaatttccagaagtgaagacacttcttcatgtcgatgtttcgatttcaccaaaatccgcgaaaaaagcaccctgatttttcccagcctgtcgtttcgcgtgcataatctgcataccacctgcgcatgtaaaactaccattcgtgcacatataatcccgttgcacgcatgcatctggcacaatgtgcgctcatccgcagattgttgcaacatccttgccttgattgcggaaatcatcgatcttcattgcgcttccaactccataatcgcaattcctgcgatattttcggcacactacagcgagctgttccagcggcaacttacgtaaggcaagtaccatgggtgccatgagcgacttaagcgcattgaatctggaggcaggcagcctcgttggcggatacacgttgatttcccggcttggatcgggggcgatgggatcggtatggcgggtgcgagatgacggcggccatcagtatgcgatgaaaattttgcgcgattcccttgccgaggacgatgcgtccagcgaacgctcccgcgatcagctgaccgcacgcgagcgcctgcgtagggaggctatggcgctgcagaaagtgcgtcatccgggcgtgtgcggcattgtggatatggaattggatgatgctctggccttcattgtgaccgagctgatcgagggcaagaatctacgtgaagatgtgcgtgccaacggccggtatgtgggcgatgatttggaacggttgggacgcaagctgatcgaggcggtgaaggccgtgcatgcggccgggattgtgcatcgcgatatcaaaccgacgaatgtgatggtttcgaataccggaccggtattggtggatttcggcattgccatgggcgagggcgaaagccatgtgactcgtaccggattggtgatgggcacgcctggattcatcgctccggaaatcatcgacggtgccgaatccgatgagatgagcgattggtggtcggtggcgagcgtgctggcgtttgccgccactggcgagccggtgttcggcacgaaaccgatgatggcggtattggagcgtgctgccgcgggaagcgcgaatttggcgggattgccggctgggaccatggccgcgttccgttcggcgttggatccggatcgtacgaaacgttgcactccagacgagttgttgcaggcgattgcgttggatgcgttgaatccgcaagcttggatttcggggaatacttcggatgccgccgatagtgccgggtcggaggcgatgctcccttttgatggatcgcccgacaatccacgaatgctttggcgggcgttagaccatgtgacgggagaagacgccatcggcacgcgcaccttgccgcaattcgttgaggccacgcaggcaatcggcgcaaccgttattgctgacatgaccgataccgttattgccgatgcacccgatgccggcacctcggtcatggatatcaacgcgcataccgcaaccattcctcttggcaccggcacgcgcgtgctgcctgtcaatagtggggataccagtgtgctgccgcaagatacaccgcaatccacgcgggtgatgccggtccaggacgcttggaatcccgctcaagaggccgcacagatcgacccggccatcaaacctgcgttgcagcgcatcgccaaccagcggcctcctgccgtaataccgaacgcatcggttgaaatggcgcaaagtgcgcagccacaagacatgcaaacatctgccgtgccaaccgcaccggtcactccggccgcgccgctcaacccgaacgtgccgcagagtgtactgcagccgccgaatccggccgacgtgcaacgcggcgaactgctaggcagaggcgtgcccctctgcgtgctgatggcgattcctgtggccgtatgcggcctgttctcgccatggatcgccctgatcgcgggcgcgctgctggcctggttgctcgccaccattggactcaatatggaggcgcagctggaacgcgaaggccgccgtgggggcagccgcagggcttccgactggttcgcccgcgccgccacgctgccttggcatgtgctcaaggggctgggttatgcggtgccacgcgcactgatcatggcggtcatcgccgcattaggattgacgattgccacagtcacgctgcaactgccgtttgccatggttgatacgtcgatattcggattcacgattccgctgccgacctggattgaagggccggtttcgcaaagcggcgtcgcccaggccggttgctgcgccatcggctggctggtatgcgccctcgctccgggagcattggtgctgcgattgggtgccggcgcattgcgcggccgcccgaaatccggcaccactgccgaatcgtacgatatgtagtgacgccatctcacgaaatacgcagcgaaaatcaaaaatcggcaaacgtttgcaatcatcagaaaaacatcagataatcgcacgtagtatggcaacgtgagcttttacgaaatacttcattcagcaatagcgtgtccacactactatggtgcacagcatcgtgatgtgaacatcgaaaggaatgtggatggcccagaacagtaaggatgcgcagaagcgcgccagccgcgccgagcgtagggccgctgaggccgcggagatgaaggctcgcgccgaacagatggagaaggagcgcaagcagcagaccctcatcggcgccatcgtgatggcggtgctggtgatcctggtggcgatcggcgcgttcaccgtgtatcacaacatgcacaagaacaccgaaacgcaggcttccacccagaccgtggaagaagcgtacgacaagctgcagcaagtcgacaacacccctaagctcgtcgataagaagggcggattgctgatttcgaaggatggctacggcaagtccgtcgaaggcgcaccgactgttgcgatctacatggatttcctgtgcccgggctgcggcaatctgcatcgtcagcttgatgaggatctgcagaagatggtcgacgcgggtcagatcaatcttgatttgcatttcatggcgtttatggacaagtggtccaccgacgattattcaagccgcgcagcgaatgccgcgatctatctggccgagcatgacagcgatccgagccatctgatcaccttcctcgaaaaaatgtacgccgaggatttccagcctgaggaaagctcgaattacaagtccgtcagcgacgatcagatcaaggaacagatgatcgcctcgggagtttccgaggatgtggcggacaaggcgttcggccgcgactaccaggattggcttgacgccatcgacacctatacgccgaagcgctccgaactgtggaacacgtccggaacctacaaagacagcatgaccaccccaacggtgaccatcaacggcaagttctgggatatgaaccagttgagcactgcgcaggagaccattgaggaaggcctgctggaggccatcggaatcaagtccgacgacatcggcaaggaaggcgtgatgccctccatcggctccgacaaggatccgatctccaacaccactggcgagtgatcagccctacgcaatcctcataatcgaaaaaatatacccccctactcaccagcgtgccagccaaagcgcagttccaagttgacggcatcgggcacgctggttatgctattcaatcgttgccgcttttatgcattatgctagaaagcggcacaagcctccttagctcagatggccagagcggccgccttgtaagcggcaggtcgtcggttcgatcccgacaggaggctcgaaacccgttttgacgggctttgacctcttaccatgggtaagtgatccagaagccttcccccaacttatggcttctggcgaccggacgaggcttcccccaacctgcctcgtccgggcagggggcaggacatccccttctctcctgcccccttttttctttactccttttcctcgaaaatgtggcggtatagataaaaccagcggaaaccatgccattcgtcccgatctgaccgttacaatgacggcgatgtaggcagtcgctggaaagaggacgtatgacaagaaggtggaccccccggagattcgtgacgcttcggcgtgttcgagtgacggcatgcgtggtctcgttgacgctcgcctcgacgctcgcattcggcgtaggcgcgcgcaaaaccgtggctctgaccatcgatggcgaaaccaccaccgtaaccacatacgcgatgagcgtcgaccgtctgctgcaggaacgcggcgtgaaggtcaaaacacacgatctcgtggaatccaccagccccaccagcatgctgagcaaccatgacgtggtgacggtacgaagcgcctaccagaccaccatcaccatcaacgggcaggaagtgcccttctggacagtggcgaccagcgccgaacagctgatcggattcttcgaacaaaacgaagcagacgcggcaaaagtcaccgtcaatatcgacaacgtgtacaacaaactcaccggcggactgatcatcaaccaaaacgggccggtcaccgtcatcgcagacgggcaaagctccgaatcgccgaatggcaaactgccggcggcctccattcttgactccaaaggcatcacgctgaacaaggaggatcgcgtcagcgtcgaaaaagacaacggcgaaacgatcctgcgcgtccgccgcgtgacgcacggcgaggaaacacgcacgaaagcggtgcctttcggcacgcaaaccatcgtcgatcccagcctgcagcccggcgaagtcgtagtcaggcaggaaggcgaggacggcgaaatccagcaaacgtacgacgtcacgtatgtggacggcgagaaggaaagcgagacgctgaccaacgaaacgaccacgaaaatcgccctcgatcagattatcgcagtaggaccggcagcatcttccgacgattcgggatcggatgacggatccggcaattccgataattccggaaagaacgacaattcgaacaagaacaacaattccgataattccgacaagaaagacgattcgaacagtaattccggcaatacggataattcagacgacaacaagaaggacgattccggatcgaaaacggacccggatccgacgccaactccagacccgacccccacgccaactcctgacccgacccccacgccggatccgacgcccaccccgacaccgcaaccttccgatccttcggcaggatgccgcctctatcacccctcccccgcgcaggcacaggcctacgcggccggagccgcggcgcaatatggctggaccgggcaaaactggaccgatctggtgaaactgtggacgcgtgaatcgagctggctgtggtatgcggaaaacgcatcttccggagcctacggcatcccgcagtcgcttcctggcagcaaaatggcggcattcggcgcaaactggcgtgacgatgcggccgtgcagatcgactggggcctgagctacatcgcgcaacgctacggcagcccgtcgaaggcatgggagcattccgagcaggtcggatggtattaaacaacgccgatcgcaacaatacgcaaacgcaacagcgcacacttttcataccagttgaacggataatgaggtaatgacagaacacgcgaacgaaaccaacgcaaccgacgaaaccgcgcaaggccgcctgttgggggctgccgacattcggcgtatcgcggccgaggccggtatcagcccgacgaaaaaattcgggcagaatttcgtaatcgacccgggcacggttcgtcgtatcgtgcgcgaggcaggtgtgaccgccgacgatcatgtgctggaagtcggacctggactcggttcactgacattggcgattttggaaaccggcgccacgatgaccgccgtggagatcgacccgcccgttgcggaacgactgcccggcaccatcgccgaattcatgccggatgcggtggatcgtttccgcgtggtcaatcgcgatgcgttgaccgtgacgccggaaaatctgcctgatttccaaaatgatgattcgtttacactggtcgccaatctgccatacaacgtggccacgccgattctgctgaccttgctggaacgtttcgacaatctcggcacgttcctcgtgatggtgcagaaggaagtcgcggaccgactgagtgaaaagcccggttcaaagatctacggcactccaagcgtgaagctcgcttggtatggtaccgcggaacgtgtgggcattatcgggcgcaatgtgttctggccggcaccgaatgtggattccgcgctggtgctgttcaaacgatatgagggcgggcacacgccttcggccaacaatcccgacggttccgtagtggaccgcgaaaacgtgttccgtcttatcgacgccgcattcggccagaggcgcaaaaccctgcatgccgcgttgaagaagatcgtgccctccgaagcgttcgagcaggcgggcatcgatccgacgcgccgtggcgaaacgcttgccatcgacgaattcgtggcattggcacgagccgtgggcgaggtgtcgcaagcatgagcgacaccaacaccgcaatcaacacggtcagcgtggactgcccggcgaaaacgaatctgaccctgcacgtaggcaggccacgcagcgaatggggtggccgacacgagctcgacaccatctactgcgccgtcggcgtgtacgacaccgtcaccaccagtcgcaaaaagcccggatccggtttctccctgaatcttgaaggtgcctatcttggcgatctggcctcctccggcagcgacatgcgacgcaaccatgccgtgctcgccctgttcgccatggccgaagcgagcggccatgaaccggatgtggcgttgaacatcgaaaaacgcattcccgttggcgcgggcatggcaggaggttccgcggatgcggccgccacgattctggcattgaacacgctatggaatcttgattggtccatcgaacggttgcaacaggttgccgccacattgggcgcggatatgccgttctgcctgaccggaggctatgcgcgaggcaccggcttcggcgagcagatcgaacaactcagcgaaaacagcgacgccgtgctggaactgacggatcagggctttgcaggccgtctgctggtcggcgcgtatcaggcggaactgcgcacgccggaagtgtatgccatgttcgaccaaatcggcgccggcgcaaccgacaacaatcatctgcaacaggcgtcgatctcactgcatccacgcagcggacaggcgatcgacgaagcgttgcaggcaggcgccaagcaggcgttcgtctccggatccggcccctccgtaatcgcattcgtgccaaccgacgatgcggcacgcaccgtgcaatcggcatggcaacaaagccgttgcgtcgaccgcatcatcgccaccaaggcaccggcccatccgattgtgcatatcatcgcgtaacagtaaggttgaagtcaaccgatttttggagaaggactcgtacatgactcaggctaacgacgagcgcgccgcgcgcaaacagtacattcgccgccgtcaaaaggtggtgttcaccatcaccggcaccattttgacgatcgcattggtgatttccctgctgttcttcttccatgttggaggattgggcaatgtcaagtcggccgcggtacagccgaattacggccagcaggccccttgcgcagcacaggaacaggacggcagcaaaggcaagtacgtggaaaaccgcaacatcaccgtgcgcgtgctcaacggcactgaattcgccggcttcgcgcaagccgtcagcagcgcgttgcagaaccgcgagttcaacacccaggcagccggcaactacaccagctccaaagtggaacgcacgatgatcatcttcggcaagaacgccatcaatcaggcgtacacggtgaacagcaacttcaccgacgcgacgatggtgatggacgatcgtgaggatatgctgatcgacgttgtggttggcgcgactttcgacaatctgcagaatcagaagaaggtgccgaccgccggcaaggagatcgacagcttcgagggatgcgttaccgtcgacaagatgaccgacgtacagaaggcccccgaacacgacgccgtgtgatttgcagattttttgatttgcagattttcggattgacctcacgatttcgatttttcactgaaaatcaagttcgtgaggtcaattcttatattcgtgggttaaatcgcgggcgaaatcctccagagaatacccccgaaaccgcacttttcggaaccgactgacctcacgattctatttttttcccgaaaaatcgaatcgtgcggtcatagaatccaaatcgtgaggtcagcaagcagactactcggcctgctgttcctcataccaacggttcaactcggcaacagcgacatcacgctcgaccgggccgttatcgaggcgatattccagcatgtgcttgtacgccttgccaaccagcggtcccgggtcaatgccgagcagctgcatgatttcgtcaccgttcagatcagggcggatcgcgtcgaaatcctccttctccttcagatcgcgcacgcgctgttccatctcgtccatcgccgacgagaacaccatggccttgcgcttgttctgcgtggtcgcgtcggcacgcgtaaggcggttcaggcgctcatacagcggacccgcatccttgacgtaacgacggaccgcggaatccgtccacggctcctccacgtagccgtggaagcgcaagtgcagattgaccagctcgctgacgtcctcgaccatatgatggtcgaaatgcaatgccttaaggcgcttgcgggtcattttcgcgccgaccgcatcatgatgatggaagctcaccttgccacccgattcgaaacgacgcgtcttcggcttgccgatatcgtgcatcagcgcggccaaacgcaacgtcagatccggtgccggcacagggccgtccgggccggtttcgagggcaaccgcacgatcaatgacgatcatggtgtgctcgaacacgtccttatgacgatgatgttcgtcgatttcgagctgcaatgccggaatttccgggaagacgatatcggcaagaccggaatcgaccagcgcttcgatacctgcgcgcgggcgatcggacagcagcattttgaccagttcgtcgcgtacgcgctcagcggaaacgatttcaatgcgatcgaccatgtcggtcagcgcttcagcggtttccggttcgatacggaagcccagttgcgccacgaaacgtacggcgcgcatcatgcgcagcggatcgtcgtcaaacgactggcgaggatcgaccggcgtgcgcaacacgcccttggccaaatcgttcgcgccgccgaacggatcgacgaattgcaattccggcacacgcaacgccatggcattcaccgtgaaatcacggcgggaaagatcgccttccagcgtgtcgccataattgacttccggcttgcgcgagtcggggtcatacgtgtcggaacggtaggtcgttacctcaacctgcacttccgtgccatcctcacgcctgcgcatggcgcccaacgtgccgaatttacggcccatatcccaaaagccatcgcgcccgaaacggcgcaaaatgtgttcaaactgctcaggacgcgccgatgtgcaaaaatccaaatcatgcgatttacgatgcaacagcaggtctcgaacgggacctcccaccaacgccaattcatagccttccgcggcgaacatacgccctaattcaatggcctctggccacacttcgaagttcacgccatccctttccggcaccacaagtttctgccttaccagcataccgttaccccacctgcacacagaattgagtatggttggaatcatgattacgcccgcagaccttgcacgcatgcttgcccatgctgcggacgaccatgcccaaaatccgatggaaccagacaaactgctgtacacatcgcagtccgtttccttgcggcaagagaccatcatcacgcccaacgcacccaccccggcaataatgccgcagcggcgcgccacggacggtccgaccacgttcgcctcgctcgacgcgcaggaactgccggtagtgcgcgaatattcggcgggaggtctcgtattcgacgacaagggccgtgtggcgatcatcgcacgccactcgcgtagcggacatttggaatggtgcctgccgaaaggtcatatcgaaaaaggcgaaacaccgcagcaaaccgccgttcgcgaagttcacgaggaaacaggaatcctaggtgaagtggtcgattccatcgccaccatcgactactggttcaccggaaccagccagcgcgtacacaagctggtgcatcatttcgcattgcgtcagatcggcggcgagttgacggtggaaggcgacccggatcatgaggcggaagacgcgatttgggtggattttgctgatttggacgacgttctcagctacccgaacgaacgaaagatagcatggttgtacgcaaggaaactcaacagacaggcgtgaaggtgaatcaacccgcacaacggaacgttccgcacggcatgcgtgcgctttcggcaatcctcgccatggttatgaccatggcgttgatgttgttatacgcacctgtgccgaaagccgaagccgaagaaacacaggaatcgcaatccggcaccatgctgtcgatcgactcctccaccgccgtgctgaccgacacttccggctatcatttgagcgcgacggtgaccaacaccaccgatcaggaaatcccttcaggcacgctcacccttgccatgaacgccttctacacgttcgtgtcgcgcaacgatatccaggaatggtcggaaggcatcgggcagattcccacgcccaatatcgttgggcagagcgaggttcccgcgcttcaaccgggagcttcggcgaacgtgcacatcgacgcggactcgaatcaggagacgctggcgtccgtcaactcctgggggccgaaaccggtcacgctcagttatgaggccaatggcgttcaacaagacgaagcgcacactttcgcaacacggaccggagctggaatcaatacccccgacacgcccgcgatgaatatcaccatcgtgcagccgctcgaagcgcaaggatggaccaccgacaacaccatgctggaacagctcgtcaacaaaggtggcgtcacctccgcggaactctcgaaaatcgccgttcccggcaaagaagacgaggcacgactcaagtcgctggaacagacgttcaccaagcatgacaaactgcaggtggtggccgatccaacctatctgaaggcgatgccgatgccgacgcaagtcgacggcatcacgcaaccggccctgttcgacatcaccgcctattccgcgctgaacgacagcaaaacctatgattcggcaggcgtcggcacctcgcaatggaacgccgaacaggccttgaaaaactatcaatcggcgttgggtgacccgaacgcgagtatgaccacgtatgcatggcagggcaccggcaattggaccgccgacgcgctggcgaaagccaagcagcaggggtacgacaccgtcatcgccacgcatgatttcgaagaggatgatgcggccaccgcggaaaccggcaagaccgtagtaaccaccgacgccggcgacatcaccgtactgaccgcgcaaagcgtgctttccaaccttgcacaaggcaaggcgaccagtgccgacgccgaagtggacggcgagggaacaacggccgggcgtctcgcgcgattcgtcgcgcaaagcgcgttctaccagatggagcagccgtattcggaacgcaatctgctggtctgcctgaacggcaactctgatccggccgtcgtggacgcactgatgacggacgtcgaacaatcgccatggctgaacatcaccgatctgaacacgctcaacaacgccgaccccgccttgagcggcgacgatgcagccgcgatcgtgccgcaatccgacggaatcaatgatgcgacgcaagccaatctcaggcagacgctcaacacactggcagcctcgacaaacgacatcaaacgattcaacgcatccatcctcaccgacgtcgccgacgatgccaagcaggcccccgcaggcctcaaagcgtggcgcaggcagctcgtcaacgcgcacggcatcatggccctgcacgcgctaggcggcgaaaatccagccggaagcaccatggtggaaggagccgggcaactggcgtccctgctcatcaacggcgtggccatcacaccgacggaaaacgtcaacgtggtcagcgaaaccgcgcaaatgcccgttaccatcagcaacagccacccctatccggtcacggtaaaagtctcatcattgaccaactccatgcagatcgtcacttcgcgtttcgacaccgtggaagtgcccgcgcacggcgaagcccaagtggcgttcattatccgcgtggccacctccggcaccgcggacgccacgctcagcctgcaggacaggcagggcatcacattcggagcgacacaaaccacccacatcaccagcgcattgcagatcagcgacaaaaccggcttcatcatcatcggcatcgccgtgctgcttggagctttgggactgtggcgccaattccaccgtaagaaggatccagacgaatgagttcttccgttggccgtaattcactgatcatggcctccggcaccgcggcctcgcgcgtgaccgggcaaatccgtaccattctgctcgcttgggctttaggcaccaccggctatgcggcgaacgcctaccaagccggatccatgattccgcaggtgatctacaccttggtttccggaggtattttcaacgccgtgctcgtgccgcagatcgtacgcacgttgaaggcaaaagacgccgaaaccaaactcaacaagctcatcacgcttgccatcaccatgctgttggcggtgacgatcctgatggccctatgcacgccgctgctcaccaagctgtatgtgaacggtagccccgaaaccatggcgttggcgacctcattcaccctgtggtgcatgccgcagatcttcttctacggcctatatacggtggtcggccagattctcgcggccaaagaccatttcaccgcgtatgcgtggagttccgtgggtgcgaacatcatcagctgcatcggcttcggcacgttcatcgcgctattcggccgtgccaccgagcatccgcttgatttttggaccgccgacaaaatcgccctgaccgcaggcacgtggacgttgggcgtggcattccaggcgctggtactgttcattccactgaccaaaatcggattgaaataccgccccatcttcggccttcgtggcattggattgcgttccatgggaccggtcgcggcttggagtgtcggcattgtcgtaatcgaccagctcgccaatatcgtaatcacgcgtacctccactaacgcgccgatgctcgcgcagcagcagttcggcatcaatccgctcgacgtggccggcaatgcttcataccagaacgcgtacacgatttacatgttgccgtattcgctgattgccgtttcgctggcaaccgcgattttcccgaaaatatcccgtgcggtcgccgatcataatatcgccgaagcgcgcatcgatctcagccaggcgctgcgcaatatgggtgtgatcatgtgctatttcgcggtcgctttcgtggtgatgcccgttccgatcattctcgcgttgctgccgtctgtgagcgtcagagaggcgattcttatggcgggaccgttggtcacgcttggcgtgggacttccgttcgccagcgcgtatctgattatccagcgcacgttctatgcattcgaagacggcaaatcgccgttcattttcatgctgttcgccatgggcattcaagcggtaagcgtgatcatcggcgcgaaactactcccccctaccgaatggacgacaatgatcggcatggtaggagccatgagctacatactgccgatccccatcctgtatgccatgctgcgcaaacgattcgaaaacaatatcgacggtccgcgcatagccatctcgtatctgaaatcgattggcgcggcagtagctaccatgttcatcggcgtgacggtacgtgacagcgtctaccagcttgtcggcgcccaaatcggagcggtggacggtcatatgaactggattcaggcagtggcgtgtgccgcactgctggccatagtggccttcatcgtttacgtaggcatgctgcggctgctacgttccgaggaattcaaggaggcgatcgcactgatttcctcacgtattcccggacttcgcaagccgaccagccccaacgatagactggaacaggacgacgccgaaaacggcgagtgaccataggcagaacaaacgtttacaaaaagttgaaggaacccatgaaacctcagctgggagataccatcagcaatcgctacgtgctcgtttcgccattgcgcgaagaaaccggactacaggtctggaaggccagcgaccatgtgctcgcacgggattgccagctgtttattgtcagcagcagcaaggcattgcaggaagtcaacgcaaccgcttccatgctggctatttcgcatgattcccacttcacgaaagtgctgcagctccagcatgccggccaggtcgcgctggtggtgacgcagcttgacgaaggcatgaccctcagtgaatatcttgcgctgaacgccaaccagccgttgagctatacagccatgcgctccatcattggcgaagtcatcgaatcattgcatgcgctgcaaaaagacaatctcacgcatttctccatcagcaccgacacggtgcgactgacccgttccggcattcagatcgcagatgctccagtgagcatcatgcttgccgacacttcccgcgcgcaggctttggaaaatcgggaacagcttgcgatccgtcaaatctcagcgctgttgtacgctatgctgatccgacgcccgtccacgctgtcgacggatttccgtcttgaagcgctcgcgccgaccacgccgatggaattccgcgtgatctgcaagcgcggtctcgaacttgaagaggacgacggcttccccaccgttccgatggcaaccattgcggaattggaagcgttgcttggcgagtatcaaccgctgtcatcgttgggaagcatggatatcacgttgccttccatggattcggaatgctcaatcgccaatgttccgttactgcagattcttgagaaggatgtgctcccgctgccggatacgctggcagcggctggaagcattccggaaatgacgttcacggctcccgaaccgcataacgatttttccgatggcaaggaggctttggcgaaaggcgtcgcggccaccagtggagcggtgaaatcgttgtggagcagcggccgtgaactgctgagcgaagaagacatcgatggcgtgaccgacaccagcgattctcccttctccttccccatcagggtttccgtaccggacgatggcatgtcatccgacgattcccagttggaaaaaaccggtcgcattccagtgatcggcgcggatggtcaggtcattcagcccggcgaggagtccgcccgtgcgttgaaagcagagcaggaggcgatcgatgccgcatatgccgccggtcgagccgcggttccgccgagcttcacgccgaagaatccttcttccgcttcggcgaatactgacgttgccgacgcgaaactgtttggcaagctgaaaacgaaggtcgttgcgattatcgttgcggtcatcgttgttgcggttgcgcttgggtttgcagttcatggtttgatgcagccttcagattcggttacgactgattcaaaaggaccatggccggaaataaatcttgacgaagtgccgttcggcgagggagatcagtcggatgcgaattccgcggattcttccaattccgatacgtccggcaataccgattcgtccaattccaaggattcttccgatgcttccgccaatacgccggcatccggcgagtctacggcgtccaagcaacccaagaaaaccgaggacaaggtcgtgaccgccgataagcagtcgaagaaagtgccggatccgaagcagccggaaaacacgaccgcgtacgaaatcgacaatcgtcaattcctgtcgaatcctgacggacagcagggctacggatattacgtgcatctgagccagccgcagaaggcgtatcgcatggtcatcaaaattcgttcttccggtggtcagggatatattcgcgtgaatgcgacaaacagcccgtcccaaggcgaacaggtggcgcagttcgagtttgacgcttccggcacgaccgacatcaagttcgacaaggccgtggaaacgcaggacatcatgctgtgggtcccacttgatagcctgccgggcaaccagctgtacatcgaaagcattcaagtgttctgatcgtcagcacatcgcaatatccgattacttctgaagattgcgatacgaaaagagcctgccatgcgtcacctcacgtatggcaggctctttgtgtatttatttttggaatatggtcgtagtcgaaaagcgatggaacttggctcaagaatcgacaaccaacttttcgccatttttatcactctgatgtcagaactctaatgtcagattcaggagcgtgctcgcggatgattttatgctgcgcgacggctacccccgtctctacagttccgaaatgccgcttgaactcttcttttcgtcatatctcagcacatatgtcgagcgaaacgtggccggttatctcaatgtgcgaaacgtgaccgctttccacaaattcctgcgtctttgcgctctgagcggcgctttgtggcggctcgcgtggaatcaagttttcaagccaaagacgagcaggtatattccgccgcagactggctgacgcgctgaaacgtctaccccagcattagtctgacccataatctggtttggctgacctcatgattgtgatctggcgacctcacgatctgcgattttcccacgattttgattggctgacctcacgatttcaatcggggacactctttttcagatcgtgaggtcgccaaaacaaaatcatgaggccagatagaagaaatcgtgcggtcaactaacaaatcatgcggtcgctcacataatcccgtccgcacaacccgcacctaaaaccgattaccagagtcacacggacggaatcgcagctaccgccagcacaccccttactccggccaggattcgaagagggtgaggagcgtttcaacgttggtgtcgctccaactgtcgattctgggaccagcatacgtactgttgtacggctgatcgaacacgaccacatgctgccctgcctcacgcaaagtttcgatattcgccggcgaatcgtcaatatgaatcgtggcctgcatactgtctttcagcccagtaaagcacagactcatgtacggaatgcggttgctgtccagccattgcgcggtgtcggaaacgaccatctgatgctggccggacacgaacagccggtgcgtgacaatgcgaatgtacacatgctcattcgccaatcgctgcaatgcctgcgcgacccccggaagcggcttcatcgtcgcatacagatgctcacgctccgcggctttgtgcgtttcgatgtaatcgtcgagcgtctcgaacggccatccgtcctcgcgcgtgagattgtaatgcgcggtctgcagcgcacgttccggcacgtcaatgccctgccgctgcaggtaatcgcggatcgcgcccttgtaatccgcgcaaacgccgtccaaatcgagattgagcacgcgatatccctgcacgcccacgcgctggctctcatattgttcaggaatagtcgccatatcacgttcctttcttatgcccgacaccaatcagcctgtcgaacagccacatcaatcagcccagcccaatcagcccgatatcaatcaatgtaacctgacattcgccggcaacaaacgcaaatactcccgcaaataaggaagatagaaaatggatagaacaatgccgaccttgcgaaaagtcttacgggagaacgattttgagactttcatagaaaagatagaaaatctgaagatcgcgccgcttcttttgcaacggcaatactgccctgcaatcgacgattgatgttcatcacagcatcgttacgtttatttcaagattagccgatgaaaatacaaaagaatcgacgatcgttgcatgacatcgacggttgagcctgcctatgatgaaggcacaacagaacaaagagacacgatgcggcaggaaccggagagaaaaccggagccgcaccccacacgcggggaaacggcaacgccacccgcgctgaacataaccgaaaagcaacagacttacggcagcggccagaggaaagaacagaaaacaagaacgccgccaagccgaacgaaaggaaacatcatgaagaacaacactttcaaccaggtcatcaacgccaacctcgcttccgtcgatccgggcttcggccagttcgcactcgccaaggccagcgccgatctgttcaagaaggtcatcaacaagtgatccaaggcccgcgcaggcaggcgtcacgatttgcaaccaaagggcttgcgttccgcatgggacgcaggcccttttcgtgcgttccgctcaaacaccgccaagaattcgaccgccacgcatgcagccgccgccaccagcaactgcacacgcaaccacacacaacagcttgtgtttcacgtgaaacacaagccactttcacgcgcaacggaaaagccacaacgacacaacggcaatcacaacgtaactgaacgcggcacaatcttcggcgcaaccacatcacaatcgcagcagtcacgtcagtatggcagcaagcaccacaagccaatatcagccagcctgcccccttacgcaatcaagaagctctctctcacccgcatcaagatgggcgaacagcgccttcttcgcttgcctgtaatccttcgcgaccagcaattgagcgatattgacatgctcctgcccggaaaccatatcctcccggggatcctcgatttgagccaaagccaagctgagcttgcgaagcaaacccttgtactggtcggtcaccaacgaggaaccgatacaagcgacaatggccgtatggcaccgccattccgcctcaaccacgtcataggcgttcccgtgattcaacatctcgcataacgacgtggcggaatcggatatttccttcagctgcccttccgtcgcatgcttggcatgattaatgccggacccttcgtaaaatcgcctcgcataatatacgtcgcgaatctcctcttccgtcaacgtgcgaaaacgcaatgtacgagtgcccggatccctggaaagaaaaccatcttcctcaagcctgaccaacgcttcacgcgtcgtgctccgcgatacgttgtaccgcgtcttcacatcctcctccacaaaagccgtaccggccggatactgcccggtaatgagctcatgttgaatcgtggaaaccaattgatcgaccaaagatgtccgtttcaaaggcattccctcacccgccatcgctatccccttccaacagccaaagtctcggctctaacgcaaagagcccatgcacacatcaaggctatgaaaacaaacccgacaggcaccaagaatagcaaccccccaccgagattgtccgccacaagcccggcacaataggatcccagcgccaaacctacgcccatagccgtgttcacccaagagaacatctccccttggcgcccttcaggagcaagctgccccgcaatccggtattgcaaggtgcttccgggagaaacgaacacgccaaccaaaaacagcgcgcataccaacttatgtccacccagcggaagcgccagccccaaacatgcaatcccgtaaatcccagtaaacaagaccagttgtttcactgttgccatacgcttcggatggcaatgggtaaacgccactatgccaatgatcgacccaatggaccatatggatatggccacgccgctcaaagacgccatgtcgatctgcgaatagtacagcggcacagcggtttcgatccatccgctgaacgcactggtcgacgcgcaaatcagcagcagcaaaacaatattgatatgcgacaacaacgacgattcgcttcgactttcctcagtccgccgcaaagaacgcacttgggtggcatacgagcgcacaggcgcgcatgccgccaacattgcacagccgacagccatcaacgcatacaccacgccaagcgtggcacccgcattgcaaatagccaaaagcacgctggcaatgagtggacctgccacatagagcacgtccactatcagcacttccaggtcataggcaacgggaaccag

SEQ ID NO: 851 - DNA, 12799 bp, Unknown
  gut microbiota DNA sequence
catggcccaggtgagacgcccggtccctttccgaacccggaagctaaggcctggtcgcggcgatggtactgcactcgagagggtgtgggagagtagcacgccgccgcattcaacttatggaccttccggtcgagccccatcggggttcccggaaggtcctttttattcccgcgcacgggtgtcttcctccattcggtggagggaaacggacgccggaaggcccgtgggcgggaggattgttccagtgagtggaggaatcgggactactgctgattcaaccaggcgtggagtttcagatgattgagcgcggtattgggatcatacgtatcatccaagcgttcctgatacatggcaaccagttcgtcgctgcgtcccagcgcttccaaagcggcctcgcgaatcgtctcccactcgtagggcaccacttcttcggggaacatcatcgtgacctgattaggtttgtcccgcaacaccagatcgacaaaatcgagcagatcctgccaacgttcggcagcaatcagacgtgccgcatacgcatcggcgagcggttcggaagtatgattgtcacgcaggaaacgatcagcctcatcaatgtcaccactaatccgcagcaagtcatgtcgcaaaaactgtacggcatgatcgaactgattctgcgcggcctgcgcaatctccttttctgaaagcaaagcaggatcaagcatcgcgagattattcaaatcttctgcggataaggaatcagcgtcttcaaacaaacccaaatcggttttcacttgcgcaacagactgcgaatcagtttgcatgtcgcggctgtcggaatcatctgccgagtttgccaacgtcgaagcagacgtggcgaaatcactcatcgtggcaatgcccttattcaacgcatcgtaagcgaacatgcgcgtatcgtcccattgcgcgaacgacaggccgcacgaaagcagttcaaccatctgcatggcgttaagacggaaatcctcattgcaggccacttgcgtgatgatattcagcgcctgttcgccggtcatgggatcggcattgcaggccacggcgtccatgtacacgcgcacggtctgaatcaggtctttcaaatagtcgaagccctcattgtctcgatctgcgacgttgccaacgaatcgcgcggtcatttccactgccttggcgagattgccgacagcatccagccaacgtgtgcttacgatggcattgccgaccaccgcgtccacgccggaaagcgcctgcgaatcaagatggaacgttggcatgtcgattcttggaatctccacgccggtatcggtgcgttcggctgtgggcaccatggcggcgatggaatcgaaataccattgcatgggcatactgattaccatgtccgcgtcggaaagctgtgctacgggcacattattgcggttttcggcatcttcctgactggcctcgcggatcatgtcgttccataggaacgtcgggccgtcggattcgccggaatgcagccatccattgttgatgtactcggtgagatcctcgacttcctgcagacggttgatcctaccgtgttcgttgctcattgcatgcctttcctttaaaaacatggattgcatgtgccgcgttgacgacgggtgcttcgtggaacaagccatatccttattcagcctatatcatgctgccgttgtcgcgcatgtttttttgctcttttcacggcgaaaagccgatgattttgaatagtcgcttgaatgctgttgcatttctttttgattgagcgaaaagattatgccgaaatactgtgtgaaacgatgtgtgaaacatgatttggaatgagcggcatggccgtacggcggcgcccggtagaatggcagtgttgccgcaacagggcggctttccatcgaaggaaaagggaatgatatgaaggttgcaagcggtaatgttctgtggcgtcagcgcaagcgtaattggtgtcgtacgccgttcacgttcaccgtgtacatgctcactgatcaggaaatgagcatcaaaaccggcatccttaacgagaaattcaatctcatcaagctattccgcatcgtggatattagtgtggagcgcacgttcctgcagcgcctgttcggtttgagcacgctggtacttgatacgcgcgaccagtcttccggcaacggtgttgtggtactgaagaacgtggtgcatggttttgaggttcgccgggtgatgcaggaggccgtggactcatcccgtaaggaaaatggcatgtcagcgcgcgaattcctcggaggtccgggcggtccggggccggaaggacctggcatgggattcgatgcgcctgatatgggcgatttttagagacgtgcggtagtttcgtttcagcgcatacgaaaggcgcttgacttgagctggtttttctggctcgagccaagcgcttttctttttctggagagtaccgccgcggcggtatgggaatcgttatatgtcctatggggcgctcatacaacgtcctctggggcggtcagtacttgttggcgccgctgccgacgaagttgacctggaagccgcggtggtagtgcaggaacatgtcggcgccgtagcggtcgacagggcggtgggtgaacagcatacggatggcgaaagcggtctgcacgtcttccggcaggttcatgaattccttgtgcgcatcccaatacgggttcatggtgatggctgcgtccggcacataggcgtagccgtaaccgtcttcgttcacgtagcccatgaacggcaggtcccaagcgttatgcgcggtgagggctgccttgaattcctccacctgagcgagggcttcgtcgttgatgccgaggctcttggcaacctcgttggctgcggcggtcttggcgtccgcgtcctggccgaacatgttcagatccacgttgatgacggtcttttcatctgccatgatgaattcctttcctgcgatgtgttcgcataatgtcatgaacattagtagtgttcgttttaatgttcgtttagataagcaaacgaacatcatttcttgaagtctggttcatgttgttgatggatgcttgctgtatccgtgactaacgatagcacgcttttttagctgtgataccgcggaaaataatgtttttgcaattgatgatgctgagaatcgttgatgttgcaatgattgcaggtcttgaaaatgacattgtaaaaagtaacattgagcgtgttctttttgttctgcaaaaacatgttacttttctgttcaaacgaacatctgcatatgattgtagggtggattgcacgtgtgaaaaggtggtttgaaaaggcttgagcgatcatcgacgatgcactgtgtcactttttgcagatgaggtgacattttccatgtctgaggcgtggcggccgtcggttcaacaatgactttccgccacgtcagcaattttctggaactagaatgctgggttgccggtgaggtgacggtagagttcggggtcaaccggtttcgcgagtttcagtgtggaaatcacgacctttgattgggttccgtcatctgcgatattcactgactcatgcgcatcgtctacagctactgccgaaccgacataatagtaggatttctccttttcctcggccttacgtcgaataaaaatgggaacaaaatgacgattcttccattccgacgtatgctcggttccatcaagcagccatttgaattccggagattgcaaagaacgattgtttttgctgaaccattcaatttctccaggattcaagaaacgatcgccatactggcttgcctcatatttaatgaagatcggcaaagaattcgtgtaggtgtcaagcttatatccgcccacattctgcggaatctgctcatccttccacgcgcacaatcgcatgacatcggcaagactatatttctcgccatatatgaacccatgatccggcatgatgcgacgcttgcgagcttcccttgacagtgcaagcgcattgaacaagctggcttcgatggtatctgtaaagaacgttcggaatgttgcgtgatgcagcattgactcgcattcctgggtcaatgcatacgattcattgtcgcacatacaaaccaaagaagtattgccgaaacgagtgcgattcgcacttgtgaaatacgaataattcaacgtggaaaaagcagaaccgcactgctgaatattattatcgacatacggaaacagcgtagacaataatgtttgcaaatcaaacaaactcaagctgtgctgtgtggaaaaacgttcaaacagtgacgcatcatcgtcggaacaatccggattgatgcgacgccaatccaaatcgcacaacaccgcaagaatcagcgactcatgcgggcgcaaaccacgcaactgagtcgcagtcaacattttcagcacaccagactgcgcgtttgacaccggttcaagctgctccacatacgaagccgacgcatgcttgccgcgcgacagactcttctcacgagagaccacgaacgacagataatcgttaaactttcacatcacgtatgccacgcttattttgcttgttgggtgtagcggcagtttgggaagccggtgcacccgtagaatgagcggttcggatcgttgcgattgtgccgcaagcttagggcttcgccgcaattcgggcattgcggaggaagtttgactcctcggaaaatgttcgggcagatcttgctatgcagttcatacatgaatcgcgacgggcgggtctgatccacgatgaagaacagtttcttcttgcatcgggtcatcgccacgtaaaacagtcgccgttcctccgcatgcgggcatcgttccacttccggcagtagcagaccaagcagcggctcttcgggaatcgtgcttggaaagcctttcaatccgccggaacagcagagcagaaatacgaagtcgcgttgcaatcctttggaagcatgagcggtcatgaaacgaatatccatatccggtttttcgagaaaacgaatatttccagtgctttggtcgatggagaacagaccttcttgatcgcaacgaatcatgagattgatatcgctgcgataccggcccagcagtagtacggacgcggttttcggtagtttgcgcaattgctcgacgatcacattgaatcgttcttcctcagtatgcccgccaagtgctttcaacgaataatccttcttatcgctgggattattgagatgtttgacatacagattggtatcgcgcatcacgaatgctccgcttgcgtcaataaggctttgacggaagcgccgtgtggtggtgatctggaacatgcgggtcggaccccaggcgcgccaaattcggtcgaaatcgagaatgagatgaaggtcactgcctgcaaaacgataaatcgactgccaatcgtcgccaacgcagaatagtgagaaatcatgttgcaagcgaagcgcacggattagctcataacgcggtcgtgacatgtcctgatattcgtcaatcagcacatatttatatggatgacggtacgagccattattgacgcaactgatggcatcaacgatcattcccggaaaatcaataccattattggttgcgaaattctgcacataggcgtgataaagcggttctataagctgcagtatctcacgattacgaccgatgtttttaccgccataacgttcgttaagagcttgcattccagtagtgtcaatattgtttgaccgcatatgctggataatggtttgtgtggtatcgataagattctgacgatattgattgaatgcataatcgtctgttggtaactgaaaattctcaagtcgtgcagctgcggaatatttatcgagcaactgttgcgacatgagtttaaatgccagaagacgataggaaacattgtgttcaagcaggtattcaaatgcgttacgcaccacattgtttgacgtgtgcccgtcaataattggacgattggcaatggtggaggaacggcagatttccagtccgagactatggaatgtgcatgcgcgaatgactttgccggtgctttgcgtgatacggctcgacatttcgtcggcggaagctttggtgaacgatagcaccagaatctcttcgggagtggcggttcctgtgttcagcaaccatgcgatatagccgacgatggtagtggttttgccggttcccgcacctgcaagcaccagcgtattgtgacccgctccggcgatggcgctgatctgctcgtcgttcaaatcatgcttttcgattttgccgatgatatttcgcgcccgcgcaatctgatcggcgggaagcaacggttgcggcataagcttctgagccggttgtgaattggcatgagattgcgctcgcgaacgattcgttgtgacagaagtattgcgagctgtggtttgtgtttgcgcgcggtatgacgatcgcgccaactgtgatgattgggatggttgcgtaagctgttgcgtttgacgtgattgtacagtggacttgcgttgcgtcgtctgctgttgcgtgggattgggaacgttttgccgcgcgagcttgggcccgggctgagtcgccgttttggagacgggcggttctccaataagcgcgttcatgaacttgctcagcaatcccataatgttcctcctcaaccagtgcaaggagaaattatatgtgctgccaatgaatgcttcagcgtcggctgtgtgaacggaatcgcaattcgtcgacgctgaaactaatattggagcttaacgttcgaaggggtaggtgaggttccagtcgcggcgcagggagtccatgagttccatgatgcgcagggtgtcggcgtggggcatttcctcgcattcggtgcgaccgtcgatcacggcctgcgcggcggccgccacctcgtattcgtagccggtgagctggacgggaacgtcataatgcgtaacaaccgcatgattgccgtcatacacgtcaatcgcctcaacattattaatgttctggcacaccatataaccatcggttccccacacggatcccgtgcggtcgctatggcacagaatcgaactttgcgcggtcgccatcacaccgttctcgtaatagaacgtcatggaattatgcgcatccacgccggtttcgtacgctcgcatcgacgattcaatgcgagcgatcggtgcattatgcatgatcatgtcgatgaaattgattggatatacgccaacatccaacaatgcgccaccggcaagcgcgggatcagtgattcgcgccttcgcggtggtggggtaacacaggttcgcatcgatcgcctgtatttcaccaatcgcaccggaggcgagaatcttatcgataatggcgcgggacggcatgtatcgcgtccaaatcgcttccgcgcacagcatgccggtttcttttgcaacggctaacatctcacgggtctgtgccgcattcgcgccgaatgctttctccaccagcacaccctttccggctttcatgcacaatatcgcctgttccgcatgcagattgtgcggcgtagcgatgtacaccaagtccacgttcggatcggccacaagttcctcatatgaaccgtatgaaactggaaaaccgtatttcgcggcgaaatcagccgcacgacccgcatctcgtgcggcgacagcatacggttcaaccaaatccgcataacggctgtccgcggccattttcaccaacgtgtcagccatatgttgtgcaatccggcctgcgccgagaatcgcgacatgaatacgagccatatcaactcccatctttcgtaagctgcctgaatagtgttgattcatttatattgctgcgttgcaagttccagcgtacgccatgcgtgatcgcaacgcgcgttgatccgtatcgcacttgcattgcgttttgtccggatgcttttctgatttgccggattttgccggatcttgccataatggtgtgctgtggtagcgcaggaacacgttaagaagaccggaaaacctcggaaatccgcaaaaaaagagaaatacgagcgtggcacgagaagctacatcatgtcgcatatccgaggcaaagacacatccatcgaaatgatggtacgcagttttcttttttcgaaaggcctgcgattccgcaaaaacgacaagcggtatccggggcatcccgacgtggtgttgccgaaataccgtacgatggtgttcatcaacggctgtttctggcatatgcatgaaaactgcccgaaagccacacgcgtaccgaaatcgaatgtggaattctggagtgcgaaactgctgcgcaaccacgaacgagatatcagacagcatgccgaacttgaagcgatgggctggaaagtgatcgtggtgtgggaatgcgagctcgccaaaaaagtacgtgaggaacggttggagagactgtattgcgacatcgtcgaagcgtgattcttgccgctggcgcatgatgctcgtggttccagctttacacatgacatgtgattttctgttttcgaaacgatacgcaacggcggtgggacggtacttgcgatttgtcgcgtctgaagaatacaaacgaactatgggaaatgctgagaacagcgcgctgccgcagatgtcgcaccgcgcccagattgctaatccgttccgtgccatggtgtttggtgcgatggccgacgagatgatcgccgcaggtaccgatgtggtcaagttgagcttgggggagccggatttcggcgctccgcccgcagtgcgtgatgcaatgcgcgaacagtatgatggccgtccattgccgtataccgctgcaatgggcttgccggaattacgtcaggcgatttccgatttctacaaggaacgccaccatgtggacgtcgatccgaaacgtatcgcgattacggccggaggttccacggcactgctgcttgccgccgcattgacggtgaacgagggtgacgaagtgctgatcgccgacccgtcgtacccgtgcaatcgcgaactggtccgcgcgttcggcggcgaagtcgtggacgtgccgacgaacgcggccacccgattccatctcacaccggaactgtgccgcgaatactggtcggatcgcaccaaagcggtgatgatcacctcgccgtcgaacccgaccggtaccaccatcgccttcgacaccctgaaatccgtgtgcgacctggcgaaagaacgcggcgcatggcgtatcgtcgacgaaacctaccttgacctggccgaccgcgaaccggacggctccgacgtgaaatccgtgctcgcctgcgacccggacgccatcgtatgctccagcttctccaagttcttcggcatgaccggctggcgactgggttggatggtcgtgcctgaatgcgcgctcgaagccatggacgatctcgccaccaacttcttcctgtgcgcgcatactcccacccagcatgcggcgctcgcgtgcttcactccggaaacgttggccgtgtgcgaggaacgccgtcaggagttgctggaacgtcgtcgcattgtggtcgacggattggctgagatcggtttgccgttggaagttgagccgaatggcgcgttctatgcgtacttcaacatttccggcaccggtcttgacgcgtggacgttctgcgaacgtgcgttaaaggaagcgcacgtggcgttgacgccgggccgtgatttcggcgaggccactgccgacacccatgtgcggctttcgtatgcggcctcccgtgaggcgcttcgtgagggtctgaggcgaatcggagatttcgtagccgaactgcacggatgatgtttgtgagcgctttgcaatcgttgtcggcgctgtgaatgttgcgtggccatcctaggtgaataggatggccactcgaatatttgcaaaggttgtcaatgtaatgtcaggtgaaagggggagtgcgatgtcactatgcttgaaagcatggttagtttacattcgcatgtcactcgtcttggcgtgcttgacattggctccaataccgttcacatgctcatcgtcgatgcggcgcctggcgcccgtccggaacctgaggccagcacgaaaagcactgttcgcttgatgcaatatctcaaggccgatggcacaatcaaaaaggccggagtcgaagctgtggtcgcagctgtggaaaaggccatggggctggtcaaagaatatgagattacccaactgctcgtgctggccacatccgcattgcgtgaggctccgaatggcagcaggatcctcaaacgaatcgaaaacgtcgtcggccagccggtcacggtgctgtccggtgtggatgaggccagactcaccttccttgcagctcgccgctggtatggttgggatgccggtcggctgctggtcatcgatatcggtggtggctctctcgaggtggctatgggttcggatgaggatcccacagtagcgctgtccgtgccggcaggtgccggtcgtgtgacccgtgaattcctaccggaaaacggtattgcgaatgatagggatttggaagacgcgcgcaggaacatccgtaagattcttgagccgatggtcaaggcgttcccgaaatcgaagcacccgatgcatgccgtcggcacatcgaagaccattcgttccctggctcgtctcgccggtgccgtggtgcgtcagcccggccgcgtggacacttcgatcatgacgattgaccagcttgaggattggcttccccgtcttgcggccatctcgccggaccagcgtaccgcattgccgggcgtcacgccggagcgcacgtatcagatcgtcggtggcggcttggtgatcgacgagatcatgaaggcgcttgacgtcaaggaagtggaaatctgcccatgggcgttgcgggaaggggctattctgcgctggctcgaccagtttggccgcacgagccttggtttctagcggttcctaggcttccagcttcctcagttcctccaactggttcttcgccttgtgcagcttggtgaagatttcgttgcgctgttcgggattctttgcccgttggtgatcgcgcgtgagcttatcgatctgctcggtaagctgtgcggcctgcatacgccgtgtcatgcgcgcgtccagtgccgtgggagaggcgctgccgagcgtcacctgcgagcataacgactcccacagcgcgtcgatggaatcgaccgcaggatcgccgatgtccagcatcgcttcgccggccggtttccaatctgagacgaacactttgaatgtaggtgtgtgaccggcgcgtcccggcagcgcgcgtctcacggcgaacgcgcactcctgccgcttcgtaccttcgaagtcggcgtcgcgcacgcatacgaacacgattcccgacttgcgttgcatggcaatcagctcgacgatatccgtcggtatggcggcgttcttggcatgcaggcgcaatccgattgccagtacttccggaatgcgtgttccgacggcaagccgtgtattgcttggccgcagcagagacaacatggtgatcgtctcgatgtcgttcgccaatcgttgttttgttttggctgaaaccggtattctcgccacgaacaggcctttcggcaacgttgccttttctgcgggaaccgcagaggagttcggcagacccaatgtgagtgcggaaacggaaccgcaggaggcgatcgtcattgctggccttctttcgtgctttcatatcggttattggggcaacagtagtcgcaagagccgcaaattttgataacggcgcgtcggtatgtgactggcgggaatctataaaactgcgcgtggatgatgtctccatatattgagcaaaagaatgcattttttcggccatcgcgggaaccggtatcggcggatcgttcgtcaagcccgtcacctccagtgtgcaagtcgcctctttggtcaaagccggttgtggcgatccggtcgacgatcggggagcacccaaattcacctcctgtgcggccaacggcgccgactgcacacgtgccgccaccaccgatccgacatccgcgacgcaagtgggatggcgtatcggcgcaagcgcgctctgttcgccatgccgtgcggctgtgatagacgattgcaatctgcgacacgccgtgatttggtgattgaggcatgtgtgcgtattatttcatcttgcggtgatcagagcctaggtgagacgcccggtcccattccgaacccggaagctaaggcctagcacggcgatggtactgcactcgagagggtgtgggagagtagcacgtcgccgcacttaaactttttttaaatcccgagtcgagcatcgttcctcgggatttttcgttacgcgattcgcccaagtccaattatgacccgattatgtgcgaaggcgaatccagcggtcactgattgcgacgctcaggcagcgaaaaccaccaacagaacaatgccgtttcaataaaaatgacaggtaacggtatgagccaccaccagccagtggtgccgaattcgttcgcgggcgcaataatccaaggatgcgagcccagccatcccaggaatacggctatggttgatcccaacgacatggttattcctaaaggtctgaacaaacgcatgagctggaatcgtgatgcaccgaattcttgaacggattttaggccgcaatccccttccgtgagggaggggtcaaggccgtcactcatttgtttttcttcgatatttgcgattcggtttctgctggtcccgtatgtattccctcacgatttccaaaggtgctccgccgcagctgacgatgcagtagcttggcgaccagaaatgatctccccgtaacgcttgtctgacttcgggccagtcttgttctcggacgcgtttgctgctattggttttgaggctcattacgagcgtgctgagctgtgttttcggcgggtaggcgacaagcaggtggg

SEQ ID NO: 852 - DNA, 25961 bp, Unknown
  gut microbiota DNA sequence
gcccgcataagtcaaagcgtccaacacggtcacgtgcacgtccgggtgatggtcgaccacgtaatgcacgaaattcgacccgatgaaaccacagccaccggtcacgatgatgttcttaggagtaaacgtctcttcagccatatgtgcaatagtactttccctcttagtcaaaagcacactaaacacttcattgaccggatttcgaattctgagcgaaggaacactgctttcggctaaagaacagcaaagacgttccaatatccgtcactagattttttcggccatactctatcgaagagcttcgtccacaaccgatccacagcaaccctatacaaactctttcgcacgagctccaacacagtcgcaacacaaaaaacaacgaatatcgacaacacagacagcaaaatcgcgtatttgtcgttataaaaaacagacaggttgacccaattgaaccatagctgcttacgaataaacggctgctcagtaatcagataaacaccaaatgatgccgaagcaatatgattcactatctttgaatggaaatgcatcccacgaaaaagaccaaacaaggcaaaacttaccgcgagaataggaatcgaccattcgtcctgaaccggttcaagatagatgggaagattgtccgcatctccgacccataccgccgacaagacagcattccaaatcacaatagcgaacagccccagcaaacccgcaacgtttaaagcgaaccgagatagcctcaatgaataccacttatagtaagcaagtaacgtgaaaacataacagaaaccaacaaaattaagccccatacctagattcgccccgggaacgaaccttaaaagtccccacaagacagtcattaaaatacataattgcaggtgaggccttttgcccatcttctgtaaagacgttcgcacaaaaggcagcagaagcatgaaaaccgagtaactgcttacataccaccactcatttcgagtaagcggaaacaaaaggtcaagccatgtcgaggcaattacagaagtcggatcaataataaactgcaacaccaaagaactcagattccagaaaaacaggatgctccacagcgaccaaatttttttcgcagcctgtcgaagcgatatttccttatcggcaaggaaccaaacggtgataagaaggaataaagcgattccaatctttcctgacgccctgtaaagaaactggaaaaagagacgtttcagacaaaaaggttctgcccacaaatcaaagggacaatgaacaactaaatgatgagaaacaataagaatgattgcaattatccggagaagctccagcccggattctctgtttctctctgtcttcatctgttatttggtttctgaatggttgtcatgtcgctctgctcgacacaatcaaatatagaccttactttccactaccgttttccaacctattaaagggcatacacgcggaaataatcaaaagtactggtgccgaaaaaactagaggaagagcatatcttgcgctctcattcacgggagacaacagacatacgcagaaaaccagaacacaaggaaccattgcaatcaatagcttataattgcgcttaaagcaagctaaacatatagcaagacacccaatccaaaaatatgttcctggttttacaatcagattaacgaccgggattttatacagcttcgcaaatgactgcaagaatttctcacgcagattttccgtttcccctaaatatgtcggatacaattcttcatccggaacacccatatactgtttccacccactaactgtctgagaattcatccattggaaactgtcatatacagagccttgtccaatactcgccctacatgggtagaagaaaccaaatgttccagaaaatgtcgccgacagataggtatctggatgtataacaagatgacggccccataccttcagaaatgctctcaacgaaaaatcttttctgaaaagaactttcacaggatcaacgagttcgggcgaatatttagcaccaagatcactccatagcgcatcatctacaagcatctcgtttaactttttcttttcatcagccgtaaacgaagatggattatcccgaacctccctcgaaatctgctgaacaggaatcgttaacatttcaatacgactccccttctgcggattaatcaatgccgagctcatcaatgacgcagcagcaacgacaccaaccaagcccacggaaagaaaagtgtataatttctttttatctttcacctgaacaaaagaaacaagagcggcacatgcaatcgcaataatcaaaccctcattgcggaagacactcatcaccataaaggcacaagaaaagaggacgacaaacgtcctttcatttatcactttcttgtcaccgatcacttccacgagtaaaaccgtcatcaccgcaatcgcggcagcataaggtacatcttttaaaacagacaatgagtacagcgggaaaagcgggttcagcgcggaaaaaccaacaagcacacaccacaagcaaaagactcgattgatcccctcttcaccttctgcaacaagcagacgctgatatacaaaccatgctataaacgctagaacagcggaaacaagcagtacttgaatactcgtgtagataaagaactgggaatttgctcccaacggtttcccaattgaaaataaaacaccaataacaagagttgccaagacagggtgctgagaattatatgaagtgtagccataaaactgcgacagctgccagagactatcataaaaccctagtcccggcgcaaataacgcataataaggaatccaagcaacaataatcagtacccaagcagaaaaaaatgggtgacgtactttcctgcagttcttcgacaattccgattctttaggcacgctcatacgagaaagaaccgcgtacataatcccaaatgctattaacgcgataacgcagaatgagataaacgatttacaactatcaaaaaactgaaaactatgcgttttagaaaaagagtatcccaataccattaaaaaggagaatagtaaagaaaaaagacttgaaaaaatcattttccttcggaaactagcaacatgtttttccaaaattttctcatttcattctctcttaaaatagagtgacgcatagaggtacatcacccactatgcgccactctattttttacttctcttcgtgatactctttgtcggtattcacattccagacgttctttttatctccacgaccactcttgatgttatcgactgcttcaaaagcagtagccatggaatgatccatattgttgtagcggtgttggccattacgtccaacgcaatacaggtttccgaaggaatccagccacttcaccagatcatcgatctgataccaggtatcaaagtaagcaggatatgccttcttcacacgttcacgatgagaatcctgaatatcgttctttgatgcgataattcccatcttcacaagctcatcagccgcgaaatcaatgcactcctgatctgtcatttcccagaaagcatcgccttcattgcagaaatactccagaccaatccagaccttgttgtcgacatcctgaaccagatacggactccagttgttgaacacctgaatacgtccaactttcacgctggtatcctgtacataaatccagcagtccggaacgatttgcggattgcccaaggtcggaatatccgtttcattcttgagattcaggtgatcaacaaggaaaccaaccgtcacgaaatcacgatacggaagaccatcggcaatcttcttcatatccgacggaaccggcttcgtagcctggtctcccgctgcaatggaatcaaccagatccttcacaggcatggaggaaataaactcatcacccgcaagagtctgctcatgcccttcgctatcgcgataaacaacagaagcgatctttccttcggctgtttcgttgatcttcacgacttcagcatgcttaataatatgcgcaccgaactcttcatcatgcttagcgacggtttcccacagctggcccggaccgaacttcggataccagaactcttcaattaatgaggtctcaccctcaccagccttcttttctttgccaacaagcttgccccaagcatccttaagcaccgccataatgctgatgcccttcacacgctgcgagccccaatcagcggaaataacagacgggtgacggccccaaagcttctccgtatatccttcgaagaacattccgtagagggctttaccaaaacgattgatatagaagttttccagattatcttccggaagcttatgaataagggacttcaggtaggagaaacccactttcatggtctgaatgaagcccatattcttcagggtctgcggtttcaggctcacggggtaatcgaagaacttgccatgccagtaaatacgggaaacacggtgacgcttcagcatcacttcgtctattttctccggatcagggccgccaggctccatgtcatgagaacgattcagcttcttgtcgtcgtaagacggagcaccctgcagaggaagaacggtcttccaccaattcatcacacggtcatccttcgagaagaagcgatgaccaccgatatccatacgattcccgttgtggcgcacagtacgggaaataccgccaaactcgccggaagcttcaagaacagtgacatcatactgctcggagccgttatccttaagaagctcgtaagccgcagtcaagccagcgggaccgccgccgataattacaatggattttttagccattatgaaataatccttacctgcataaagctggtatcaattctttacgggaataaactctactacagagtcgaaacaccatttctaatgtgcgtaaatcaaccctttctggaaatcttgtctccagatcgagcccaagttacgttcctccgaaaccggtcctccaagtttcgagaaaccacccttagcgtagtactcttttcgcagattcagcatcacgatgtacttctcggaagccccgttacgggtccacacatcaccgttctcgcaacgctggcgccaatacccgttgcccatgttctcctcgttcgccacaggcgcgcccaaccaggagaaaccacgatgctggttccacgaatcacgcagatcgaacttgatcacgaaacgataattcgtgccgtccttgctccacacatcgccacactggaaacgctggcgccaccagccacggcccatgttctcctcatccgccacgggaccgcccaacgacgaatacccgccattcttatagaaagaatcacgcaagttgtacagaacaatgcggctctctttcgttccgcgagaccagatatcgccattctggaaacgttgatatttccaatcattcgacaacttcttctcgtcttcgatcggataccccaagacgccatgctcataattacgacgagcccattccttgcgtattgcaccagtcgtatagtgcgccccggttgacggagtccaggaaatcgcaccattttcgaaattctgatagcagttcaccctaccctgagtccaatcgcaaacttcattcgcaattggtttgccgataacgcttttctccgcgccaatcgagcgccactcaacgcccatattgcccttaacttcataggaagttgcgctattgctactcccgccattcacatactccttattcccgaacgcgttcatatccacattgccgctgatgccatccaccttgccggagctggtgtattgccatccgcgactgttggtcgggaacgagtcgaatcccatgcgagcgccatactgcgccacccacgtggttttggcgtaaatgtcggcatgtttcagcggtccttgcaggtagctggtgtacgagtaaacgccaagattcttgtatccggcggactgtagtgcgctgtaccaattgttgacgatattgttgtacacgttcgggtcggtgggcggctgatgcccctcccaggtccacttttccaggtcgtaatacacggggtacgccaagtcgctcggattcacaccgaattgcttgagtttggcgaccacgtcggcaccttcttctttggcgagcgccggagtgtccgcgtaggaataccagtagatgccgaacgggatgccaagtctcttgcattcggaaatgttacgttgcgctttcttgtcggcattgttgccttcgccgtagccgaggcggatgatcgcgccttccacgccgtcggctttcgctttggcccaatcgatgtcgccttgccatccggaaacgtcaatcacgcctttggcttgctgcacgaacaggttgttctggtagtcgaaaaaagctttcgaattgttgtaggtgccccagtgcgcgccgtattcattgctttcgaatttggagagctgtacgttcgcgtcggctacagcatttttgacatcttccgcacttaccggaatgaaggattcgccgttggttttggcgagcggatccggctgctgatccttcgtgccgaccaatgttggatcggtcacgatttcgccagtttcgatgttcttgacctcaccttcgggggtgacagccaggtcttccgaaaccacggtggcatcgtcggaaatctcgtcactgacgttatccggaagtttcgcattcggattgtcgggcatgctgtcttgcgattgctggccgcccgtctgatcatccgactgatcgtcagactgcataacaacaccattatctgcagtaacggaaccgctttgcgcaacagcatcctcaatcgcaatatcctgcaatgcgtaagccggcgcaaccgcaacggaagccgccaacgcaaccgcagacagcgcagtcgcaatcttcacaacatgatgtggcgaaaccattcgtcagcctctcttgaatacagtcatcaaccccaaatattcggcgcaaacgccctaaccgtcaactctaactgcaacccacaaccccgtccatccccaactccaaaatcatcccaatccccacatctcacgcattacacactgataagaatcggctagctcgttaggggcaccgatatggcatcatccattcccacatctcctttccagcattctcgctgaccttcccatcacgcttcgtagagggaccatttccaggaggggagtacgtggatcgtgccagtggaatcgggaagttcaatggtttctccctcgttaagcgtgagaatcaggccggaatcaacgttggtacgttgcataaccgcttgcagagagccgatttctcgcgccctggttttctcatttcccatattggcacacacttgaataagcccatacggttccgtagcaagagcatcgccgataagaaagtcaactttctcctgtttggacgtcggcatagtgtacgaagtgattgtttccgtacgcctaccggaagttcgtctctgcagttcgcagaaaatcgcagtttccagtcgttttccaatatcttgctggttggcgcgtgacaccgcgtaaaccataccctgatcgacggcatacattttcggcaccgcagtactacccggcttgagcatggtggaatactcctcaagctgatacaccagaaatgcctgcttgaacagctcgagtaacgtattcgccttatcccaatagattttccagccgatcgctcgcaacgtttccacaagaccattggtagacagctcgcaagccgtattgcgcagcaaaaacagcgctatctgtgtggcgagagtaatgttttcacgtccaaaacgctcagcgacatcacgtgcgaccacatcacgcacgtaaccttggagcgtttcgatacgatccggctcaaccatgcgttgcactgcagggaagccgccaatagttaggtaatcgttgtaggcagcttcaaaccgggtgacctctcgcggcgaaaacacggcatcggcaagagtgctgcccgctgtaggcgtttcgattccccgaaagtcgcagaattcacggaaagacagtggcgccatggcatgcggatgcgatcttccccggaaattcgttgcgatttcttcgctggacagtttcgaagacgatccagtaatgactagcgtcacagcttcatgttcggctatgcgctggcagaatccctgccaattggcgcattcttgcacttcgtcaaggaagaggtagcagccatggtcacgagagtcgggatattgccgccagtattccgtaacaatatcgttgagcacggtgtcttgcattggttgcagacgatcgtcagcgaagttgaaatagaaaatatcattacgcgagacgccgttttgtaacaaatcatgaattttctggaaaagatagaacgttttgccgcaacgtcggatgccagtgatgatgtgcacagcattgaacactgccggctgcggcagctcgcgtatgatttcgatgcggcgtgacggcgtaggaatgtcaaactgcatggactcacgaaccagcatggcatacgattcacatggattatccggcaccataagttcttcctttcgccgtccgttgcgaaacacccaacaatcccagcataacacttctcaaaaattttaagaagtttccaccaacacttctcaaaatttttaagaagttaccacagacgaataaaactccagagaatacctgaatgcattaacgactacaacacgagtgtggggaatcggggaaggacgggtatcgtacgctgtatattggcatttcaggtggactctcggaacgtgattcaattgacctgaatcgggagctgtcaccggggagtacagaatagtaggcagattctggaggggttatggcacggcacggcaagaagccaagcgaggaaagtacctcgtcacacacaccgagaacacttgccggaagcgcaacgaccaacacttctgccgacagcactgacgccgctgccagcggtatcgcagtcaacagctcgaccgtcagcagcgcatttgccagcgatgccgatggcaataccgggaatacgcttgtcggcaacgcttccaacgaagtcgaagcaaccgaagtcgaaaccaacgcaaccagtaccaacgcaaccagtaccaacgcaaccagtaccaacgcaaccggagagcgcacaatcagcagcagcaacacggctgaaaccagcaaccggcaatcacacgaatccagcgaatcccgccagccgcaagacctattcgacgcggccatagcgcaaggcatcagcgacggcgacgcttggacggaccagcgcgtaaagcacatctaccgccagatcatcatcgccgtagtcgtcgtagtcgttgttctgggcgcggtcttcggattcacaggcgtgcgcgcatcgcagcaaatgcgcgacctggccgcactcaacgactgcaaggaagccgtcacggccatgaacacctcctattccaaggcgttccagctgaaggcgaagatctccgaagcgttcaccagcttcgacgggtcctacgatctcgacaagcttgccgaactgcaccagacggaagttaccgcgccgaaaacgctgagctgcgccgccgacacttccgctaccatcagcaaagccaacgccgcaaaagccgagtacgataagcaggccaagcagttcaagcaggctttgcagaagagcgacgaatccgcggccaccgatggcggtgacggaaccgacaatagcgctgacggaacggccggcgacgacggaacggacgaagccacagacacggagggcgatgctggagttgccggcgacgcgggcgccacggacggcaccgtcgaccaatccggcgcagccgacgcgaccgacgcaacgctggacgatcaattcctccagtaaatcaaccaatcgcaacgctgccaaccaaccagccgatcaagccggccaatcaagccaaccaggcctgtcaaccaagccggtcattagcctcaccatctttacgtttcttccaactcttccataccccttttccgcatacccaacgtttcttttgattttagaatcaaaagaaaagcaaaagagagtcacatggcaggcaaaagaagaaacgttgaaattccgccattttcaagacttcacggctataaaatgcagtaacaagtcaaaagaaaagcgcaagactagggaaagaccaaacgaacggaaaggaggctctcctgagctggacagcggcaaatggtcgagagatcaccgatgagatgatcgatcgttggcgcaaatcctacgaacaaggcgaatttcctgaagacgaacgaacagtgggtggcgtgattatgggacgtccaccgctctcgaccgataaaagtccggcccatgggacgccatcatgaagagatgacagaaatgggcagagcctgacggatgaccatatttgtgcgcatcgcagcaagattgactaggctttaatgtgcttgctccgttaaacaaacgctgcaagcgttgcattgcaggcgcagaaggggagccatcttgaagaagaaacgactggcacgcgtgattattgccgcggtagtgaccacggcaattctggtggcgatcattgttggttgtgggccgaaatggggcgacggttcagcaaacgtcaacggcagtaattccaatagcagcaacagcgcatcagataatgtctccagcaacgacaacgccgcgcaatccaacaacaattatgcgacccacatcaccgtgaaactcccctcctactatttggagaacatggttttccaacgtgggaaaacgctggtagtcaaaggaacggccaccacttcacaacgcggaaaagttgttgacccaacgcaactgattacaacgatttcccaaggaaagaaatcagcatcagcacaagctaaaatttccaaaaatggcgatttcacctgcaccttacctaaacaaaaagcaagtcttaaaccatattcattaacgattttatacaacgaaaccactttgttgactctgaaaaacgtgtatgttggcgacgtatttattgctgccggacagtcgaatatggaattgaattattcgcaatattatgagggttcaggcaactcctacaatttcggcggaggtctgataacgaccgacgatctgccgaagcagctttccgacaacaacgtacacttcgttgcgagcgccaattcctcgaaaggtacggattttccgttacgcgacgtgaatgagcaggctggcacctggcttgaggcgaccgccgataattcgcagcatttcagttatctggcgcagcagtttgccatgcagcttcgtgccgcgcatccgaacgtgccgatcggcattattcaaaccgcatggggtggcacgccgattcgacgtcacgtgcagggcggtgatatttatacgaaccatattgcgcctttggaagggttccacgtggcgggcgtgctgtggtatcagggatgcaatgattccacgaacgaggcgaccgcgatggcgtacgagtcgcagatgacgctgctgatcaaccaatatcgtgaagtgttcgatcaggatgatctgccgttcctgtatgtgcaattggcacgctggcctggctaccagtacacgcaaaacgtgcgattcgcgcagttgaacacgttgagcaatgccggattacgcaatgtttccaacgttgcaatgacggtgtcgcttgatacggacaagggcacttcaacgttgatacatccgcttggcaaagatattctcggcgcgcgcatggccgcgcaatatctggcgatgtcggaaggcaagaccattcccaacgggccgcttatcgcacatgcgaagcatgcttccgatggcacgatcgtattgtcgttccggaacggcaccgcaaccggtttgcaggcggaaaagcccaattattcgaagactgcgagcgcgaccgtgcccgattatgatgcgaatccggacgcgactcctttgaatggtatttccaacgttgcaacgccgacttccacgccattgcaaggttttgaaattgccgacgattccggaaagtgggtttcggcaacggcaacgattaagggtgatcagattgtgctgagtgccgccgatggaagctcgaattgcaacgcggtaactcaagtgcgttactggtggaatggaaatccggttatttccagtctgctgtataacgatctcggattgcctgcaagtccgtttattgctgttgttgagtaatacggcagattgataatcgggcattatccggctgcgacgactaatcgataaagcggactgtaattaggttagaatcaggcctgtttcatcgaacttaagtcgaaagcaatgtcgacggtcaaaatcgacgatcaatcgacgtagtgcggggcgctggacgctatgcggggcgttatggagccgctattgccgttgccgtcggtactaccgtctgcatcgaaatcttgcgatttacgaagcgagccggcagccagcgaacgtatggatcgaacggaacggccaatctgcgcctgtttttcctgagcatccgactgtattgcgggaatcgtgcccgtcacagggcgaatgcggccggtcgcagtgggaatgaagcttggcggcaacacctgcgtggtaacggcacccggcgatgacacatggtagtgggccatcgaagccagggaatcgcgggtatcgagttcacgctgcatatctagctcatcgtcgaactcagccatcgctgccctccctctcttcaagcaatctctgccggtaatctctccactggcaacggtcatcgttccgagcgtaacgcaaggtagcataccgttacgaacgaaatcagcgatatgcgcaactcccccactgtttcgcaacttttccgttgcacgtgccgcagcgagccacgccagcgagctattgaaaacccgccgttttggcataaaaaaaggcttccgaaatcatccggaagccctactggcggagaatacgagattccggcagcgacttgctgttttcggcgtaattccaacgtttctgggatgccgattaagtgtttcgccgcttaactcgccgcccccacggcgtgtcgcgatggggcgaaacgggtggtcatgaacgggtgctttttggattgcgcgaaacaggggagagtattgaggatgctttttccatgaagagcgtgtagtttaaccagtatatagaacggcctccctttgccaacagcagcgatgtgctaaagattacgattccgaatgaggtaatgcgatctattccccataggcaaagtgaaaataaaggtaaaatggccgtcgttaaagtccagatgataatacttagccagtttcttgataattcttcggggaatctctttcgtgcttctatcatcaaaggtgaatttgactggtatagcatcgtacatataaatgttgctgtagccatgactaatccggagagggtcgacagcccgatgaataaatcattgggactgccatctccaggtagttgaggtactggattgctgagaagccaccaagtagcggttattatggttgcgcctaggatgtcagtggcgggatgcgccataattccatttatcaatgttaaatgtggcattaattactctttgaaatatcgtataaataagtctctttatcgactgaaacagcaattaaatgattgattagtccagtgaataatcggggttcgtcattggatattgtaatctcgctttgttctactacaggatgggatactaaatttaattccaacagtttgtctgcgaaatcaggtccacttacttgaacttttttgttctgatttactgcagatatgatgaagtcttgcattatgtctttaaaaacgcgacgagcttttccatatgctgtatcgtctgtcaggctaatcctaatgtcgatatcaagatcggcccccactttttgtgcaatttcttgataaaattctcctgcgttaccttttatttcataagctttatcaataaaattttttgttgtgaatgatgctgtgagggaatctattccgcgaagttcttttttgaaacgctcgatgctatctgctgtgatgacgggaataacatcccattcataatcttcttcaggccagtaatagtttagtgcttttttgagggggtctacgcttttaccagcattgccacttactctgctgacaagagaatatttcgggaagaaggcgaacgctgacgattttgctaaattgtttgtgttgctatatgcctcgctgtccatgaaatcagtgactctcttgtgttcctgatcaatgagctgcataaaatttggctggaattgttcaaaaactgtaagtactggataatgcttgtctgttacagaatcaaaaataatattatcgagtattttattttcccaagggaattcacgaaattcactgagacgcttcatccaattgatatgtcccgtggttccattgctgataccatcacgagacctcagccggagccagtagaactgcactgttctttgaatcacgcttgtcaagtcgttcacctgcttagtaggtcatatctacctaatgccaatcattgtacttcatttttcgggtgcgacgattgggatgaaggactctacggcccttcctaaagaaagtgtttgtggcaaccgccgtagttatgttgagtacatgctttatgtgtgaaaaataacggggagaaatctgcctaatactctggggtagcgtgggatggttggggggtcctcaccggtgttgttatgcggcgtcggcgagaaatacgtgtttgtggtggtattcgatgaattcatgtgaaggctgactgattgccggtaatgagattttgcgcccttcgaagtcatagagccatttgtcgttgatgtcggagtgcttcaccttgtcgtggttgaccatgatgcaatagtcgttatcgatggagatgaggccttgatcgaaggcgcggtcgtggaaggcgttgagcagcaggccattcgatgccgcggtcttctcagtgggggtcgatgccttccagggtttgatgtggctggcgatcagcagtgtgggaagctgcagaccggtaatgcaacaggtgctgtggtagttctgcaatagtgagttgcggaaataggattggttgacccgctgaagcgtggttgtcggtcgttcctctccggcgggtgcgcgttcggcgatgagcaggaacgttgcggtttcaagagaagaataacggtcggaagccagtgacaccgggttgaagtcgttcgcgtccgcttgcaggagcgcgtgccgaagcagatccaggcattgctccatgaaagcatcggggtcttcggcgtaccattgccagacttgggaatcgagtttgcttccatgcttcatgcctacgcgcccgcgggccttgcggttgtcgtcgtaagctgcgatgttccagattttcaatgccactgagctgggagtgcggtgcaggaacgatgcaagacgttgcacgtcaagccctttgtcgtcgcattcgcgtggctcgagcacgatgtacaaggcgaacgccatcattgtttcctcgcgtgaccaattacggcgaggtgctgatgcattgacatttactgccataaatccaggatagtgcggaatgatacatgcctgtgctttgtatgcggtatgtcttgtgagtcttagcctgtattcgatgcttcgtgtctgaaatcttgtgggaaggagtggaagcttagcgataagcggacagattgttcttgaagttgttgtaaggactttccttcactgttttttgggtttgccttgcgtgttggttgtgtgctctacagcgacaagagggacaagagggaatctatagtgggaagtggatggttgaagggggcaagagtgctgaaatcctagtgttttcaaggactattaacccatcggaagagcttgattagctttaatccttcgtgtatacagcgtctactgggaatctagtgggaactagagtgagcctaatgagccaacatggaaattcagtggcaggcgaagatgtatgtcggaatctcaatgatttcaacgtttccaaggacgctggttggcaccatcctgcggcgacatggaacctacatggaaatttacagtgcctacatggaaatcagtttgtatcagtcagtgggcgcacgatgcgtgcgctcagcccttggctgactgatactagcaagcttttgtctgactgaacgcatgcatcataaagagcgattgggtatcgagctggttgcgggatgcagggcggataaaactaatcagccgttatattcgatatgtaggctggggtcgctttcgtgttcgtcaatgatttggttgtaagccttgaccagacgcgaaagggtttcgtgacgtgctgcgttggtgaagtggccatgctcgtgcacattgctggaaaggaacgattgcaggtcccaaacttcaaggcggttttcgaagcccatgtcggaggctaagtcccatgcggttttgacgcggtcgcgtacagtgatgatgattggatgcagcccggccttgatgttgcgctggcatttatccatgagtagggatgctggggcagtggtgcagtgtatggctgtgtcgccgacattgaaatcgcctccacgcccagtcggatcgtcagcaacggacacgccgttgatttctacttctggggcaacgatgatgagcttcgctgcgacaagatgttgcagaacggtaccgacgtacatagtgcccggattttccttttgtcgctgcgctgcctgctgcagcagatgttccacagccgcatcgacggaaagcgagttgtcggattccaatttgaatggtttgctggtgaagaatgcccgaattcgtttaacccagtattgctcgatctcggtgaattgctccgctgttggacgtaattcgttaataagctcggcatagtcgtgcatcaatgccatggtgccgcggctggttcgtccgccctctgctgcgagaagtcgtgtgatgccatattcggcaaggattttctggcagttgtctttgctgattcccttgacttgaccttccttgttcgtgtgatagtcgctggcgtcaatgggaagcgtgtctgcggaaaagaagcgattgagctggatggcggcagccaaagcgcccttggtgtttacctgatgggactttcggaaatcatcgatgggagtcagatccattgtttgcctcgcttatgcagtgtgattcgagagcagagtttgctccacgtacaggtctttgccaagggtgttgttcagagcaggcatgaagtaatgcttgccgagccattccacgacagggacggaaacagcgtcgccgaatccgaacatcacttgattggggcgcaggcccgtaatgttgtagtgggccgcgcccataagagcagcgtattcgcgtggcgtcatccaacggacagcggcttgaccattgcccatacgaatgattgcctggcgagatgagccgcctcgtgcggtgcgcaggcagccggagatgtcgtctgcgcgaacttcccatacggctttgccgttgcgggtgcggcgataagcggtccggtaggaaacggttgtttcgttacgcaacgtttccacgcgggcagtctgaaccggcgacagcgaatcaaggaatttggcggttctttcggcatcccaccagcgttcgtcgtcatcagccatgttctcgacgtacatattgaggccggacatcagaggagacggcggctcaggcagcggtgcgcgatgcgtgcggagagaggtgtccgcaaagacctgctgcagccagtcagggcgcaacgaagaatcgaattgttcggcggacggcgggttctgcaggccaaccaaaaagagtcgcggtcgggactgagggataaatcgacgggtatcgatggacaatacgtctacggagtagcccagtacattgaaagcatgcaccgctgcggcgagatcctccccagagtgggaagtggccaatccgttcacattttcgagaatggcaatcggaggacggctgtccccaagttcttcgagcagtcgcacgtattgccagaaagcgccggattgtttgccgttcaggcccgtacgagtgcctgcaagggagagatccgtgcaaggagaggatccccaagcgatggaagcatcatggggcaggtcgtcgccggagagctcgctcatatccccctcgacaagggtgtggcccggcgtatccgtgaagttattgcgatacatttcgcacttggcggagtcgatgtcattcgaccattcgacttggaagccggattcttcgagcccaaggcgtgcgaggcctattccggcaaagaattcgagggcttgtgggcatgccttgccggtagccgcgtgcgtgcgattgtcgttcatgctcccaccttacctcgtgcctgactgtcgtcctaaccatgatactctatatatagaacaagtgttcgaataagtgtcgtgaaggaaagaggatcgtatgacgaagcttagtgatgctgttaacgcgtcgaacttggattttcatgaattagcccggagatccaacgtgagtgagaaaagactaaatggatatctgtcgggtcgacatccgtttaaccaggcacctctagaagacgccgtagctattgctaatgctctcggaggccgtattgaagattacatggaagatgcggcggaggacgacgaggcggaaaagctggatgaccgacttcgtctccaattatttctggatagcgttgacgaatacgagctaattatgaagaatgtcggtcgccctcaggcagtgacgattggcggctctggagaaaaaactaagaaaaggtatagtcagctgattattgaagggatgctattgcgcaaatattattcctcggatgaagttcaattggcgaaagtgattgattcgtttaggcgtcttatcccagacgacgcgtctccagatgtgctgcatacggtagatctgctggaaaaagatacgcctagccaggggaataagagccagattgtgttttctaatgctgatggtagttactccagcggtgtggatttactttttgatgttctctatggaattaccctgcatggagatcctgataggctccagagacttgctagatggccaattacggcacagtgccttgccttatatgagtctaacgttgagagacgcaagggtgtggtgactgttcgacagtatatagatcttgcaatcaaagatggtctttttgcgctggattaatgagcgtatttgaaaaggcgcggtgcagttcgctgtggattgaattgcctcacgccttgctgagtgaactcgctgcagcagtttctaggatcagctgctattcgcactctcgccgggctatctcgcgacgggctttgctggcccacaggcctcccttaccgatgagctcattcaattgcgtggcgttgagctgttggtagtgcaggtctgttgcgtagggagggagactcgccttccatccggcaatgtctgtgacggaaccgtcggcttcgcctgttgcgggatgatgagtggcgttctcgctcgcgccatcttgccgtcttgccagttcagatgtcggttcgtttgccgtaaggcattgcaaatcttgcgttttctccggatcgcccacggatcggcatcgtcggacaaggtgggaaacaccgtcttgtctggttcgtgcggaacgttgcaatagcttggttttgacgaaaacggcaagatggcagcagctcttgtgacagcgaccggatccggcacagttgcttctgaagtctcagtttgttcaccgctgagggtgtccgtggcttccgcactcaaatcttcagagctttcctgattcggatgatccgcataatccggcgacagtcaccaccacatgttgccgtacttcttgcttgccagcagtggctttgggcgtcgtctgccgtccagaacttgctgcttgctgaactcgcctttcgcttcgttgattactctgtacgacggcacaccccaatacaagccatccggtgtgagctccttgttgtggtcgaagtagtcttggatgaacgtacgcacgtcactgtcctcgcgctcgctggtgccgtaagcgctctggttgagcgattccgccgtatcgtccgtttcgccaagccagcggacatgtgcgcagccaagcagcggattaccctccaaccggtaggccagggctcgcggcatcggacccagattgaacttgaccggtgcgaacagccgctgctccccattctccggatcctttgccatcagaaaagcggctcgtgctgcgccgacgacgccgatactgccgcctccgcgatatatcgccgctccttggcccttattgagatgtcgcagcgcgataaccgtgcagccggtttcctcacacagccttttgagcggagccatcacctgcgcgcggatatcctgacccttgtagccgttggtgtcgctgcccaaaaacgacatcaacacatccacgacaatcaggccgatatgctgctcacgcacagcctgtgctatctgtggcagtgcgtcggtgagcgtaatcgctacctccttgccatccttgaaaacttccgatagggcgaacatcttggatgcgtcgccttgtgcggcgcgaatgcgtgggctcacggtgtccgccagtccatcttccgcagtcagcagcagcacgtttgcggggtcgcatccagcagacccatccggccatactgttcccgtggtgacgtgagctgcgatatctaaggccaaggtgcttttgccagtcgccggatcgccgtcaatcagtacgatctttcctttgggaatatggcccggccgcaaccacaacggtcgctccggtttcacatcagccaaacgggtcagcaaataggcacggggcgtcagttcagtcttaagctcagactcaggctggctgctttcgcttggcaaaatctcaaactccaagccgctcatcgccgcgttggaagcgtcgtaagcctcacccagccgcctggataaacgtcaacgaccgcacgaacggtgtcagtgtctgcgccacttgctccttccagcgagtgccggtgtcgtccttatccacaatggcaaccacatcagccccactaagggctaaacgcgctgaatcaagatccagtttcgcggcgaagttgccgccacctcccgctgcggttacagcggcatagccgagcgctcgcaatgtgccgacatctttttctccctctatcagatacactggcttgcccgatgccatggcacgtttcgcgtcggaggccatccacaacgggtgcttgtcggcggtgttgccgctttgcgagattcgcttggggggagagcgacgaacaatcagaccgtccgcatattcatatgctgtgccgcgctcgctgtcgtagatcattgcttcatagccattggaacaagccagcgtagctggagcgttcagcgcgttgagcacatcgtcggcttggcaagtgctgcagcggagcaatgtggcgcttcccagtggggaatacagcacagtgagcgagtcagctgcgccgcagtttgggcaagtgccgtacagcaggccggtgtttggctgaactgcaatagctgcgcagatggcggcgaacataggggatcggcctagggccaatggttccaagtatggttcgggcatctcgtaccgctgtctgatttccgcagagttttccgtgtgtgcaggtgtaatcgtcgttgtctcatttctgctgagaagcggagcgttcgtgacattcgcatgccgtatggccgccaaatcggcggcagtgagccggctatcgcagctgtaactgttgtagccgctgtaatcggcatggccttgaggtccgctttgttgatcgaacaggtcgatgattttcaatccaagtgcaccggcaatggaagcgatatcgcagtgctccgctccgaagcagtgcagcatggttttgccgttggactggtcgtaggtgatgtgcagtgaagtgccgctgtctccgtcatgggcgaggcagctgcactgagcgtgttgtcttccggaggtgtcgcgcggaagctcttggagcctgagatctcgaggatagcgtctcgcggcttcgagcactcgctcgtatgaggttgccatgctcactcctcacctgcgaattcgcgcacgctggtgagattcaccagaaacgtgttacctaccttgcgaacgcgaatctttccggttctgatcaatccgtaaacgcttttcacgtcctcgtagcccagcatctccgccacttgtgctggcttggcggtgaggcgcgggtagtcattctttgttggaattgcagccatatgtttccttgctctcgtgcggaacagagcctgaggagcgaagtgcttccgtcgaattcggacgcacttcgccctagatggttctgttgtggttgttggctgcaccggtgcatgttccccaagtttttgccggcccccgggaagctggaattcaggatatgacgttattccaaggagcgcaaaggctgaaaacggctgaagcttgaactagatgtgtggtcgtgaaatcgttggaatttcaacgaaaacaagtgattctgcggtgaaataaggcgttcagaataagaccgaataggctttgttggttgcaatgagattggctcatggcatgttgcctttgatgagcccgtttgtcttggttgagtccagtggccttggagtttgttggcttctggtagaagttggttgaatttgttaagtggatttctccgtgcttattgagtgcgccattcaggcgagcgcctgaataagtcgctgaaccgtatccacctgcacatccagaggtaacagcttgaggattttcgcgcgttgactgtcgtccaaggccttcagcacgctcagccgggcatcggaaggcatgacggcaatggtgttcgccaatacttgaagagcggagttcttggcgtcagaaggaatggtgtctagtgaagcagccttctgagtgcttgacgtattggctgaactttgtgcgctctcttcggacgtcgtggcattcggtgttacggcgttcttagcaagcgctgcagtctcaggatcggcggttgctcgtctagctcaaaatcatggcgttgtagacccaatgcttcgccttggcacagtcccagaaagccagatagcgtcacggccaatgccaagctcggcggcatctgatcggcgatggcctgtacctgtgcataagtcgcaatcttgtgcacatgcttcgtggcagggcgcggaaccttgaactggactgcgcttgatcaacgtggtgccggaatcgtccagcggcgcattggccgcgtgcgacatgatgccgtccagcagttcgaacacatgccggcgaatgctttcgccgcggccatccttggtgacgtgcacgctgtcgtaccactggcgaatatccgcaggcctgatggcagccatgggcttgttgcccagaaccgggttcagatagtcgcgcagatactgctggtatttttccttggtggtctgctgaatcggctcgttgttcaccttgcaacgcttttccacatagtcggctgcgtaatcacggaacagtaccttgctgccggcatcagcattgtccgtaacttccgccggagcccatgcgttcaggtcaatcaaccgctttgcctcgttgagccatgcttccgcctaggtctcatcgccttcgtcgaatcgcttgtgaatgcgcgcaggaagatgcggatactgggatcgggcttcgacgggcggtatgtatgaggcgtcgtaggagatctacccgttggcaccgacttttctctcaatcttgccgaaccggcgtcgtcgactggctggccgtgtgctttgtgaagtgcgtgccatgatgatcaatttcaaccgacgtaaaagctgccaagcgggcgactctgaagtctgccgctcaagtgcttaagcggcaccgcttatcttgccgcctatcttactgtaaaagacaggtcgaaaaggatgatgaaggagagggggtaatcgttgaaaaaaacgccaaaaacgttgaaattccgccattttgggcatgaaaaaaaggcttccggaatcatccggaagccctactggcggagaatacgagattcgaactcgtgaggctgttacaccaacacgctttccaagcgtgcgccatagaccactaggcgaattctccaattatgcaacgtctcacagtgtctatccgcgaaacgcaacttgattaggatacaacagtttctttcaaaccccaaatcggcgtgtcgcagcgtcccagatcgcccactcactggaggaatcagcccgctgccaagactctcacagtccgaattcctccagtggctggaacaatcagtacgcccataggccttctacagtccgaaacctccacccactggaggaaaacacccgcgcaccggcctccaaacgtcctgaaacctccatccactggaggaattggtacgttggtatgcttcccagcatccggattctcccacccactggaggaatctgcccgcacatacacccccgaattgtccagattcttccagcgagtggagggatccggacacgaactcacgtaccgtgagcacagcagctatcgtttggacgcgaaggcacacaggttggcgagcatggcagtgaacatcgggcggaccgaaccgaacttatcaagcagcgatcccgaaaccggagcactagccgctcccagcaacgcgccaggcagcaacaccacgcctgcagcaagcacagacgcgccgaatcccagttgcgaagcgttcggaatcatatagccgtaaccgatcgtcacaaactgcagcagcacatacgcaagcaaatgccaacggaatttcacactccgcaacacggtcagacgaaccagcggcgagaacgcacgatgcgacacccaagcgaacactagcaaagcggccatggcaatcagcagcagaaccactgcaatcacacattgcgtagtcgcggaagtatccccattactcactgcggtaacggcggatccgccacggtcgagcgcaaacacgaaacagacgaatccgactgctaggcaaagcacatgcagcggattgatatgcgcctcttcggtaggagtgacctgatgaatcgttttagggccgcacaccagcgaaacaaacaggaacggcagcagaatcacgaaaatccaacgccacggcatgaacgtgccgacaagaccacccacaagtcggtccgagtgccggcgccacggccaccaccatgcctccaacgcccatcagcatgccgattttgcttttcggagactgttcaagaatgatattgaacatcagcggaagcgcgattcccgtgcccgctccctgtagtattcgcgcggtcatcagcataggaaagttcaacgtgcaagctgccatcaggcagccggtgatgcagagcacgattgcggtaaggaagatggtacgcaacttcagtttgcgcttgaaatagcttgagagcggcgtgacaagcgctaccgtaagcagatagccggtcgtcagccattgaacagtggacgtgtcgacgtggaattccgccattaatccagggaaaagcacgttggtgagggtttccgtaaggatgccaatgaaggccatgattccagttgacagaatggcaagaataagattgatggagatgttctcgtcatcttgcgttgccgtgttattgtttcgcgcaatggactgtgacatggatttgcggccgttcccggccttccctttcttggcccggctttgctgagccaccattccgttatgccgggcagtttgccggaatggcgattatttgcccagaaatacaaaaagatccttgggagcggagcgctctaccaaggatcttcatattattaagttgaatgttgtggattgggagcctcccgcgcgccgcgggaaacacgaaccaaaagacaaaaaaagggggttcccggagcgtcacgctcgacgggaaccccgacgaaagaatgcggcggcgtgctactctcccacaccctctcgagtgcagtaccatcgccgcgaccaggccttagct

SEQ ID NO: 853 - DNA, 13538 bp, Unknown
  gut microbiota DNA sequence
gagctcgcggtccgggtacacgtcgttcgcgttctcgtagaacgccggatggtgcaaatcggttccgggcaccgccagcgcttcgggcgtgtgcgtcaggtcggcgaacatcatcggcgtggacagcacgtccaccgcgtaatcctcccaaccgaaacgcgggtcgaacaggccggggatgacgttcgtgcgttggaaatcgagataatcccacatgcgttggcgcagcagcggatacggattctccctgccttcgaaatacggggtgttgcggaagaaccatgccagaatcgggccgatcaccgtgcccaaccgcagtttggcgatcgcgtcctgttccgaaacgtagtcgatgctgacctgtgtcgaagcggagcaacgcatcatgcacggaccgaactgtccgacacgtcccaggtaggcggtcatcgccttgtatcggtccttcggattgacgggaatgtcggcgtaactggatttcggttggtaaccatagttgacgagtcggaaaccaagttcttcgaggatggggtcgacttcgcggcggaacgcgccgtacaatgtggcgagctcctccggcttgtgcaggatgccgatggacgtttccaactgtccgcccggttccaaagatacggagatgccgtcacgggcgagtccgaccagtcgcccgttttcccagtattccttgttttcgtcgtaatacgggcggatgcggttgagcaacgcttcaatgccgttgctttcgtagtaggtcaccgcggtatcgtcgctgttatgtaccggcaggtgttcgatttccacgccaaaaccgccggtgccgcgctgttggcagccggattcgaagaatttgataaggctttccacatgcttcggattcggctcggtcagcaggtgcgcgtacgtgatctttggcgttgtcatagtggccatcctaacgaaaagcgccattcgcaacgcaggctacgctatacggaaaatcgataaccgaccatcattccccatcgatttggctggcgatttgaatgccgattcgacgaccatcgattttacgatcgccgaatcagccgtcgatttggcggctcagataccgtcgaaccgacgtcggaaagtttcccaacgtcggttcgacggaaataagaatggcgattcaagcggccttctcgctgttgcgcgcctcttcggctgcgcggtgagccttcttggcggctgcgatcatcagtttgatgcggttgagctggttcgcttcggatgcgcccggatcgtaatcgatggacacgatgttggcttccggatgcagtcggcggatcttgccgaacatgcctcggccggtcacgtggttcggcaggcaggcgaacggctgcgcacaaatcacgttcggacagccggattcgatgagctcaaggatttccgcagtcagcagccagccttcaccagcctgcacacccacggaagtgacctcgtcggccttcttcacgagttccggcatcggcaggtcctgggagaacttgccgtgcgttaaatcgatcgccttgtgcacaggagcgttgtacatgtcaagcgccttgcgcatcagcgcgtagccaagcttgttgccgcccatgccgaggtaatgctcgttccagtcggaaatgtatgggcgggtggtcatgaattccatgatgcccggcaccacagcctcgcaattctgcgattcaatcacgtcgaccacatggttgttggcgtccggctggtacttgacgaggatttcgcccaccacaccgacgcgcaccttgcgcggctcgtccttcaacggcagcgcgtcgaaggatttcacaatctccttaacgagcgtctgatacggcagataccccttgccgatgaacttgcgtgccgttttggaatggccgtggtgttcgagcgtttcacgcacgatggtgtcccacgtgtggtacagctgattagcactgcctggcgtcacctcgtacgggcgtacgcgatacaggcatttcatcagcagatcaccgataatcagcgccttgatgacacgatgcaacaatgccggagtggcggtgaagcccggattgtcttcgatgccctgcgtggaaatggcgatcactggaatctgcggatagccagcatcgaccaatgccttgcggatcaggccgaaatagtttgtggctcggcacatgccgccggtctgtgtgatggcgagcgcggtgtgttccggatcgtatttgccgtccaaaatcgcgtccacgagctgaccgataaccatgatggccgggtagcaggcgtcgttgttgacgtatttcagaccggtttccacgttttcgcggctggcgtgttcgagaatgtcgaacttgtaaccgccggaacggatcacggattccaccaaggagaagtggatcgggctcatctgcggagccacgatggtgtagtccttcatgtctttgccgaatggcacgcggttggcgtacttcgacatggtggcggaattgtgcgcggatttcttcgcttcgccgatgccgttttccgcggcacgcctggatgcggctttgacggcttcggtaagtttcggattggctttcatcacggtgtcaagcatgacttgacgtcccggagtcggcgcctcagacccggtcttgcggaattcgccctgcttgttgggtacgctgtcttgcttgttgggcatgactgcggcgattccgcgctgcttgttgcgttcgcgttcttcgacggctgccttgagcgagcgcagtcggattttcgccgcgcccaggttggagacttcgtcgatcttcagcatggtgtacacgtcggccttgtcggcgaggatttcgcccacctggtcggtggtgatggcgtcgagaccgcagccgaaggagttgagctgtacgagttcaagtcccggataggaggccacgaagtttgccgccgagtacaggcgtgcgtggtaggcccactggttggtgactcgcaacggcattttggtgactttgcggtcttccacatgacggaagccgtccgcgttcttcttgcgcggatcgtcttcgtccgcggcgaggaaatcactcaggttgagcttctcccccggctgcagttcgcagatcgaatcttcagacaataccaccatgccgagcgagcagatggtttccggaatgccatggttgacttccggatcgatgtggtacgggcggcctgcgagcacgatgcctcggcagtcgtgttccttcatgtaggcgagtgccttgaggccttccatctgcacatcgtgcttgaagacttcgttttcggcataggccgctttgactgcggtttcggcttcttcacgggtcacgttggcccaagcgaattcttcgacgatacggtcgaccatgagttcatggttggccatgttgaagtatgggcgcatgtaacggatgccctcttcgcgcagttccggcatgtttgcgccgatgaccacgggatagttggctactaccgggcagttgtagtggttgtcggtgttgggtaccaggttctcttcgtagctgacgcacggatagaagatggttttcacacccttgctcagcagccatttgatgtgtccgtgcacaagtttggccggatagcaaatgttttcggatgcgatggattcgatgcctgtttcgaacagttcgtgcgagcttcgtccggaaatcatcactttgaagccgagcgaggtgagcagcgtgaaccagaacggatagttctcgtacatgttgagtacgcgcggaatgccgatttcgccgcgggttgcgttcttgtcggtgagtctgcggtaggcgaagcaacgcttgtacttgtagtcgtagaggttcggacgatcggaacgcttcttcttcgcgtctccgcctcgttcacagcggttgccggtcacgtaacgggatccgtcttggaaggtggtgatggtgagcttgcagtgattttggcacagtttgcacacgtctcgttcggaggtcatcgacaggttgtcgagttcttcgccgctcaaaatgttcgatgcggtatggcgtacgtctgcgatcaccgcctctttggtgtcggtggtatcgacgtcttcgtcttccgcttcgtcggcgtagtgcatgcgtgcggtcagtgcggcaccgtatgcgcccatgagtcctgcgatgttcggtcgggtcacttcacgttccgtaagcagttcgaatgcgcggagcacagcgtcgttgaggaacgtgccgccctgcactaccacggtgtcgccaagttcgccggaatcacgtagtttgatcaccttgtagagggcgttacgcactacggaatagcacaggcctgcggcgatgtcttcgatggacgcgccttccttttgcgcctgcttcacggacgagttcatgaacacggtgcatcgggagcccaaatcgaccggatgggtggagttgagcgccgcttgggtgaattcctgaatggtcaggcccatggaaatggcgaacgtttgcaggaacgatccgcagccggacgagcatgcttcgttcactgcgatggagtcgatcacgccatcgttgatggcgagatatttcatgtcttggccgccgatatcgatgacggcggtaacgcccgggctgaccatttcggcaccgcgatagtgagccatggtttccactacgccttcgtcgaggtgcaggccggtggtgatgaggccttcgccgtagccggtcgcacaggatcgtgcgatccatgcgccttcaggtagttcggcttggatttttttaacgatttgtacggctgccgtcagagggctgccttcgttggtcgcataagaggaccatacgatttctcgatcgtcgttcaccaatgtcgctttgatggtggtggaaccggcgtctatgcccaggaagtgcggtccttgggctccttcgagcgtgccttgatggatatgctcgcgatgatgtcgttcgttgaatgcggtgcgatccgcttcggtagcgaacagcggaggcatggtcggagtgttggacggcaggttttccagttcgtccagtcgtgccagaaggtcggcgcaggttcgtgcttcgtaatgcttagtcaaggtcgtcaccatcctgataggcctgcaatgcggcaccgtatgccacatacaggtgagcgtcggtcggaacaatgaattcgtccactttgccgtcgagcgcccgcttgaacgcggctcgcagttcggacatgaagaacaacggaccacccaggaagatcacggttccgtgaatcgggcgtccggaggcaaggcctgcaatggtctgcgtggccactgcggtgaagatcgatgcagccagatccggcttggccgcaccatcgttgataagcggctgcaaatcggttttggcgaacacgccgcaacgtgatgcgatcggatatagggtttcgtattgcgtggccatttcgttcaggccagcggcgtcggtgtcgagcagtgttgccatctggtcgatgaatgcgccggtaccgcctgcgcaggaaccgttcatacgctgttccggagtcggcttgagatacgtgattttcgcatcctcgccaccaagttcgatgatcacgtcagcctgcggatattccttgtcaatggcttcggtttcggcgatgacctcctgaacgaagggcacgtcgaggctgtctgcaagggcaagaccgcctgaaccggtgatggccaggcgaatcggctcgtcgcctcggccaagcttttccagctcctggtggatgtcggccaatagtccggccacggtggcgcgcacgttcgcgtggtgacgccgataatcggagaacagcgcgtccgcgagcgcgtcggactgatcgagcaccaccgccttcacagtagtggaaccgatatcaagacctacacgcaacggctttgtgccgtgcgtttcggtcacggcttctgctgcttcaaccatgtctcaacctctatcgttctatccgccgggctgcattccatggcaggcatggaagcccctaccccgggttatccaatcatgtaatcgtagtctgtgcccacgcctaagtgctttgtaaatgctcgcaatcagcataaaatgcacgacacagcgcacaaattagacaactaatccagtcaacgtgcctaattatgcatctggacgctcgacgaatgtcgagatcgcaaacccttccaagcatttccatgtcaggatgcgctgccttcccctgcagaacggtctttgccgtatatttcgggaatgaatcgtgtttgatcatgtaatttcggccaaatcaccacttgtccgctttccagtgatttcggtacgtcgatgatgcgttggttgctgcttccgcggaattgcagcagggaatcatgtaattctttgatataacggccatccacgagaatgtcgatcagttcgagcagctcgcgcttgtcggggctttcgccttcgcgcatgagctcttcccacgtgtagccggtccagcaccaaatatctttggtattaccgaaccgttcgcgtattttgcgcgcaaggggcaacagcacgcccgtgttgagcaatggttcgcctccgaggaaggtgatgccttgcacatacgattggcttaagtcatccatgatttgcgcttcgagcttgtcgttgtattcgtggccggcttggaaatcccagattgacgtgttgtagcattcctcgcaatggaacgggcagccggacacgtacagcgagcatcggatgccttctccatcggtcatgaggaaccgtttgtagtcggcgatcatattgcggctcatgcggttggtccattgccctgctttgggattgttggaacgagttgtggggatgaaaggtccgcgattggtttcgtccgccgcaaagtcacgacgttgaattgctggattcgcgctgctgatcatacgttgtcccttcacgttttgccgttacgtcgcgtttttgcgattgctgcttgcctcatgattgtcacagaatgaaagagggtggaaacccaccctctttcatatttcgtttatgtttgctgccgccgcgacccttacttggcttcctcgaaccattcacgttcggaaccgtcactcaaggtgacatgaccggtttcgccgctcatatgcttgacgcggtgcgcgatctcctcgtgacgtccatgcaccatcgggcgctgcaccgggttgcccaagtagccgcaggtgcgcttggtcacgttgcagtggtccgggtcggagttgccgcactccgggcacttgaaaccttcctcagtgggctcgaagtcgccttggaatccgcaatcgtagcagcggtcgatcggcgtgttcgtgcccaggtagccgatgccgatgttgtaggcgtaatcccacaccgcttcgagtgccttggggttggactgcagacacgggaactcgcagtagttgatgaagccgccggacgcgtagtacgggaagtccttctcgtagttgagcttttccattggggttggctgcagccagaccgggtagtggaaggagttggtgtagaagtcgtggtcggtcacgccttccacgtcgccgaacttctcgtggtccatacggttgaagcggtcggtgagggattcggccggcgtggagtacacggaatagtggtagccttccgcgtcgctccattccttgcacagctcgttcatgcgcttgacgatggacagtgcgaattccttgccttgcggatcccagccgtgatcgcgcatccagttcttgccgtagaacacgctagtcgcctcatacaggccaatgtagcccagggaaacggtggcacgttcgttgcggaacagctggtcgacgctgtcgttggcgccgagtcgaccgaaagctccgaaacggaacagggtcggcgcattgaccggcgcggcctgcttgcaacgcatgatacggaattgcaatgcctgatgagccacggccatacgctcgtcgaagatcttccagaagcgatccttgtcgccgtgggattccagtgcgatgcgcggaacgttcacggtgacgacgccaaggttcatgcgtccgtcttccacgtccttgccggtcgccggatcaatccaaccctgcaagaaggaacggcagcccatcggggctttgaaggagccggtgatcttcacgatgttctcgtagaagatcacgtccggatacatgcgcttggtggcgcattcgagggcgagctgcttcaaatcgtagttcggatcgcccggatcggcgttcacaccatgcttgatggtgaacacgagcttcgggaaaatggcggtgtgatgttcggaaccgaggccgcggatacggttcaggaagatggcacgctgaatctcgcgggcgaaccagtcagtgcccaaaccgaagccaacggtcacgaacggggtctggccattcgacacacgattggagttgatctggtattccatggtctgcatggcatcgtagatggccttgcgggtctggatcttcgcccacacctcacgcaactgctgcaaacggctggcatccttgttgaacggctcgtccatcggcagggccggacggtccttttcgaaatgcagacgcttcggttcgacatccttggccaagcgcacctgacgttcggcgatttcgatcggcaagtcgtcaggcatgatctcatgggcctgctcaaggaacttgtcgtaatccttgcgcgcgtattcgacgaagtgctcgtcggcacggttggcggtctggccaccatactggctggatgccacgtccttcatgatctgggtgatctgcgtggcggcgatggaaatgctgttcggcgatcccatcggcgcgttgccgagagtgaaaccgttggcgagcatatcccagtagttcggcagagagcagttggattgtgcggtgaacggcgagtagtcggcgtcgtggaagtggatgtcacccttcatatgggcgttggagaccgcgtccggcagcatggagaaggcggacgccttggacaccgcgcccgccagcagatcgcgctgggtggagtagacgttggaatccttgttggcgttctcgcgcaccagagcctcgtcacggttcaccagacgcttgacggcttcgttgatgtcggtggccttggcacgttcgatgtctttgttcagacggtagttggtgtacgtgcgcgccacatcgtacaggtggtcttcgatcagaccgtgctcaacgagattctggatgtcttcgatcttggcgggaccgttgtaacgatccttgatttcggcttcgacctgattggcgatatcacggattagctgttcctcctgcggcccgatcttcttatcaaggtcggcgaaggctgacttcaccgcgctgatgatgttgatcggatcgaagtcaaccacacgaccgtcgcgcttctcgacgagcaccttaccggttcccgttttaacggttgcggagatggcattcagagcctgcgtttccattcatcatcctttccgggtcggaccccatccgaccaggttttcatgcttcgttatgcatgccagattgttgctacgtccatgactgtacgccatagccagcactaaatgtagtagcggcacgccggcagtaaaactatatattccatttttcggcttgattccgccattccttaacttgtgtgacaaaggtaacgatttcgccacggagtgtcgcccgagtgtcgatttgacgcactcaccgaagagggactatacaaggcggggtaccctcacggaattcgaacatgtgtttcatttgtccgcaagatgatggaatcttgaactatgacttggaaccaggattacacacccccggcagcgcagccgaacagcaaaccgctgccacgactggccggcgaaaccactgctgacaacccctggccggtaagcctgctcagcgagaaattccatatggccgtcgaacggtggccatcggtttgggtggccgggcagatcacgcagatcaacaccagacgtcagggcagcgcctatatcactctgcgcgatgattatcaggatattgcgttggaagtcaacggtttcgggcagttcgccgcagccgccacgccttttgtgcagggcgaccgcgtcatcatccatggcaaaccgaatctgtggatgaaacgcacgtcactgtctttacgtggcgacgccattatcgcggccggcgcgggtggcagcctgaaggccatgatcgacgaattacgcaagaagctgaaaggcgaaggcctgttcgacgctgaccgcaagcagcctctgcccgagtttccgcattgcattggtctgatttgcgcgccgcaggctcgcgccgaaggcgatgtcatcaccaacgtgagattgcgttggcctgttgtcgacttcaaagtgacgcatgtgcatgtgcagggtgagcagtgcccttccgacgtgatcaaggcgatcgcgcagatggatgccgatcctgatgtcgacgtgatcatcgtggcccgtggcggcggcgctttcgaagatctgatcggattctccgacgaaggcgtggtacgcgccgcggcagccgcccatacgcctctgatttccgcgatcggccatgaggatgattggacgctgcttgatctggttgccgatctgcgcgcatccacgccaacggacgcggcgaagaaagtcgtgccggacgtgcgcgagcagatgcaactggtcaacgtgaacatcgaacgcatgcgcatgcgcatcgacgccaccgtcaacaatgaaacaagactgatcgaaggctacgcgaaccgtccaagcctcacacagccgctcaccatgctggaaccgcatcagcgtctcatcgatgatgcaagaacccgcatgagaatcggcctgacacgtattcttgacgacgcaagcctcaccatcgaaaaagcgcacgcctcactgaccgcgctcagcccgcaatccaccctcaaccgaggctatgcggtagtgcagggagcggacggccatgtaatcgacgatgcgaacgccgtgaacaccggcgaccaactcaccatgacattgaagcacggcgtgatcgtgtccgaagtcaccaccgtaacgaaggagtagcaatgaccaacgaaaccacccccgcatccagcctgaccgacaaggaacgcgaagccatcgcacaaatgccttacgaagaggctcgagatcagctcattcaggccgtgcaggcacttgaagccggcggactcaaccttgaccaatccatgcgccagtgggagcttggcgaagccctcgccaagcgcgcccaaagcctgctcggcgaagtgcgtgccaagcttgacgcagcccaggcggaacaggccactgcggccaataccgctggaacgcaagacaatctggcctgaaaatctcaaaaaccgccaatatatcgtttctacatgactgtgcgccacgtacttcatgcagcgcacagtcatgtagaaatttcggatttcttcatttcggcaccacactcgtccggatgatgtgtagaatgaagattcgttgcctcagtagctcagtggatagagcacttctctcctaaagaaggtgtcgtaggttcgattcctatctggggcactttttatgcggatacgcagccgatatgcagttgcgccgacactcttctcatacatcgaattgcacggttgccagcaacgccttgtgatcgcttccatcgattttcaacgatttggcccgaccggccaacatgccggaatccaatacgatatggtcaatgcccgcaaacgtcggcacataatcgatattcgcaggccacgtgaacaccaatcccccggccgcttgtttggccgcatccgtgaaccgtgttcccaagaaattacggaacggcgcatgatcgtcggtcgcgttgaaatcgcccatgaacacgtacctgcgagacgtatcgtaccggagtcgaccaagctcatccaatgaacgcttccactgctgccaatatccatcggtcggagacgtggtatgtaccgaaacgaaacggatctgcgtccgaccatcattgaatgcaaccgtggctcctggcatgaacgacgcgctcgaatcaacatcatcatcagctggatcaacaagcggactcgccgaccacaaaccattgccaaactcaccgtccgaactcgcaacctgcgcatacggcagcaaatcgccaataccagccttattcaactcgtccacgaaagcatcggtcgtttcttgcaatgccagcacttccacacgctcgctacgcaccacatcgacaatttcctgcgcgtcggcacgacccttaaacacattgcatgtcatcaaacgagcataatcatcctgcgtattggcggacgctcccgaaaccgctgcaatcgcggcacgctgaagcttcgtttcattgtagaaaaacggatactgccaccatacttgcaacgcgatcgccgcaatcgccagcaataccgacatcgttcgtttcgagacaatgccgcaaatcagcgcaatcaccgcaagaatcgcaaaccaaggcaccaacgaaacgataatgggaacatacggccacgcctgaatctcagcaggcagtatgtgcgaaacagtgcccagcaaagctgcaatcgacagaataccggccagaaaaccgcatatgatattgcgcacgcgatgcgacttagttttcttcaacgtgcgaataggcttaacagccttcgcctgcgccgtacgcggtttcgtaggcgtaccagaccgtgccatacatcctccaacatgggcattgcgttccatcagtcaatacatcaatcatcaaatcagccatcaaaaccgagttcatgacgaacgccatcggcaatagtgcggcttcatagtaccccaacttccacattcgctggcaaatagtcgcaatcgtctccataaatttaacgaaaaacaatcgaaacacaaaaaatcaccatcttgccccaaccattaaatactattacgctggacacataagaaatcgtaactaatgggggtacgacgccttacgcaagagcaatggctgctcatgtataccgagagggggctataccatgctggaacttgatcacgtggggttttcgtatggaaaacgtctgattttagacaatgcgagcgcattattcgaagaaggttcgacaacggcaataatgggaccttccggctcaggaaagaccactttgctgcgtttgatggacggttctttacaaccagacactggctccgtcaccattgatggcgcaaatgtcaattccattgatcgaaaaaatcttctcggatctttatgtatgcgcatatttcaggattacaggctcattccatatcttgacgtgcgagaaaacatcatgttggcgtttgaagcggcgcataaggacctcggacaaaccaagattaaggaaacttcccgcactgaaagcaacacaatcgataacttgcttgaagaagtgcatttagcaggctatgcaaaccatttggctgaccaattgtcaggaggagaacagcaacgtgtggccatcgcacgcgcgatcgccatgaaaccacgtgtgattctcgcggatgaacccaccggcgcgcttgatgaggaaaatacgcaggcaacattacgctggacgcgtgaacctccccgacct

SEQ ID NO: 854 - DNA, 21761 bp, Unknown
  gut microbiota DNA sequence
tgcaaacactggaaagcgccggcgtgtcgaaaacacaggaaaaacgggctgcggacgccatcgcgtagcgaaagaccgtcggcaaaccctgaaacacctcaccgcaaaccaacatccgggcgtgtcgcaaccacactatccgtttacggtccatcccccaagccaacccatccgagaaaacctcccagccgaaagctgaaataggagaaacagaagaaagcagataaacggaaccgcacccggatcgttgatctgaacacattcagatcccaactgactggaagtgcggtttcccacatgcgcagccgcagtcgacggcagaataaagcaacgcaaccggaatccgatcaatcggtgcaaccgaaacggtagagggcccaaccctggccgtattgcgaataatcggcaaccttcaccaacgtgccgccatccacatacgtatcaatcaattcctcattgtggaaggaatcgtactgggcgcgatacgggaatgactgcagactctgcgcctggtcgcccatcgtaaggaagtattccggagcgtcggtcagcggacataccgtgccgagcacctgctgcgcatcgccggaagcaaacgcggtctccactttgccgaacggagcggatggcacatcggtgcgcgcattgatgatcggatacaacatgttcgcgttgaacagcgtctccgcatacatcgaaccgttcaacggatcggaaatgatggtggcctgggtgcccgtacgttccgtgaccttgcgcagcacagcgatcttttgctcggtgagctgctcgttggggtcgctttggttcagactggaatgcgcgatgatcgtgtcgcgagccgcggaacgcgatgggcatacgatctgcgcggaaaccgcaagtatcgcaatcacaaggaatacggcgattaggacgatccaattggaagcgaaagaagcgttcttcacggaagaaacagcagacgcagaagaaagggaaggaacggaagaagcactattcttcgtggaaaaggacgatgcagaaggagcgaaagaagcggatgcggcgcacgcggaaacgcattcggcaagagcgttgattccaatgacaagcagcggcagcgcgaccagcggaagcatggtcataatacggttttcatcgcgataccacggagcgctgatgatattcggcaacgcgccgaccagcgtgaccgtgcacacatacaccagcgcgaccagcaggaatgcggccgtcaacgcaatcacgtcacgcaggcgatcgttgcgacgaagtcgagatgattcggacgacgcggacgcggcatcagtggcgttggagtgcgacgcaggtggcggacaggaaacggaaaccggggaatcagcggcggaaaccgcaatatcagaagtcgaagcatcaacatcgacatcagcagaagccacgggaaccacagtggaagcagccgacgaaaacgaatccgaagcacgcgcagccgcgcggcgggaagcgcaaacgaaagcggccgcagttcccgcaatcagcaacagtgcgaacagaatcgcaggaaaaccgtcaagcccatccgtgagacagaacgaaatcgactcccacaaattcttggacggctgatggctatggaaccaggaatcgggattcgcccaacggtccgatttgaacgacgtcagcatcaacgccacaaacgccaccgcaccgacgcacatggcaatgaacgcgccaagaatcagcttccacggcaagcgcagcacaatgaacggcaccagaatcagagcatacgtgaatgcgatacgcgggtgcgcaacgaggcaaaccacgcctgcgacagcagcgatcgcaagccattttgctatatgctcgcgcgcggcgatcgcatcgaacaagcgcaatgtggcggcgatgaggaacggcagcagcgacgtggcgaaaccgaatgcgatcagcggaccggcattcagcagtccgtacgggtggcacaccgagctgacggcaagcacgggcacgaacagtccaatcagattccgcagaacgaaagtagcgtcggaagcagcgtcatattgccgattgccggctgacggaacctgctgattcgagatattcgacgattcagatacggacgacgattcaggcgtagacgatgcttgagaaatacgtgaaattggattggaaattggattaccgcgattccaacgtcgcaggaaatacctgcataataccagcattccggcagggaaaatcacgcccgaagcaatgatccacgtgatattgaatgccgcgtagatcgaacattgcacgccgaacagcgccgcgatcttaatcacaaggtaagcacagacgtgaaacaacggcggataaaacgaatcatgcggccacaaatgcagagccgcccccaatccctcgtcaagcagacggtgaatgaaatagtaatgcgcgggggcatcgctgctgacgatcggcgtattccacaccgtggaggggaaccacgcaatcaccaggcatagtgcggacacgacgccgataatcgacgtaagccacggcaataacgcgcggagcgacaccggacgcaacatcgcgtggcaccgctgcaggccatgtttccgcccggacggaccgtccttggccgaatcattcctggctggaccattcgtagccgaaccatccttggccgagccattctgccgagcctgagtctgcacataagcctgcacatgagttcgcgcacgagcctgagccgagccacaatcgcccgacacggaaccggtattcgtaatctgttcggaagtcatcgattccatcgtagcgagtgccgcaaccatgctcaacgcttattctctggaatcacttttcaggaatcattcagacttcatgcaggggtataacagtgttgcgcaagaaaacaatcacgttggaagcccaagatgattgcacgggacgcaccatgcgctacgggcctgccttgctgcggagcgcgcgtcccggccaacgctgacgtcggcatgcgccggcgcgctataacagagaactggagaagtaccgcatgttcgttctcaagaacgcatgggcggcgcttggtcgcgtcaaatggcgcaccgcgctgatcgccctactcgcactactggtgtctttctcggctgccgtggacttggcagtgattcgagccgacgacaccgccaataatgaaacataccagtcgcaaaaagccacggcggtgattcggccgaacgcgcaaacacaagccaagcgcgacggtgccgattccagctataccgacaagtatttgacgtgggaaaagtacagcacgtatgcaacggccgcacagagcaacaacgtgaccttcaattacacgttggcaacatcggtgccggtgcgcgaaagcaagtcgttgcaggcgatcgccgcgaaaaacgacaccagcgaagacaagaccggcggcaacctgaccctgcaggcgttctacacgttggatgccgcgaaaatcaacgactacggctactacaaggtagtcaaaggcaagcatctgagctataagacgcagagcgacggcgtgctcatttcgcaggcgctggccgataagaacaatctcaaggtcggcgacaaggtgacggtcggcaatccgtcgaaggcttccgacacatacacgttcaccgtgcgcggcatttacgaatacgacagcgacgtgcctgagggcaacggttccgacgcgaaatacgcaaaggacaatcgtgagaacgtgatctacacgacgtatatcaacttcgccaagaacgggcttgacacgacggaggccacgggatgggccattccgaatctgaatatcatcttctcgctggcgaatccttccacctacaacacgttcgtgcgcttggtgaagaaggccaagttggacacgaagacgtacgagatcacctcgccgtcgcttaccgcttacaagaagtcgatcgagccgcttgattccgccgcttcggcagcgcgcatcatgctgattgccgtgacgattgtcggtggcatcgctttgctggcattgattgcatgtgctgcgattggcggccgccgcgatgagatcggcatggcgatgatcacaggtgtgaccaagggccgtttgggatggcagttcatgctggaaacgttcatgatgacggttccgggttggattgtcggtttggttgcgggcgcgctgttggcgaagccgatcggcaccgcatgggccggcgtgcaggctgtgtcgatgacgtccgcttcggtgtggaacgtgatctggtacggcttgggcgcatgcctggtgcttggcatcgtggcattcgcgcgcgtggcctgcttcaacctgaaccaactgtttgaggaacgctcggaggtgaaggcatgagcgacaacatgaatgataagaacgagaacctcgacgagaccgtggtcgacgagactgccgagaccgcatcaaacgagaccgtcgatgatgttgcgactgacgatattgcagctgacgcatcttccgctgattccattgaatccatcgattttgcggtggtatacgacgatgacaatgcagatatcgaaattgccgcaactgacggcgcggaaatttccgacgatgtaaacgatggcgatactgcagtagctgccgacggcgatgccgtggtatctgcagataatgcagataccaccgaagttgcagatgacgctgcaactgctgctgatactgcggatggttcggatgtggtcgccaacaatgcgaatcaggtgaaggaaacgcttgccttgcgttcttccgacgaaccgaccgtgctggaatcgcatgaaatggtgaaagccgattccgcaaccagcgtctcctcacagctcgaccgcgaaatcaagcatcatcgcaagaaggatgcgttcttcttcaaagcgaatccgacgttcgcactcgatcatgtgaccgtgaccaatcgcaagaccggccgcaatattctcgacgacctgtcgctgtcgttccatgcgggcgccacgcatgcggtgctcgtggacgcggaggatcgcgaacagcatcagacgttgctggccaccatggtcggcatggtacgcacggaccgcggcaacgtgatgcacaaaagcaccaacctgagcgacgtcgaaccggtcgaaatgttgggacaccgcatcggattcattccgcaacgtttcgctttccgccccgacctcgacgcggaaagcaatgtactgtacgccatggatgcgtcgaaccgcaacttcctcaagccgaagcctgtgatcgcccgcgacctgctcaagcgcgtgggcttcgacgaagtgacgtccggcctggcagtcggcgaagtaagcgaactgaaccagcgccgcgtggccatcgctcgtgcgctgagctgcgaggctgaagtgatcatcgccgacgagccgaccgctggattggatgccgacgatgcggccgtggtgttggatctgttgaagaagttcaagcgcgatgccgaccgcaagcgcgccatcatcgtggtgaccaccaatccggagatcgccgatgcgatggagcacagcgtggaactcgactagccgcctagtgcaacgggcgcacgaacatagactctttcgtgcgcccataggtaagccctttggaattctggttttagccaaattccaaagggcttgcgtgttctggaaacggtctgccctactcgacgatacgcatgtggtactgctcggcgagcggcgtgacgtcaagcacgccgtatcgttcgagcagccgcagccattcgcgcctgttactttcgccgaaacgggccgccttgcgcgcataggcttcggccgtcaggaacttcggcggaatcgacttgctgttgtacttgtcggccaccatcaccacttcctgctcaagattcatgggcacatagtcggccggaggcaatggcaatccttgcgattccaccgcttctttggtgagtcccacaccggtgtggttgcgcgcgaactgcgcgatagactcgtcaacaccctcattcaacaaatattcgtagcctttaagcccatgccgcacgtaattcggaccgtcgaatttcagcggtccaccgtcggaaccgtcttgcttgagcagaaaatacgtgccgatatcatgcagcagaccaccgatcaccaccagatgctcgtcgatcagcctcggcggaacggtcccacccgtaagcccgtccgatgatggaatggaggggatgcgaagcataccgaacgattcgcttccattgccgtcttgcgtaagcctaaggccgaaatcgcccgctttttcaggggcatcgtccggtagtgtgcagcggcgggtgaacagtgcattctgcctgcgtgccatgcgacgtgcgatgtcggcgacgactacgcaatgtccgtgaatcaaatcgtatgcggcttgcgattgcgcgatttttcgatgcagttcgtcaacttgggcgagtgtaggaatatatccggttgtcataccgcctatcttaggcgctgtatgacgattgccgcatgctgaatccggtcgaaaaaaaactggaaatccccgatgaaagtttcagccgaaaaattccgaaatacggatttcagattacggatttcagatggaacgcacacgaaatgcgccggtacggttggaagcaacgatcatctgattgttttccaaacgagtccagccatcttcgacacactgatcgaaaccggagctggccacaaccacgcccttcggctggcctgcagcctgatccgcttcggattcaccaagcgtacgatagcgcatcacacgatagtcatgcgcctggtcgccacggccgtactggtcatagatttccacaatgcgcttggacgtgacctcacgaccggccgcgcacagagcgatgaattggtcttggctctggatcatgcagttgtagctggacttcggatagcttttgcgcagttcgcgcaccgcctgcgcgaccgcctcgtcgagtgcgaaaccaaaaccgatgtactgcaggatcactgcgaagaaaatggcggaatcggaacggccgccagtggactgcacgatgttgggatcgaccgggaacgcgcggttggtgatgatgttgcgaccctgatcgtcggaaatatcgccattgtggatgaagctcaatccgttggcgtagaacggctgctggttctcgagaatcaacggcaggttcgagctggccaaacgcaggtgccacaggcctccacgagccggagtgttcgcaagctcgtcgaaaatcggatcatgtcgggctgcgatcgtgttcttgtagacggcggtgccggtttccggggtgggagcgccaccgtcacgcaggtacggcgactcgctcggcacggtgaccagcgcggagccccagccatcgttgtggatttcgctcagattccggaaatcgcgtacggcctgcatgccgagcacgccattgagactggtgttgcttccggctgccgcgaatccaagtaatctgcacatggttgattactctacagggcttgtaatgcaacgcgcgcatatggctatcgacattgcttatagcgtgcgaaaaacagcgtgattccaacgattcttcgagataagaccatgcaaaaacctacaaaatgccctacgaaaacgggctgcgcgacgatggcagatacgatcgccatcatcacgcagcccgtttcacggcttgtttcacacacgctttagccgcggaggacgctgagtcgcgaggaacagcggctgtatctcaatcagcggattgtaaggcgcaaggccgaaccatttgaccggagatcccgcaaaatgacgaatcgcatacttgacttccaaagaaatcgcgccacgctgcgacaccttcgactcaggcataagcgccttgtgtatcagcacatatcgaatcggaccgatattcggatcagcatcaagcttcggatagcggctttcctgcctcggcagatcccccgacttcgacaaatcgttcatgatctgatgaatgtaagctggaatcgactgagaaaccttgaaaccaagccgaatgcgaacacggaacatataatccgtaccgaaattctcaaccgaatactcgcgggtgaacggctcatcggcagtctcgacggaaacagcccaccaagcgcgggcacgttttggatggtcggcgaaaatcgagaagaagatatcggtatcgatacgcttcgtctccggatccgacgtgagatagacgatattgtcggcaaaatacggaatcgtatcgtcatcatgcaaccgcttcagcaccggtaggcattcggcgggctgcatatggcgacgctgcgcacgttccagcttcgtgccttcgttccacgtgtacataaccagcagaatcgcgaaggtaagcagcatcgtgaaccaaccaccatgcaggaacttcgccatggaagcgaagaagaacatgaattggatcgcaaggaacagcacggtgaatacgaccgctccgatacgacgccccgaatgccagatgtagacggcaagcagaatggtggtagtgatcatggtgatggtcaacgccagaccatacgccgcggaaatatgctcggaatcacggaatagcgccaaaaccaacagcgtggaaacgcaaagcaccgcattgaccacaggaatgtacagctggccgcgggtacgggccgggtaacggacctgaagatgcggcatccagttcagatgggtggcttcagacaccatcgtgaacgcgccggtgatcaacgcctgcgatgcgataacacccgcgaccacggaaagcacgacggccacgtaacgcacgctgggcgtcatcatttcgaagaacgggttcaaaccgtgcgtgcggatgtaagccgaatcatcccaatgattgagcatccatgcgccttggccgaaataacagagcacaagcgcgattttgatgaacggccacgtgaaatagatgttgccacggccaacatgacccatgtcggaataaagcgcttcggcaccggtggttgacaggaacaccgtacccatgatggcaagcccggcggcattatggctgctgaacaggaatctgacaccgtacacggggttgagcgccgcgaacacgctccaatactggctgaggttcgccaagccgacaaccgccaggaacgagaaccagacaagcacgaccgaaccgaacgccttgccgatacgctcggtgccacgcgactgcacagagaacagcatcagaatgatggccgcggtgatcatcagggtcagctgcttgttttcagtgaaaagtttttcaaaagctggcagcgtctccaagccttccactgccgagctgatggacacagccggggtgagtacggaatcggcgaggaacgcggcgccgccgagcatggcaggaatcgcaagccatgcaccgtactttcgaaccaacgagtacagcgcgaaaatgccgccttcgcccttgttgtcgatacgcatggcaatcagcacgtatttgacggtggtgataagcgtgattgaccagaacaccaacgaaagcacgccgagcacggcttcgcggtcggcatgcgcaagtccgccctgcccgttgaggaacgtctgcatggtgtacagcggcgaggtgccgatatcgccatataccacgcccaacgccacgatcgccatggcgggcgtgattctgtttggaccggattgcagacggctccaccaacgaccgacgggacccttgctggccacctggtcaagtttggcggcctcctgctgtttctcctcgtgctgcttgatcagcacctgtcgctcttccttagtcagcaccttgtgcgaaaccttcggcgcctgcgtgtatgtggctgcgtgaaacagcggctcatcctcgtttggctcgttagccataacgctacctccaagtggcgggccttccaacccactccccaaaataaacgcaaaaaggcacgttaggagccttacgaagtcttgtcaaatcttcacattgtttcttgcgattcttgatctcgcacgaagtaaacttcctgtgggtttttttctattttacctcttgtctttctcttactctctcttattttcggataaatcgtttccgtcctgtcgattttcggaatttgttcagattccgtacacttcgcgcgtggtctttcgcgttgcctgcgcgacttccgtcagcggtttatcgagataattcgccaacgactgcagggtgtaggggatcatgtatggcgcgttggtgcggccccgatacggcatcggacttaggtagggggcatctgtttcgaccatgacatggctcaatccgacaatgcgcgccgactcgcgaataccatcgttgcccttatagctggatgtgcccgaaaggctgagataccaaccgttttcacgtgcgatctcacccatttcggcatcaccggaatagctgtggaacacggtccgttcgggagcgccgtccgccagcagcgtttcgatgacttccttatgtgaatcgcgatcatggatctgcatgggcaggttcagttctttcgcgagcgcgatgtgcgcgcggaaggcttctcgctgcagttctttggcggcttctccggtgcggaagaggtccatgcccgtctcgccgatggccacaacctggttggggtaggcggtggcgaggcggtgcacttcggccatggcgtcttcgaagctggtgtcgtgccatggcttgtatttgagcggcaacccgtctgggcccggcaccccgcggtgaccgtggagcacggattcgttggggtgtatggcgatggccgcatgcacggtttgggggtgttcgcgtgccatgtcgatggccgtcatgaggttcggcagttcgcatccgcagtcgatgacgccttcgactccgacttgttgcgcttggttcagcagttcgtcgacgctgtatacggggacttccggctgtcctttttcttgcgcttcgtggctcatggctcgcgagaacggcacgacggacgccacatgcgtgtggttgtcgatgacgtgcgcgttctcgggaagtggttgcggtgctggcgcccagctgcggtcacgatggtgtttgctcatgcctccagcctacgctcgatggcagtcttgcttcggaagccgcgttattcatcgatggcagtgggattaaccaacgcacctccatatgttttgcgacgtagcgctgaaacgctttccgcgattagtcatggagggtgagggtggtgaaagaccaggagggggcggtgtaggcgccgctggttaggtcgattgcggtttcaaccggaacggttggcgaagccttgccgatttcaccggcgtacgggtcggttccggcgagcacggtggcggttgccgaagcgcgggattccgcggaaacaccaagctcttcaagcacttggttcagatcaatctcggcttcagcgtcgagcgcgttgacgatacgcacgtaggtgacgccttcagcatcattgcgagccacggtgacggtacggcggggctcttccggcttctcaacaccctgtgcaacaagctctccatcgatatacagcttcatgctttcgccgcgatcggccacttcgatgcgcacctgccacacggttccggggaacacttcgtccatggaccattcggtgccgtcaagattgtaggcggtaccgtcgcgcaccaccttgatttcgaaagcacgaccgaaggaggtgatgttgtggttcttgccgttgatgtcgccgtggaccagctgcaagccccaacgaccctgatagtaggtgatggtggcgttgatggtgtaggcgtcagagtcaatgttgaggctcgtgttcatcggaccattgcctgcgtaatggcagtcctcaagatcgatatggcggccatcagcggtgtcaacgctgaagttggtgatgtcggcgtgagcggcaccttccaagcgcaggccaacggttggtggcagttcgcgacgcagcgtggtcttgccttccaccgcgaccggccatgcggtatcggacgtggtggtggcatacatctgctgcacccagtagctgtacggcaggtaggtacgttcgttgtcgaagtagatcagatcaggattccagctgtgatgtccgttcttggcaaacagcggcgcatacgaagacatgaccacggcatcgccgttcaattccatgcgacccatgaacgccgcttcggaaagaccgttgatcagctgcgtgttccacgaaccatactcgcccaagtacaccttcgggccctcacgatccgtggtgtcgtagtggtcgagattgtggaaccaccagctggaggactgataggaatgctcgtcaacgatgggaacgccggcttcacgcgcatactgccaaccagcctcgtagtcgggaccgctcggagccggaccgaccgtgccaaccacaacaatatccgggtaggtggccttgaccgcgtcgaagatctgctggaagcggttcctgaacacgtcatcgatgagatcttcgttgccgatgcccaaatattcaaggttgaacggttccggatgacccatggcggcacgcttggcaccccattcggtggtcgcggcatcgccattgcagaattcgaccaaatgcagcacttcatcgatgtatgccggcatgtctttctgcgcgatcggcaccgggccctgactggtgttctggcagctcacggcggcgggcagcaccggcagcggcttcgcgccaatggtttcgcacaggcacaagtattcgtagtagccgatacggaacgactggtggtagccccacaggttgaaattgtgcggccgatgctcaacatcaccgatggtgcgatcccagtggtacatgttatccatgccaagaccgtgggtgatgcagccgcccgggaagcgcatgaagcgcggctgcaggtcggcgagcgccttgaccaaatcgggacggaaatgcttgagcccgttgtaggtggtgcgtggttcgagggtaacgaaatcaagatcaacggtaccttccgtggtgaaggtgagtcgcaaagcgccttcatgtacaacgatggcattgctttcaccggaaaccgtcagcgaaacctcttgcttacgccaatcgttggaatcgacggtgatatcttgttctgcaatcgcatttccatcgtcgtcaatcagagcgacggtgacgggaagtgcggaagcttcgcaattgctggaaatacgcatccatgcggagaaatcgtaggtttcgccggcacggaagaccatgccgtcccagccgatattttcaagcgaagccggcgcctgttcgacttcgacggacgcatagtgcgggttttcttcggctaccggattgtcggtgagcacgtcgaaggctgcgaaggagccggcgggcacgattttgcgccagaagctgtagttgctccagtcggaggagtcggcgcgattgtattcgaatgcgccgttctgtacgaggtcggcgttgagtccgccgtcgccggagtagctgatgtcttcgtagaagatgccccacaggtcggtgctgatgttgcgcacgcctgccttgttgagggttgcgatgagtttgtcggtcatggtgtgtccttggatggtgttggttgtttgttgggttggatggtgttgcggtacgtgcgattggttgcgattcgacgtctgtctggcaccgtttcgtcatcggtcgaccgccggtcgcgctcggggaagcgccgctcatcgggaatctggcgaccgtacgcatcgatgcacagcggggtgccgtcggagtagccgtgcgcatgggcgttgggatcgaaccaacccgcatcgatgactagggtgtctcagccggcgtccttgaggtggtcggccatgaagcgcgcgttggccaggacctcccgatcggtgacggtggtgccgtaggaatcccagctgttccagcccattggcggtcgccatgcttttggcagatcctcggtagtcgccattgccttctccttgtacaacgttagaaaagcgtgccgtttacagtatctgacgtcatccttgacttacttgttcgacttcatcatcttggaaaacttcagatatgtaccgttacatattttatagcatatttcagaaatcacaatcatgataggatatcggtgattctttgaaatttcaacgattaccagaaaatcatcatatataatatcgttacagaaaaacttggctgtaaggagcggtgcatggcaaacggcaaaccgacattgcgcgacgtggcggcggaagccggcgtctcccccatgaccgcatcgaatgcgctgcacggcaaagccggcgtcaaggaatcgacccgagccaaagtgctggcagcagcgaaaaaactcgactatcgcatcaatctgacagccagcatgctcaaatcaggtcgcagcaacattattcacatcatcgtcaacgaattcgattcgccgttctattcgaagctgacgcaaacattgagccgcgagatcacctcacgcggactcacgccgttcatcgagcaaacccagtattcgccggacgcggccgaacatgcgctgaccagcaatccgttctcagggcagctcttcgacggtgagattctgcacgccaccggattgggcacgaatctaccgctcgccaaactcaacggcgggcgccctctcgtactgctcgacgcatgcgaggaaacgccaaccgtggatgccgtgaattttcccaacgaggagggcgaacgcgctgcgatgcagtatctgatcgcccagggatgccggaatattgcgattgtcgggcatacgttcgtgccgcgcgccgagttggcgcatgcgcagaacgcatttgcattgcgacttcgaggagcgtgcgcggcgttgctggacgcaggattgccatatgacgaaaccatggtgttcgaaggcggtcgctccgacgaaggcattaccgccgggcacgcgatcgccgaacggatcatggcggcgcgaaggacgggctgcggagccggcgcgggtgctggagaccgcgaaacaggcacggccggaaccgccgatttcaacgatgcaagcggcaagattacgggcagatcgatcgaaacgaccgacaagattcccgcaatcgcgttcgacggagtgtgctgcgccaatgatttcgccgcattcggcgtgattcgcggcctcgccgactatggcatccatgtgccgcaagacgtgaaggtgatcggattcgacggcgtgacttccggaacctacgccaccccttcgctgagcaccatccaagtggatctcgaccagcttgccaaattcgcggtcgatatgattgtcgaacggatcgaacgcggcgaagtgaatgataattccagcaatgccggaaattccaatgatgcaggcacggtgctgccgccgagccgcgcaaccatcggatatcagttggtcgaacgtgaatccacgaccgcgatcatatagctatcgtgcgttccgcgcccgattgcagcggaacgcacgatagccggaaatacggcatttcagcgattggttggctcagccccgatcagtcgcggcggcgaatggcaaagatgcgggcggagggttgcttggaggtggcggcgttcagacgaaccgtttccggatccatgcgttcgatagtccacggtttggcattgggcgcatggcccggttcggcaggattcggaaacacctgttcgatggtttgatccgcatccaacggcatgttcacggacggtgtgccgccgcgacgccacacgatgatgtagtcgggcttatcttccggctgaggttgctgatcgttctgctcggcagcctgctcattccaagcggattcgccgcacacatacgcgtcacccatatccgtttcgacatgacgcaagccgacggcaagccaatcgccgtcgaagtcgggaagtccggacggccagaacggcaccatatgctgctggtcggcaagtacacaacgatgtaaggcgatagcgtcgcgaacgagtgaaagacgcggctccgtcatgcgatcgatgaaaccagacagatacagcctgccgagcacacccgtagcaagcgtgaacacagcagtctcatcatccatctcttgctgagcgtaaccccaattaccctgctgttccggcagaatcgtcatacctgcaccagccgcaatcgcagcataaatcagaggatcgcactggtcggaagtggactgcaaatccaagcgggacaactgcgcgtaatcggcgcgcatggcaccggaaccgcagttttcgatcatcacatccggatgacggcgacgcagatcgtcaagccaatccacatatgcgcggcaatgctcgagcaggccatcgccaacggactcggcattcaaatcagtgccgacgccgggaatggtgttgtagtcgaacttgaagaacaccgcaccgaaatcgtcaatcaaacgatcaacagtacgcgtaacatgctctcgcgcttcgggagaacggaaatcaagcagataacgacccgaatcgcacacgcgaacaccatgacgctggaagaacgcggaatccggcaacatgctcgcaagcggcgatttcacgccgatcacttcaggttcgagccacagtcccaagcccatgccatgagcacgaatcgtgtcggcaagaccgcgcagaccggcgtcgccgaaacgattggtggaggcctgccattcgccgaccatgtcccaccagccgccgtcggtgctgtcgtaccagccggcgtcaatgcagaaaacatccgcgccaacgcttgccgcaccttcaatcagcggcagttccttctcaatacgagggtcaccgaacagcgtattcatgtaatcgttgtagatcacaagaccctgcgtatgctcgaactgatcgacgcgccccaactcacgagccttggcaatgcgcagcgcacgacgctgcaacgtcatttcggcaacagcctgctgccaatcgcctgcggcaatggcaaacgacacaggaacggactcgaaatcattgccttcaccaagattggtgaaccaaccatgatccttatattccggaccgaacgcagtgacgtgcagaccgggatcgtcctcgccgacttcccactcccacggaccgttatgctcgatctgccacattacggaaaaatcgcgggcgcggcgtaccgaaccttccacctgcagaatgccggccggctcatgctctcccgagctccatgtagaagtcgagctcatggcaaaacgcgaactagactgaccaggattgattttctggttgcggttacgcacctgagtgtcacgtagcggacgaacacgccaatcgttttccacagcccaagcggcatcgccccagaaaatattcgaacgatgtaccttgccgcagttgacgcgcatcggaacggtcagattcaacgatgacaccgcttcaatcggcagttgcctggcggactgcagacgcgtgtaggtgcgcactgcggaaagattcgggaacgcctcgaatacggaagtggccaccaagcctgcattggaatcggcggaaaccgcctcggacgcggaattcgcggcggaatcggctgcgtcacgttcgcttgccgtcggctcgaattcacgacctttcggttcaagatcggcatacggcgcgaactgcgtgatctccaaacggaacggatcggcggaacctggttcaggttcggaagcaagcgcggaaacgaatcgcaattggctgccggcaactgtggcaatcagcgtcagtcggttgtcttgcgaaccggtattggcggcacacacctcaacaatcggacgcggatccttttcaaccactggctttccatcgtcagacaagcgaccatcgatcggaaccatgttgcgccctacaacgttgcagaggcgaacgggggaatcggcggcaatgtcaaacagcatggagaccacaccattgccccatgcaaggcgcccatcctgccgaggaacaaggggagtcatattgccgttctccattgccatctccttcgaattccgaatgccgcctatccgttgacgtgcatcgtttgacgtaccctcactagcttaagcggaaaacggggcaaccgcgatgtgcgtgtctacgcacattcagcaaatattcagcaactgaaatgaccgttcgaagaccagcaaatacctactcgaattgcagatattccacgaattgaatcggcatatccttggattccgtgatattgctgaatccgagaataaccccttctttcggcagtcccttcatggaagtccatgttttcgaatgggacaagtcgaatccgacagcgtcgttcacatcggaaaccggattgcctttggcgtcgaccagcgcatccttgacctgctcaagatcggcggcactcatcacttccgcgggtttggtgatgtcgccgcgatcattgacttcggcgaaaatatcggtttcggcaacaatcatgttgatctgacctgccgaaacgcgagccgtcaacgatgcggaaccatcttgcgcggcattctcgctaatcgcaatggaggcatccgtccgcacgagacgctcgtcttcaataccttgcgtcttcacaaaatcagcgcccaacgcatcaatctgttcggaatattccgccatatcgacaccttcaagactcagctcggcctcgggacctttggtcacatacgagatgacgaaagcaagtaccaagccgaccactgcgataatgatcagcacatcggtcagaaagttctgcttgaagtacggccacttgtctttcggcggcaactcgcggaaggttttgaatttcgattgcttcgcatacacgttggtggatgcgagcgctgcgaccgcatcttgctgctcctgggtgagaactggcttctctactgccataccaaaccttcccgcgttgtttcatcgacgcattcacgcgtcatcttcgtgcgcagcaacatgcgttgctttctgacttccctatcttccgcctcgtacctgataatttgcggctagccgccggccgaaaaacgacaagcggctagcaggaaggctgatttcaagccaatcagtccaagccctaatcagcccatttagaccttgatcatggcgtattgggaatcgtagaggcgatagtaggcaccacgcttggcaagcagctcggcgtggttgccttgctctacgatctgcccatggtcgatgtagcagatcatgtccgcgttctcgatggtggacagtcggtgcgcgatgatgaagctcgtacgtcccttcagcaggtggttcaatccggcctgaagcgcctcttcggtacgagtatcgatattcgacgtggcttcgtcgagaatcagaatgcgaggatcggctagcagcactcgcgcgaacgcaatcaactggcgctgacctgcggaaagcgtggaaccacgctcctccaccaccgtgtcgtatccgttcggcaaatccatgatgaactcgtgcgcatgcaccgccttcgcagccgcttcgatctcggcatcggtcgcatccaacttgccgtaacgaatattctcgcgcacattgccagagaaaatgaacgtatcttgcagcatgacgcccatctgccgacgtaacgattccaatgtgaccgaacgcacgtcatgcccgtcaatcgtcaccgacccttctgcaacgtcgtaaaaacgcgacagcaggttgatgatcgtggttttgccggcgccagtcggaccgaccaacgcgacagtactgcctggcttaacatgcagatcaaccagattgagaatattgcgaccgtcaggctcgtaacggaagatgacatcgttgaaatcgacgcgaccttcgattggcggcagttcggtcgcgtcagacgcattgcggatctccggctgcacatcaagcgtttcgaaaatacactcaagatacgcggaacaggtaatcagctgattgtagaaattgccgatgctgatcaccggattccagaaattattcgcatacccgacgaacgcgatcagcacgccggtggaaacgtttaccgcaccgaagcctgtaacgcccacatagtagatgaacgcgatcgtcatgacggaaatggtctggatgcccggccacatgaggaactgaatgtgcacagccttcatccacgaggtgcgcacgtcgttctgctgctcctggaaggtcttgaactgcgcagtctcctgagcgaaggtctgcgtggttttcacgccggcgatcgactcgtggatgaatgcgttgagattgctctgcttgttcgacagcacttggtacgcgcggcgctggaaatgttgcaatatcagcacccatgcgatcaggaacgggaaaagcgcaaggctgaacagcgcgagccgccaatcgaccacaaacatgaccaccagagtgatcaggaacgtgaacacgtcggaaatcacattgatcaggccggagctcaacgtgtcggaaagggtgttcacataattgaccacgcgaatcaggattttgccgtgcggacgcgaatcgaaatagctgaacggcagcgtctgaatatgcgtgaaaatatcgcgacgcatatctttcaatatgagctgaccgactcgagtaatttcgacggtacgatagcgcaatccaaactcgtacatcacaataagcactgccatcaatcccgttaattcaccaagtaaggtgagattttgcgatggaatcgcattatcaatcatgattttcgtcaaatatggcacgaccaccgcgatgcagctcatcattacgacgacggcaagaatgcgtacgatacgcgacatatatggttttacatagacgccgatacgcagaatatcgtgcagattaatctgctcttccagttcctcgtcttcacggaatgtattacgttttgccatgagttttcctcctttcttgccttggttgcgttacgcttcgaaaccatggggacgaccagcctgcaggccgagctgcttgtagtagatctcccagtagcggccatgtgcggccacgagttcgtcatgcgtgccgcgctccacaatgcggccgtgttcgagcacgagaatcagatcggaatctttcactgatgaaatacggtgtgcgatggtgacgatggttttctgctcgtccagctcgcgcaggtgacgttggatttccgcttccgtttccatatcgacggcgctggtcgtgtcgtccatgatgaggatcgatggatcgtcggcaagcgcgcgggcgaggctcaggcgctgtttttggccgccggaaaggccaacgccacgctctccaaccacggtatcgtagccttccggcatgctgcggatgaagccgtccgcaccggcgatggtggccatgcggcgaatgtactgttcatcgtattcgcgctgttcgcccacgccgaagctgatgttgccgccgatggtgtcggaaaacaggaacgtgtcttgcgcgacaacgcagacttgcgagcgcagtgtggcgagcggccagtctcgcgcgtcgacgccgtcgatgagtacgctgccttcggtggggtcgtagaagcgggagatgaggttgacgagggtggatttgcctgcgcccgtttcgccgagaatgccgagtttggcgcctgccggaacatggaaatccacatcttcaagcacgggagtgttcggttcgtcggggaaggcgaagctgacatgctggaagtcgatactgccggcgatgcgggtcgtgttagtcgttacctgtgttgcctgtgcagcttgcgttgccgatgttataaacgtcgcctgcgattgcgaagcgttgccagttgcatcgtttacaccgttggcattgttcgcattcggagttgcgggattcgcgtttgcgccgactcccggcttttccgtgatgtgcgactgagaggtgagcag

SEQ ID NO: 855 - DNA, 48201 bp, Unknown
  gut microbiota DNA sequence
tgagtggtgtaggctcaagttttggaaagtccgggaggcggcaaaccgaaactcgggcgaaagaacgaatagaacagaaaacgcatagcgaacctatctacaaaggagacaagttatgggacgcgcagttggcatcgatctgggtactactaattcctgcatcgcaactcttgaaggtggccagcccaccgttatcgtgaacgctgaaggcgctcgcaccacgccgtccgtcgtggcattcagcaagtccggcgagatcctcgtcggcgaagtcgccaagcgtcaggccgtgaccaacgtcgaccgcaccatcagctccgtcaagcgccacatgggcaccgactggaccgttgaaatcgacggcaagaagtggactccgcaggagatctccgcacaggtgctgatgaagctgaagcgcgacgccgaagcctatctcggcgaaccggtcaccgacgccgtgatcacctgcccggcatacttcaacgacgctcagcgtcaggccaccaaggacgccggcaccatcgcaggcctgaacgtgctgcgtatcatcaacgagccgaccgcagccgcactggcctacggcctcgaaaagggcaaggaagacgaaaccatcctggtcttcgacctcggtggcggcaccttcgatgtgtccctgctggagatcggcaaggacgacgacggcttctccaccattcaggtgcaggccaccaacggcgacaaccacctgggcggcgacgattgggatcagaagatcatcgactggctcgtcggcgaagtcaagaacaagtacggcatcgacctgagcaaggacaagatcgccctgcagcgcctgaaggaagccgcagagcaggccaagaaggagctgagctcctcctcgagcacctccatctccatgcagtacctggccatgacccctgacggcactccggtgcacctggacgaaaccctgacccgcgcacacttcgagagcatgacctccgacctgctgggccgctgccgcaccccgttcaacaacgtgctgcacgacgctggcatcggtgtttccgacatcgaccacgtggtgctcgtcggcggttccacccgtatgccggccgtcaaggagctcgtcaaggagctcaccggcggtaaggaagccaaccagtccgtgaacccggatgaagtcgtggccgtcggcgcagccgtgcagtccggcgtcatcaagggcgaccgcaaggacgtgctgctcatcgacgtgaccccgctgtccctcggcatcgagaccaagggtggcatcatgaccaagctcatcgaccgcaacaccgccattccgaccaagcgttccgaagtcttctccaccgctgaagacaaccagccgtccgtgctcatccaggtctatcagggcgagcgtgagttcgctcgcgacaacaagccgctgggcaccttcgagctgaccggcatcgctccggctccgcgtggcgttccgcagatcgaggtcaccttcgatatcgacgccaacggcatcgtgcacgtgtccgccaaggacaagggcaccggcaaggaacagtccatgaccatcaccggcggttccggcctgggcaaggacgaaatcgaccgcatggtcaaggaagccgaagctcacgaagccgaagacaagaagcgcaaggaagacgccgaaacccgcaaccaggccgaatccttcgcctatcagaccgagaagctcgtcaacgacaataaagacaagctctccgacgatgtggccaaggaagtcaccgataaggtcaacgagctcaaggaagccctgaagggtgaggacattgagaagatcaagtccgcacagagcgagctgatgacctccgcccagaagatcggccaggccctctacgcacagcagggtgccgccgatgccgcaggcgccgcaggtgccgccggttccgctcccgctgacgacgacgtggttgacgccgaagtcgtggacgatgacgacaaggacaacaagtaatcatgtccgacttcaacaaggacgaatatctgaacgacctgcccgacatggacaacctgtccgggcaggccgcccctgcagccggtgcatcgcaggaatcgcagaataatggcgattctgcagcaagtgcaacttccgattctgcagattctgcagcaactgcagcgaacgcagcatcttccgaatcgcaagaaaacggcgatgctgcggatggtgcgacgcaagatggtgaagatacgctgactccgcttggccaggccaagaaggaagcggcggaatacttggaagcccttcagcgcgaacgtgcggaattcatcaacttccgcaatcgttcgcagaaggagcaggaacgcttccgccagcacggcatcatcgacgtgctgaccgcactgctgccggcacttgatgacatcgatcgcattcgcgaacacagcgaaatggacgaatccttcaaagccgtttccgccaaaatcgacaaggcgttcgaaaagttcggcgtcgagaagttcggcgaaaaaggcgaggatttcgacccgaccaagcatgacgcgatcctgcacaagccggatccgcaggccgagaaggaaaccgtcgacaccgtggtggaagccggctaccgtatcggcgaccgcgtgattcgcgcggctcgcgtggtcgtggcgtccccgcagagctagcgcagtgacagcgatttcaacaacaacaggcatttgacatcagcaacctcgtgaaaggaggcacatcatggctgagaatgaatggctgagcaaggatttctacaaggtcctcggtgtctccaaagacgccacggacgatgagattaccaaagcgtaccgcaagctggcgcgcaagtaccatcctgatctgaacaagaccaaggaagcggaggaaaagttcaaagacatttccgaagcgtacgacgtgctcagcaacaaagacaaccgccagaagtacgacgccatccgtcagttcggcatgggcggcgcgcgcttcgccggcggctccggtgcgggcggattcgacgcgggggctttctccgacattttcggctcgatgttcggcgctggcgctggcgctggagcgtatggcacgggcggcaatggctcgcgcatccgcttccagaccggtggcggcaatccgaatatcaacgatattttctcgatgttcggtggcggcgctggtggccctgccggggctggcaacccctacgggggcagctacgagcaggctgcgcagccggaagatggcgaagaccgcaattccaagatcaatctgactttccgccagtcggtcaagggggcaacggtttcactgtctgccgacggaaaaaagttcaagacgcatgttccagcgggcgtgcgtgacgggcagaaaatccgtattccaggcaagggcaagccgggtcgtaacggcggaaaaaacggcgatctgtacctgcagatcaacgttgccgaagatccgaaattcagcctgcgcaagcgtgacatcatcatggatctgccaatcaccgtcggtcaggctgtggcgggcgcgaaagtgaccgcacaggatatcgacggcaacgaagtcaccttcaaagtgccggcaggctcgtccagcggcaccgaagtgcgcatctccggcaggggcgtggccaacaggcagggcgacggcgatctgatcgggcgtgtgcaaatccgcattcccgacaagccgagcctgaaagtcaagcatgcggcaaaggaattcgacaaggagtgcggcgatttcgctgacgaacttgccaaggagcgctgattgccatggcacgcgcatcccggacctcccaagcccgtgcggcgcggcaggccaaaatgctgtacgacatgtgcgcaatggcgatcgtggccggcagggccgatctggacggggcggatgaagttggtttcgacatcgaactgccgatgttcacggtcggtcgcgccggcgaactcgccaacgtgcatccgcagacgctccgccaatacgatcgtttggggctggtggtgccgcaacgcacggacggtggcgctcgccggtattcgctgcgagacatctcgcgccttgcgaaagcgcagcagctgagtcaggaagaaggcatcaacctggctggcatcgcgcggatcctttccttggaagaggagaaccgcgagctgcgccggcaagtcgagcgattgcgccggccggccggttccagcgtgttcgcggccgatgcggacggtggcattgtggaaatcgaacgttcccgccgcgctcgcatgtggcgtcggcagattcaggtcgacgcccgtcagctgccgtcgcgcgagtccgtggaggccgcgcgtgtcgcggctgatgcgtacgacatgcgcggtgggggtgtcgcaggcgaaaacgaggggattgagaggggtaaacccgtttctcggccgatttccaggtctatcgtgctttgggggattgactgattttcagaaaacattgaaaaaaaaattcaaaaacaggcatatcttgcaacagatgtgcctgttttgttatatagttttaccaaatgcattgcttcctgcgacgatgtcgtcgttgtgggaaataatgttgagtatccgcgttctaactgtcattcttccggtcgtcaaggtgcttcggtgaaagatggttctctttgcccatgaataatcatggaggagggggtaagatatgcggcgagaacaggaaaggttaggagcgtacagtgccaagagttgcgttcacagctaagacccgcaagtatctcgggtctctggatgccgtggaatcggtcacccagtatcgtatttgttactccaaggagtttcgcgatgattgcatgcgcaggtatgccgaaggtggctcgcctgccgcgattttccgcgaggccgggcttgatccgaagatcatcggatacaagcgcgtggaacgttgcatcgctcgctggaaggcggaaaatgcggaaaaggccgctgaaaccgctgtggaaaacagtgaaaatcagggagagtgaatttcaaatctcccgatacaagtgaaattttcgaatttcatggattatagcgatgggggttggcgataattcgtgaaaaaaatcggatgattttgcgaatacgtaggcgcgaagtattgcgtcgatatgggaagcgctcggatggaggaccatccgggcgcttttcgtttgcctcgcttgtatgcctgtttgttgtctgccgttttgccgcaactcgcgaatgctgccgtcttgccgctctgctgaaatggcagtggaagtcgcgatggacggcgctgcccggaaaatccggtgctccgcgtccgacggtcgtagggaaggaacatcatgaccgagacgaacctgatgatcaaggccgtgttttgggatatggacggcacgctgatcgattccgaaccgtattggcatgagggtgagatgaaaatcgcagccgcgcatggcggatattgggatgaggagctcgcctggcagggttcgggcacgccggttccggatgtggcccgtcgcatggtggagcatggttgccagctgtcgattgaagagatcggccagggcatgatcgattacgtcgcccaaaaggaattcgagcgcattccgtggatcgaaggcgtggaagacgtgcttgtcgcgctgcgtgacgcgggcgttccttcgatgctggtcaccacgtcgccgcgtcatcttgcggagaatctggttgcccaagcgccggctggcgcgtttgcgggctacgtgtgcggcgatgatgatgttgagaagaagccgtctccggccccgtatttggaggcgggtcgtcgcttgggtatcgctccggaagatatgaagtactgcattgcgattgaggattccatgtcgggcctgcgttcggccgtcgcctccggcgcgacgacgatcggccagaccgggttcatgcagatcgacaattccaacggcccgcagttcgcctcgatcaagggctacgagggcattgacgcggcctcgctcgacgctttcgtgcgtcagcgcgtatcccaggcctgatttttcgccccatctcgcttacgtatggcagatttgtctggtggctaggaaaagaaaaagcccgctgcggtggaatgaatgcagcgggcttagtggagccgacggtagtcgaaaccgcgacctcttcgatgcgaacgaagcgctctaccaactgagctacggccccaagtcatgtctagcaacacgctaagcaagacaactctcgcgattctagtacgaagtctgtacgaatgcaatctgcgagattcgcgtgttgcggaatatcccttgcaggaaaagcatgcgaaagcatacgaaaacggtgccttccgaaaaatcgaaagacaccgcaatcgcaagaaaaggagaaaacgtaagatcaggcttccgcggtcgcggtatcagccttctttttgccgaactttgctttgagcaagccgacgaaggtaggaatcagcgacagcacgagaatcgcaatgatgaccagctcgaaatgcttctgcacggccggaatgccgccgaagaagtagccgagcagcgtgaacagggtggaccagcacaggccgccaagcacggagaacggggtgaaacggctccaacgcatgccggaaatgccggaaatgaacggcatgaacgtgcggatgaacgggaagaaacggccgaggaacacggcgagcgggccccacttttcgatcatgccttcggttttggcgaggcgttcgggggtcatagccttgactctgccggattcgatgatgcgacggccgaagaagtggccgatccagtagttgcactggtcgccgatgatcggagcgcaccagaccacgggcagcagcgcgaacagcggtagtgcggaaacgccggtctgggcgtcgggcgcggcgaagaagccggcggcgaacagcagggagtcgcccggcaggaacgggaagaacacgacgccggtttcgacgaacacaatcaggaagatgaaaccaagcgtgggggcgacgcccatggagatccagctggcgatcgccgtgcgcggatccttgagcagattaatgaagaagttgatgattcccatgaaatgctctctgtgagtaccttacatctaaacgtccaaaattaagtggttcaggctgccttgtgtgggttggccttgcggaaccaatgtcagcctaccagtggccctctaatgcggcgcttagtaatgcccgacggttggcaaatctgcacaaacggacgcaaagtgccaactgcggtgggtgattttggtttgggggtgtttggtgtttggctgtttggctttagagtgtgcgatatatccggtatatcgcatatcgctcattgtgatttggcgttgtgacctcacgattttggtttttttgggggagggtgacctcatgattttgatttggtggcctcacgatttgaaaaaaggcggcgaaaaacggaatcgtgaggtcaacaaatcaaatagtggggccgctgaacacgaatcgcgcatgttgacggtacgaaagtgtgtttcgatggcgcggaagatagagtggaaaccgcagtaaggcaatgcgagagcggttggggcaatgtaggactaggcgaatacggcaaatacaagggagtgtgaatcgtggcggaaaatcttgcgcaatcggttgatgggaatctgaatcggcaatcgcgggcgctgctcgaagcgttgcatgcggcggccggaaaattctccatgttcggtcatcaaaacgaaaccagcaatgtgattacccccgatacggattccgacgtgcatgccgtgaccggcgcatatccggcggtctggggcaatgattcgggcgctgccggcacgggcgcatatggcactccgctgccggaatcgccgtatgcgcgcgatttcaacgctttcgcgcgcaacagcttcatacgcatggccgattcgctgccacgtatgtacacgaggtaagtacgtgtgcgcggtgtaagcatgcgtttgcgggcggattcttccagtcggtggaggaatctgcccgcttttagtcttgtaggcgggcggattcttccagtcactggaagaatcaggacgtttttaagactgttggcgtccggattgttccaatgtctggatgttttgggacgttactggggctgtaagcggggtgattgttccagtgggtgggggaatcaccccgctgagggtctgttttgtgtccggattgttccagcgattgggggtttaggacgcggggagggctgttttcctttgcgttggataggctgaaggcatggaacgcatgaatgagacgttggacttgaaactgaatgagttgagtgcgaatacggcagaagtaacgggaactgcgggaatggtgaatacggcggagatggcagaatcgccgatagcggcggaacagtctggcacagaacagtctggcacgggacttgacgccctcgtgtgcggaaccgacgttccgcaaggcacggtggtgatggctgccacgccgatcggcaacacggccgacgcctccgcacgcctcattgcgctcctggaacgcgccgacatcgtggccgccgaagacacccgccgtctctacgcgctcgccaaccgtctcggcgtgcacgtgaacggccgcgtggtggcctaccacgatcacaacgagcgagacaagtccgacggtctgctcgatcaggtggaaaccggcgctaccgtgctggtcgtgtccgacgcgggcatgccgaccatcaacgatccgggtctcgcgattgtgcgtcgcgccatcgaacgtggtctgcccgtcacctgcgctcccggcccgtccgcagtgctggacgcgctgtgcctttcaggactgcccaccgaccgcttctgctatgaaggattcctgccgcgcaagcattccgaacgcgtgcaatacctgcgcaccctgcgttctgaacgccgcactatcgtgttttacgaaaccctgcatcgcatcgacgattccatggccgacttgcttgacgtgttcggtccgaaccgcaagatggcgctttgccgtgaacttaccaaggattttgagcagatccgtcgcggaaccatcgcgcagattcgccagagcgtgatcgacgagccgccgcgcggcgaaatggtgttggtcgttgccggcgcttccgaagaggaggccgacgctgctgcccccgcatcgttgagcgtcgaagacttggcggtgctgtcgatcgaccgtgcgcaggaagacaatctgcgcatcaaagacgcgatttcgcaggtcgttgccgagcatccccttgcggacggctcgcttgccaatcgcaagcaggtctacaatgcggttcttgcgatgaagcagtaagtccatattagttatcgtccggcgattgcctatcgtgcgattgcccgtcgcgcaagtgttagctgcatgcttgcgatccgcacgattccaacgattccagcagtatttgcagggcgcgggccacgtccggcccgccgacttgcgcaagatagtccaacatcgccggtgttacggaaggattggcgaccagccatttgcgcagttgcggcgcgtattccgcgatatgccatagcacgtcctgcggtgtgtccggactgcacgccaccagcggcgtcaatggaattgggggagacggcggatccaccagcggtttcggccgcggtttgggctggtatggcggcggttcgcggcgcgtccgctgtgcacggtgtgcgagattccgcgcatcccgatgcgtccgtggcctgcgtttttcttggattccgagcagtctgcggaatccgtttgctctgtcggcatctatcctgtcgatgactttcccgccggcacctatcctgtcggcgtgcgtcgcgcgccgcgccttatgcctgctatgcgctgcgctcatattcgtcgcttcttccgtcgatcgcaagaatgtagttgcgcgcctgcggcgcgttgcgaatatgcttcgtctcctgcatgatttgcatgcaatcgttggagcggaaatgaaattcctgcatgagcatgcagatgatttcggaaaccaacgattcgctttcgggggtgcagttcaatgcgagatcgcatgcggtgcgaacaggcgtggtcacgatgatcggaccgactttgatggtgtgttcgtttggtgcgagacggttgaaaacgttgattttacggccgtaacgtagcgctcgatagtgggctttcgcgataatgtcgatggattcggggaaggtgccgcctagccaaacccatgcggcggtgcgtgaacatgccacggaccggctcggcagcaatgtcgcgatgatgcaggcccgcccgtacaacgtgtccgaatcgtggcatgaataggcgttcacgctgtcgagcttgcacagcgcgccggatgaggccagcaggttcaggcacatcgggcccggaaggtcatcgttgcccagaaggggtggtggagtgtccatgacggtaccgtagcggattcgaattccgttgcgccaccagccctcgaaaatctgtggatatgtggaaaatgattgttacgtaatgcaacaatgtggatagatcggcagatatgcaaattatgatgcaaactatttcaaacgattgaaatcgatgatcgcacgtccatcctccaataaaaatccaactaccgaaatacatggaaaatgcgggatatggcgctttgtataatcgggcaccatgagtcatattttggtgaatgttgcttggccgtatgctaacggcccccgtcatatcggtcacgtcgccggattcggcgtgccctccgacgtatacgcgcgctacgagcgcatgaagggcaatgacgtgctgatggtgtctggcaccgacgagcacggcaccccgatcctggtggaagccgacaaggaaggcgtcagcgcacaggagctcgccaaccgttacaaccgtgtgatcgccaaggatctgtgcgatctcggcctgagctacgacctgttcacccgcaccaccaccggcaatcacgagcaggtggtgcaggaactgttcaagcagtgcctcgccaacggctacatttataagggcacccagaaggtcgccatctcgccgtccaccggccgcaccctgcctgaccgttacatcgaaggcacctgcccgatctgcggtgccgacggtgcccgcggcgaccagtgcgacgcctgcggcaacgaactcgacccggacgagctcatcaatcccgtttccaaaatcaacggcgaaaccccgcgctttgaggaaaccgaacacttcttcctcgacctgccggcgctcgccgaagccaatctcgcatggctgaagacccgcgaaggctggcgtaccaacgtcatcaacttctccatcggcctgttcaaggaagtcaagccgcgtgccatcacgcgtgacatcgactggggcattcccgttccggttgccggctggatcgacaatccgaacaagaagctgtacgtgtggttcgacgcggtgatcggctacttgtcggcatccatcgaatgggctcgccgcaagggcgatccggaagcatggcgcgcatggtggaatgatccggaaaccccgggctactacttcatgggcaaagacaacatcacgttccactcccagatctggccgtccgaaatgctcggctacaacggtcagggctccaagggcggcgaaaccggcaagctcggtccgctgaacatgccggagcaggtcgtggcttccgaattcatgaccatggaaggcaagaagttctcgtcttcgcgtggcatcgtcatttatgtgaaggacattctcgcccgctaccctgtggacgccgtgcgctactacatttccgtggccggtccggaaagctccgattccgacttcacgtgggctgagttcgtgcgtcacaacaacgaggagctcgccgcttcctggggcaacctcgtcaaccgtgtggccaatctgatgaacaagaacttcggtgagattccggcgctcgacgagaacgaaatgaccgacgaggatcgcgcgttgctgagcgaaaccaaggccgcgttcgacacggtcggctcgctgatcgagaaccatcgccagaagaacgcgctgagcgaagccatgcgcgtggtcggcgacatcaacaagtacatttccgccaccgaaccgtggaagatcaaggacaatccggctcgcctcggcaccgtgctgcacgttgccgcccaggccgtgtccgacgcgaaccacctgctggccccgttcctgccgcattccgcgcagaaggtgtgggaggctctcggcggcacaggcacgttctcgccgttgccgcgcttggaagaggtcgaggatctcgacaagccgggcttcatgtatccgatcattaccggcgactacaagctgggcgaaaccgtgcatccgtgggcttccgagccgatcgtggccggcactgcagtgccgaagccgcatccgattttcgcgaagattccgccggaggccgtcgaagaggagctcgctcgcttcgattcggagctgaaggctcgtcgtgaggccgaggcggcccgtcttgccgccgaaaaggccaagctggaaggctgattcgctgattcacctggggattcggcttgatttggcctgatttgccgctaaggtgagttgttctgattgccggtgcaaggaattacgaagttcttgcaccggctttttatatctgattttgcaaatccgacttgtaaatctaatgtgcaatattcgactttctatatacgattttacaaatctatagtgcaatccggattgaatcgatttcaaaatccgtaacaatcgctatttctctttgccattcctctcgttacaatggggaagttgagggaaatgcgatgctgcagggaggctcttatgttggacgtcaagcgagtgctgaaagccgcgcctacgaaaatgcgttcccaagagccgctgcagcagttgtggacgccctggggcgaacagatcgccggcgaatggttgtcttccaacgacgcccacaaggcgttctgccctgcaaaagacggcgaacgcaaactggaaaacggccgcacgccaatcctgaacgagcatccgcgcccaaccatggtgcgcggcaatcacaccatgctcaacggattctgggattacgcgatcgtgtccattcccgaaagcggcaacggctcgaaatggcgcaaatccgcggctgtgctcacccgtgacgaagcggtgcaggcagtgaaggaagcggccatccccgaaacgttcgacggcaagattttggtgccgttctccccggaatccgcgctttccggcgtgcatcagacgatttacccagacaatatgatctggtatcgcacggtggtgcatcccgtgacgcttgggggaggggaagcggttcggcagatcggcgatgcgaaccgcttgatgctgcatttcgaagcggtcgattacgtgtgcgcctgctttatcaacgggcagtttgcagggatgcatgtcgggggatatttgccgtttgacgtcgatatttcggcattcgtcgatcccgatgatgctttcgagattgcgttgtgcgtgtacgatccgaacgattcgggtacgcaaatgcgcggcaagcagaaaatcgagcgcgaggggatttggtacaccgcgcaaagcggcatttggcagagcgtgtggatggagatcgtgccggaagcgtacgtgcagacgcttacgctgaagggcgccgccgacggcagattgtttattcgcgcggaaatcggcggagataagccgaatgccaaactgcatatcgtcgtagccgatcccgcggacggcacgatcgtcgcggacgaattgctgccggctggcatgcgcaaggtgcgcacggaaatcgcaacgcgggccgaacacttgtggtcgccgaacgatccgtatttgtatgacgtgacggcgacgctggaatttggtgcggcgaaatcgcagggaaagcaggaaaagctgcagcaagaatcgcaggaaattcaagagaaacccgcgaaatcgcaggaaaagcaagatattgtgcgctcgtattgcgcgttccgcacggttgagattaagcctgatttgaagggtatcgcgcgcttccatctcaatggcaagccggtgttcctcaagggtgtgctcgaccagggctattggccggacggcctgctgaccgcgccgagtgatgaagcgctggtgcatgacataaccgccatgaaggaatccggctttactatgctgcgcaagcatatcaaaatcgagtcggcgcgctggtactaccattgcgaccgcctcggcatgctggtatggcaggacgcggtgtcgggtggcggcgaatacaacgcgtgggccaccaaccgcaagccgacgctcatgcgtgccacatggaacaagtaccgcgatgacacggcgaagcatttcgcggcgctcggtgccgacgattcgacgtaccgccgcgactggtcgcgcacttgcgatgccatggtgcacatgcttgccggccacccgtcgatcgtcacgtgggtgctgttcaacgaagggtgggggcagttcgacgcgtgcgatgcggcggaacgcattcatgcgcttgacccgacgcgcccgatcgacgccacgagtggctggtacgaccagcgttgcggcgattttcacagcgtgcacaactacttccgtccgctggaaatctacccggataaggggccgttgcgtgggtatgtggccgaatatgaaaagcggcataagcggcgtcgtcgtgccgcgcattacgcggtgttgccggttgcgcagcatggcgttcgtgcgttcgtgatttcggaattcggaggattggcgcagttggttgccgatcatgctgcggtttcgcgcgcgtacggctacggtgaatacgattcgattgaggattggcgcactgccgtccgttccgtgcttgattcggcggaatcgttggaatcacgcggattggcgggctacgtgtatacgcaggtttccgacgtcgaagaagagctcaacggcctcatgacctacgatcgccgcctcaacaaattcgcgcaatgattcgccgagattgagtgcggtcatggcggtcatggaagcgttctgcttcttgcgtttcggtggcgcgttcggtacgttgggaacggcggctattatggcgccatcacagcgagccacggcggaacggagcgaggagatgtgcgttgcgtttgcattggccgcattaaccgaggggggtcttgtgaccatgaatcatgttccggaagcgccgcagtccgcaagcggcgattatgcgtggttgggagccgagccgggttccgtagccgatcagctgtatatgtcggcggccgacgaatggaatcaggcaatcaattcgcgttttgtgaatgaattgctggatgatacacttccagaatcgattttgaagtcttatttaattcaggatttcaagttctttaatcagggcatcatggcacatgcgattgaacttgcgccgcgtcaggaaaccaaagatatgctggcgaaacaatcgcaatggtttgctgacaatgaagcaacgtattttaccggattccttaaggaatacggaattactgacgaagaatacaataattccgagcagactccggcaaatcgtgaatattgcgaatatctgaccaagctggttcagggaacttgggaagaactcattactgcgctgtgctgcatggaatggatttatcttgcctgggccaagcgtaccatcgacgctggcgtcgttcagcggattccggcgcacaagggttgggttgatttgcatgagggcgattatttccgcgcctggacgggccgcctgatcgcgctcgtcaacgagtatgcgtcggtggatggctcggaggccgacgtgttccgcaccatcgtgcatctcgagcgtcgcttctttgaggattcctatccgcagcggtgagcggtgagcatgatatgaggcaatgagcgccaatgcaaattggcggtaacgcggtaacgcaataacgcaagcagggggagatccgcagaatacgcggatcccccctgtaattgttggggcaaccggcatgccccaacgtgtcagatcagctcgatatccacatccaagtggagcggcttatcggctggaatgtggtactgcgggtgcaccgggctcatccaggaatcgtcgccgccgacgcccatttgcgcggcgagcacgcgcaggaacatgtgcttcggagcgggcagttcgtcctgatgctgggcttcttccaacatgaatgcgctgtacggctgcaggctgagcgcaaacgctgattcgccgtgacggctcacacgcatgccatgaccggcatcatccgtgatctcagcccaacgcacatcctcatggttgccggtttcctgcggcatgaggtacggcgcatgatcgtcgtaagcgttggtgttccaaatgcccagcttggcatgcttgcggtcggcgtaggtttcgtcgggtccggggccgtagaagcgcaggttggagtattcgaccggcagcgtccattccaaaccgaaagccggaatggtcggggcttcctgagtttcacccggatagtcgacgctcaagtgcagcttgccggtggtgtctgccacatacgtgatggtgacgtgcgtgcgctgcggagtggcgagctcgtactcgtatacggctttcagcgtatcgtcattgacctgttcgatggtgttgttgacgcacttggcgtaacggcctgcgccgacccactgcgcgcggtcgtaaccgtggcctgcaccgcgatcgttgtcggtcagcgcgcggaacgtggtgagcgtgggcctgcgcagcacgaattcacggccgtcaagcgtgtacgaaacaatgccgccctgcgtacgcgacagcagaatctcacgaccggatccctgcacgccagcattccaacggccaacggtcacaatgccgtcaacaggcttcgcctcgctggcagcaaccggcttggagcctgcaaccacggtctggccgaacgacagctcgtagcccttcggcgcccactcttccgcggcggcaaggcgttggctcacttcgagcgtgagctcgttggcttggcctcggtaggcctccaacggccattcaatatcgaagtgcttggtttcgccagccggcacatcaaaacgctgttcggcctgccataccggctcgccatccgcaagcacgcgcgtaacgaacacatagtcggcggtggaaacgaacagattgtcattcgcgatctcaacgccggtttcacccggcacaatgcgcacgttggcatacagctgcttgacgtcttgcgcctttggcgacggcgtgcgatcggcgaacacaataccgtctccggcaaactcgtaatcgctcggacgatcgccgaaatcgccgccgtagcagagacgttcatcgccatcgggcaagcgcacaagaatcgcctgatcgatgaaatcccaaataaatccgccctgatattgcgggtagcgttccaaagccgtgtattcgtccatatttccgacggaattgcccatggcgtgcatgtattcgcaggaaatatacggcttcttcgggttggacttgaggtattcctcgatttcgtcggcgtgcgcgtacatgcggctttcgatgtcggtcacgtcgtcatacttgcgattgtgggtcacgccctcgtagtgcactggtcggttcgggtcgagttcgtgcacgtggacgctcatcgcgcggaacacgtctcccgcatacgattcgttgccgagcgaccagatgactacggaagcatggttgtagtcgcgcttcatcatgctgttcacacggtccacgcacgcgccctcccattcgggcttgctgcccggaacggcggaatcctcggtgaccacgtctcccggcaggcaccagctgccgtgcgtttcaagattggtttcgtcgatcaggtagatgccgtattcgtcgcacaggtcgtaccagtattcctggttggggtagtgcgaggtgcggatggcgttgatgttgtgcctcttgcagaacatgatgtcgtcgatcatgtcttgcctggtgatggcgcggccgcgcttcgcgtcgaattcgtggcggtcggcgcccttgaagaccacgcgcttgccgttgagcttcatgatgccgtcttcgatgcggaagcgacggaagccgacgcgctgcgttgcggtttcaacgatcgcgccatcatggccgatcaccacaacttgaagttcgtacagtgccgggctctcggcgctccacggcttgacgtccaacgagccggaaacgatgccggtttcgtcggatgcggccaatgcggtttcccacaccacattgccactcaaatccttcagcgtcgccgacacggtggcggcattcttcgcattgcgcaccgcgagtagcgcgtcgagcgaaccggtggcggtttccggattccaatccgcttcgaccttcatatcttcaatgtgcacatgcggctgtgcggcgagttccacggaacggaacaggccgtgcaaacgccagtaatcctgatcttccagccaggatgcgcttgcgtattcgtagcaggcgacggccacgacgttttcgccgtcgtgcaacgcttcggtgatatcgaattcgttcggggtgtagccgtcttcgccgtagccgacgaatacgccgttgacccacacgtagatcgcggtggccatgccgtggaacgtgatgctgacggtgccgccattttgacgggccgcatcaagacgctcggcgacggtgaacgtgcggcgatacagtgccacatggttggtttcgggaacgttcggctcctgcggattctcatggccgtcccacgggtactgaatattcacgtacttgtggttcatgtatcccgcgttctgcaggtgggagggcacgtcgatgcggccgaaagcggaatcgtcgaaatcctcggctgcgaacggctcttcctcaagatcgatgtcggaggcctgcaccatttccacgcgccattcgccgtcgaggctttgcttcaaatcgctcggctcgccgatcgcgggaatgtgagaaaaggtcacgtgattggaatgtgccggcgtgcgattcactgcgaacaccgtggggtcggtgagccacgcggcggatgcggtggtgatcttatctgccatgatttcctcgtttccgaaacataacttcgttgttgatgtaggtttagttggtgtgtacttttgtgtactcagagtaataaactcttttactagcatggtaaacgttgtttacttaaattgcaaatctgcgtgttgcgttatttgcaactgaatttacttatatggcgataggtgacggcaaatggcggtagtaatcatgattgcagatgtcggtatttgataatcgtaagaactgcgattgcgacacgccgtttgggggctttgtttactaaggaattttactttcgatagcaaacaacgtatactcaattttcgaggtcaacgggtgatctcatcaaaatcttctaaggagaagagataatgagcaatacgaccactactgcgaacggcacggctcgtcgcggaaagctcggccagcgcgtagcatacgcgtgcggcaaccttggccagtccgcgttctataacgcactgagcacctacttcgtcgtctatgtgacgagctccttgttcgctggtgtcgataaaggcgtcgccaccaagctgatcggcgtcatcaccggcctggtcgtggtgatccgtatcgcggagatcttcatcgacccgctgctgggcaacatcatcgacaacaccaccaccaagtggggccgtttccgcccatggcagttcctcgccggcgcgatttcgtccgtgctgatcgtgctagtgtacaccggcctgttcggcttggtgaacgtgaacaccacgtggttcatcgtactgttcgtcatcaccttcatcgtgctcgacgtgttctactccctgcgtgacatctcctactggggtatgatccctgcattgagctccgactcccacgagcgctccacctacaccgcactcggctccttcaccggctccatcggctacaacggcatcaccgtcgtggtcatcccgatcgtcacctacttcagctgggtgttcaccggtgagcacgccgaaagccagtccggctggacctgcttcggtattatcgtcggcctgctcggcctcttgaccgcatggaccgttgccttcggcaccaaggagaacgagagcgccctgcgttccaaggcccagaagaacggcaacccgatcgaagccttcaaggccatcttccagaacgaccagctgctgtgggttgccctgagctacctgctgtacgccatcgccaacgtggccaccaccggcgtgctgatcttcctgttcaagttcatcctcgacaaccaggccgcatactccctcaccggcgtgatcgcactggtcgcaggcttggttatggctccgctgtacccgatcctgaacaagcgcattccgcgccgttacctgtacatcggtggcatgatctccatgatcgccggctatgtgatgctcggcatcttctccgacaacatcatcatggtgttcgtggctctggtgcttttctacgtgccgggtaccctcattcagatgaccgcgatcctgtcgctgaccgattccatcgaatacggccagctgaagaacggcaagcgcaacgaggccgtcaccctgtccgtccgcccgatgctcgataagatcggtggtgccatgtccaacggcatcgtcggcatcatcgccgtggccgcgggcatgaccggcaatgcgaccgcagccgacatgaccgcatccaacatccacatcttcaagatctgcgccttctacattccgctcgtgctcatcatcctgagcctgatcgtgtttctgttcaaggtgaagatcactgagaagatgcacgatgagatcgtcaaggagctcgaagtgaagctcgccaacggtgagatcgaagccgacgacgctcagaccgtggaagccgtcgaggcggttgccgtggctgaaaccgctggaactgctggaaccgcgactccggcgggccaacctgaatcccgataactgaacttccccttcctttccgacaaccagggccgcctgaagcactccatccgctgcaggcggcctttcatgtcttttcgtctccttgcctctcatcccgtccgggttcctccactcactggaacaatctggacgataaaaggcctgtcagcgggaggattcctccgcccgctggaggtttttggacagtacgggggtattttgcggtccggattcttccagcgactggagggatatggatgcttggagagttgcagacggggcgattcttccggtggctggaggtttttggacgttaacaggtctgttagcgggtagcttcctccaccgactggaggttttgggtcgctaaggcgtccggagctatgcttcgccgatgagggagccgcgttcgtggatcgtcggcaccagtgtgcggatcacgatggtggcctgcccgcgcagggtgagatcctcgccttgcctgcaacggtgaatttgcggcgcctcctgataatccgtggtcacggtgcggctgatttcgttttccatcgcgtcgatgaattgagtattgacgatttccggcgcaccatataccgaaatgtcgcgcagatccaacaatcctgccggtatggccatgacgcgcccgagcaacgcgcccgcttcggtgagaatatgcgtacgcgcggcgggatcctgcgagatgcgttgctgcaacctgtcaccggaaacgaatgattcgagacatccctgtttgccgcattcgcagattggcccgttcgggtcgaccaccacgtgtgcgatttctccggcagtgaaggaacttccttcgatgatgacgtcgttgaggcataatgccgcaccgacgccccgcccgatggagatgagcatggaattgggagagcagtcgccgaagaatcgttccgccacaagtgccgcattggtgtcgttgcctacgatcacgggcactccggtggcgttttccacttcggttttcagcggcagttcgctccaccccaagtgcacggatttgcgcaccacgccgttgggttccacaatgccggtcaccgcgatgccgatgccaaggatcggcagtggcgttgagctgatgagctgcctgcagaggtcgatcacgtcattgacgctgcagccatggtcgacgggaagttcggtgcggtccacgattctgccggaaagatccgccagcgctcctttgacgagcatcggattcgacaggtcgacggagacgattcgccagaaatcggtgtcgatggcgagcacttgtgaacgtttaccgcgcccttcgcgattgtcggggccgagttcgcgcagaatgcgattgtcgaccatttcgccggtcacttcgctggtggtgaagcgcgaaagtccgatgagtttgccgatattggctcgcgacatttgcgttgcggggaaaagctgctcgaatgcggcggtgatattgctgattcgaatatcggaaggtgatgcctttgcttgggtgccgctcacgatgtcctcgctttcttgtgtggggccgatacatattgtagtgtgtggcgctacaagtgcgttatgtaatttttattggcaataaagattactaaacaagagtatacggcatttttcctcgaattgcgattgctttacgattgtcgctaaatggcggaatttcagcttttttgtggaatagcaatcgcgtgccggatttaaatgtaaggaaacttgacaaaaaaggattacgtaggtatgctgtgactatccggtgcaaggaggtgccggaataatctcacgaaggagagagatatgcgatcccacactcagcgtttgatggtttgcgcagcttctttcgcggctctgtgcatgggtcttgcaggatgcggttccaatacggccagcaccggcggggattccggggaggtcgtcaacctcacgtacatgcaccgtcttccggattccgaaggcatgaccttggtcaaagacattgttgccaagtggaacaaggatcatccgaacattcaggtcaaggccaccaagttcgatggtgccgcacaagatatgatcaagaagctggaaaccgacgtcaaggccggcaatgctccggatcttgcacaggtcggctacgccgaagtgcctgaggtgttcaccaagggcttgctcgaagacgtgaccgaagaggccgcgaagtacaaaagcgacttcgccgaaggcccatattccatgatgcaggttgatggcaagacctacggcttgccgcaagataccggcccgcttgtgtacttctacaaccagaaggctttcgatgagctgggcatcaaggttcccaaaaccaaggatgagctgatcgaagcggcaaagaccgcggccgcgtccggcaagtacatcatggattacgaagccgatgaggccggcaacatcttcgcaggtttggcaaatgcttccgacccgtggtacaccgtcaagaatgacgcttgggtggtcaacaccaacggcagcggttcgcaggcttttgctgaaaccttccaggaactgatcgacaacaaggccacgctgaccaacccgcgttgggtgccgtcgttcgacgcatccctgcaggatggcacgctgatcggcaacatcggcgccgcttgggaggctccgctattcaaggactccgcaggagacaccggcaagggtgactggcgtgtcacccagatcggtgactggttcggcaatggcaccagcaccggccctgacggtggttccggcgtcgcagtgctcaagggttgtgagcacaaggccgaagccatggaattcctcgactggttcaacactcaggttgaggatctgacctcccaaggtctgattgtggccgccagcaccgaaaccgcgaagacccctgaatcctggaacgaattctacggcggccaagacgtgatgaaggaattcgctactgccaacgacaacatggtcgcattcaactacatgccgggctactccgcggtctccgcagctatgcaggaagccgccgacaaggcagccgacggttccggcaaggtggcggacgtgttccctgtggcgcagcagacctccatcgacaccctcaagaactacggcctgtccgtggcgaagtgatcaacgtatggaaccagggatcacccgctctgattccataacccctccaacgacggtgtggagccaacgcaacacacggctccacaccgttccttatgaaaatattccttgtgaatattccctatgaatcgatctagctgattcgacggagcggctgaaaccggcactcctctcccgtgatgacgatttggatacggcgattcgaactgtgaaagatgccaccaataatgagtggcatccgatgcgaaagataggtacatcatgactgcaacaacgcaagcggcgaaaccaaagcgcactgatgcgcaacgccgcgagaatcgaacaggatgggcgttcatggcgccattcggcatactgttcgccattgtattcatcatcccgattttctatgccatctattccagcttcttccgtcaggtcaccgagggcggcggcgcgtacggcggcggcgaattggtgaataaattcgtaggattccagaatttcgagtacgtgcttacgtccggcaatttttggtccggtgtgggcagggtgctgatttacaccctcattcaggtgccgctgatgatcatcatcgcgttggctttggcgatggtcatcgattcgttcgtggtcaagcacatcacgggtttccgtctcggctacttcctgccgtacgccattccaggtgtggtcgcatccatcatttgggtgtacctgtataacggtcagatttcgccgatcgtcaaaggtcttgcggccatcggaataaacgttgatttcttcagcaagaacgttgtgctcgcttccatggcaaacatcaccacatggacgttcaccggctacaacatgctgattttcttggccgcactgcaggcgattccgcacgaactgtacgaagccgcacgcattgatggcgcaagtggatggcagatctccatgtgcatcaaactgccgaacgtgcgttccgcggcgctgctgtccatgttgctgtccatcgtcggcacaatccagctattcaacgaaccgcagatcatgcagaccgccgatccgggcatctccaaaacctatacgccaatgatgatggccatgaacacttcccaaggcacgctgactccgggcggtgacggacccgcatcggcggtcgccatcgtcatggcactgatcgcaggcgttctcgccatgatctacgcactggtcgagaggaaggcgaacgaacaatgagcaacgcagtcgcagcaagaaaagacgaacgcgcccgcagaaaagcggaacgcatgatggaaaagcaacgcgaagcggccgaacacgatctgccgcgctccatgcgcccatcgccgatcaccaaaaccattaccgtgatcgtgctcgtcgtagcgctgatctacttcctcttcccaatctattgggccatcatcgcatccaccaaaacaccatcgcagctgaccagcagcaacggattgtggttcgccgtcggacttgaccagattcccgacgccatcgcaaccaactattcgaagcttatggggtggacccgtggccaattctggcgttgggtgctgaattccctgatctactccggggtttccgcactgatcggcaccatcatttcggtgatggcaggctatgccaccgcaaaattcaacttccgtggcaaggccatcgccatcggcgtggtcatgggatgcatgctgatgccggtcgcactgctcaccattccgcagtactccatcttccacgcactgcacctgaccaacaccatgctggcgatcatcatcccgtgctgcgtttcgccattcggcttcttcctcggacgcgtgtacgcgcaaacctccgtaccgaacgaactgctggaagcggcccgcatcgacggcgccggtgaagcgagaatcttcttcaccatcgtgctccgactgctcgccccagccatggtgaccatcttcctgttcctcttcgtgggaacgtggaacaacttcctgctgccgttgatgatggtttcctccgacaccctcaagccggtcacgctcggcctgtatggcatggtatcgctcgcaaccttcaacgatcgtggatcgctgatgatgggcgcactgctcggcgtactgccggtgatcgtgctcttcctcggcttgcagcgctactggcaggccggcctcgcggcaggcgcagtcaagggttgacgggcatccatccaactccatgcgtggcatgcaaacgccacgcatggagttggatcaacagaacaaccgtaatccgggccccactatttcaggcaggtacatgcaatgaacgcaagactgcaccataacggccgttcgcaaggatgcgtcggcatcgacatcggcggaacgaaaatcgaaggcgtgctgctcgacgcaacagaccgcgtcatcgacgtctgccgtatgccatcgcactccggtgaaagcaatgtcgtaaccgacatcgtgcgcgtcgcccgcatactgtccaacgaagcgctgcccatcggcattggcattccagggcaggtgaactgcgcgaccgggcaagtgagcaacgtcgtcaatcttgatattgaaacgttggaacttggcgaacgcgtcagcgcaatcatgcacgctccggtgcacgtggaaaacgatgtgaacgcggctgcggtcggagccgcggaattcgtggaacaagtcgacggcaacgcaaccgtcgtattcctcaacttcggcacgggactggccgcaggactcgtgcgcggcgggcaagccgaacacgggtacagcggatccatcggcgaaatcgggcacctacccatcgaccccaacggattcgaatgcccatgcgggcagcgtggatgcttggaaaccgtggcatccggcggggccgtggcaaaactttggccctccgcaaacccgcccatgcctgatctcatccgcaaagcgcggcaaggagacgggcatgccaacgacgtgctcgccatggtggcccacgccatgggcgacaccatccaaatcgtcgcgcaagcctacgatccgcaacgcatcatcattggcggaggcatggcgaaaaccggtgacgcactcatcgaagtcatccaagccgaactgagccgtagagccgaaggatgccgattcctgaccacactcgacatcgcatcgaacatcagaatcgcagccatggaccaaccaatcggcgcaatcggcgcggcgctcgcggcaaaacgagcgcaaccgcaatcgtgaatgcgtgatacttcaggcagactggaacaagcgcaacaattccggaaatccagatccggcaatcccggcaatcccggcaatccgagaatcacaatcgagaattgaaatcgataatcgacaatcgaaaggcgaatcgatggcaagcgagaacacccgcaaatgggcgatcattcccgaaccgaacagcatgacggtcggcgaaggcacggtgctgttgccctatgcggggcgcgtgaacgaatccattgcgattggcgatggcgatttcctgcttgcgcatcagcttgttgccgacatacgttccgcgacaggcactgattgggatattgcgacgggcgatatgtggtcgggcttcatcagattgcgtattgcggattcgtgggatttcgattcgcaggatggcggtaccgccggcgcatacacgctgactatcaacactgacggcattacgattaccggttgcgatttcgagggtgtgcgcaacggtgtgcagaccctgcgtcaactcatacggcaaaacggtgccgtgctaccagtgcttcagatcgaagatgctcccgcatatcggatcaggggatattacttggatgcgacgcgcggccgcgtgccaacgctcgcatggctcaaacagtgggccgacaaactctgcctctacaaatacaaccaattgcagctgtacatcgagcatacgttcgcattcgacggcatgagcgaaacatggcgcggatcaagcccgctcacgccggcagacacactcgaattcgaccaatactgcgcgaaccttggcatcgaactcgtgccgtcagtctccacattcggacaccaatatgtggcgatgcgcacgcaggaactgcgcgaactcggcgaattccccgaagacgcagaccggccgttcagcttcatcgaacgcatgaggcaccacacgctcaacgtcgccgacgatcgagccttcgcattctctgcgcaactggtcgactcgtatctgcaacttttccgttcgaagcgattcaacatctgcgccgacgaaaccttcgacctcggcaaaggcaagtcgaagcaggaagcgcaacgtgtgggcgtcgcaacgctgtacgcaacatacgtgggcaaactctgcgaacacctgtctaagcagggccgcgaacccatgttctggggagacatcgccatcgaaatgccggaaatcctcgaaaccctgccgaacaatgtcaccctgctgaactggcagtacgaaccggaagcaaccgacgaaaaaatccaactcgtggcgcaagccggagccaaacaaatcgtatgcccggccgtatgggggtggaatgcgctgctcccgcgcatcgacgatgcgtggaacaacatcgcacgcatcgcacgctacggcctcgactgcggtgcggaaggcatgctcgtcaccgattggggcgattttgggcatgtcaacgatccgcgcatggccgtgcccggcatgatattcggtgcgcaatatgcgtggaatcctgccggagatactgccgaaaatgatttgcttgagcgtatttcgcgcgtcgaatatggcgattgcagcgcacgattcgttgcattgcttcgtaacgcttccgcgcaagccgtattcacttggcgtgagcttgtggaatatctcgaattggatgacggcacgggaaactgcaataccgatgttgcgcaaaccattccctgcctggccgatcgcttggttgatcatttatctgactgtggaaacgcaatgactgtgcgtgaagcacgcaatcgcatgatgcgcaatatggcaacgacaatcgaacgaattccgcaagccaatcgtgcattgcaacaatgcatggtcgacatcgcgccgattgcggcacatatgggaaatccgggcattactgctgccgtacgcatcgccatggaagggcagctgctgctcaatcgagtgggattcgcgctcgccgaagcacatgacgtgcgtgatgcgcatgacgctggcgattggcggccttccgattatcgtgcgctggcgcgcgagctcgaatgctggtgcgaggcctatgcgaaggaatggaacgcgacaagccaaccgtcggaactgcatcgcattcaggaaaccgtgtggaaagcagccgacgagcttcgccgaatcagcaaataaatcatcaaacaaatcctcaagaaatcagcaaaacgaaaaacgtcaatccaatgccaatgaaaggaacatcatgaccgaagtcatcatcgtgaaaaacgagcgcgaagcaggcgatatttacggccgttcagtcgccgatctcatcaaaaccaagccgaatgcggtgctgggactggcaaccggatccagtccgctcgccgcataccagtcgctcgcacgcattgtgcacagcgagcatattgacgtatcgcaggtgcgtggtttcgcattggacgaatatttgggattgccgcttgatcacccgcagtcatatcattccaccattcaccgcacggtcgtggaaccgcttggactgaaccctgatttggtgcacgtgcctggtgacgtgctcgacggggcgccgctgagcgacggcgaacgcattgcggctgccggccctgcctacgataaggcaatcgaagaggccggtggcatagatgtgcagattctgggcattggcacggatgggcatgtgggcttcaatgagccgggatcgtcgcttgcttccggcacgcgcgtcaaaacgttggttgagcagacgcgcatcgataacgcccgattctttgacgacgacatcgacaaggtgcctacgcattgcatcacgcagggtatcggcacgattctcaaagcccgccacttggtgctgcttgccttcggttcgggcaaggccgaggctgtggccgaaacggtggagggcggtgtgagtgcgttctgcccggcgtccgcgctgcaaatgcatccgcacgccaccatcattgtggacgaggaggccgcgagccgcctgcgtcacaaggactactaccgttacgcctacgcccacaagcccgcctggcagcgcatctgattgctgctccgcagtcggtgtccgctagcgtccggattcttccactcgctggaacattctggacgtttttcggccttccagcgggaggattcctccactcgctggaaggttttgggcagtacgggggtgtttggcagtccagattcctccactgactggaggaattgggactctgaggtggctgttagcgggaggatttctccactgactggaaggattgggttgctgatgggcttgtcagcggggtaattcttccactgactggaaggattggatgctaattgaggaaaatggctgtgagtgaattggaaggtatgaagatggaacagtctcgtgagcggtttgcgaatgagatggacgttgcgttagcgcagtcggcccgtccgtttgcgattcataatgcgcgcaaagtcgatgcgcgaggtgttgcggaacattattggctggtttccgatggtagcgcgattattgcgactgggaatcgtgacgatgattttgctgcggcttgcgcaagcgtcggtttggatgccgatactgattccgattcagtcagttcggctgattccggcaatgccatgaccggttcggccggttccgtaaccgacgctgcaggtcgcatgatgactcccggttacgtcgacattcatgcgcacggttcgtggggaagttccttcgatgatggcgtgcagggcatacgtttggctcgtgcgggtcatatgatgcacggcaccacccgccaagtgctcagtttgatcaccaatccgcttgacgtgatgtgcgtcaatctcgaaaccgtgcacggcatgatgagcgcccgccctgacattctcggcgcgcatctggaaggaccgttccttgcgctgtctcgcaagggtgcgcatgatccggaatgtttgaaggatccggttcccgaatatgttgatcggcttttgcaagcggcaggcggctgtctgcgtcagatcaccatcgcccccgaattgccgcacggcattgatgcgattcgtcgcttcgcggcggccggagtggttcctgcggtaggacattgcgatgccgattatgcgaccgctcgcaagggtttcgacgcgggcgcgggcattatgacgcacatgttcaatgcgatgaatggcttgcatcatcgcgagcctggtccaattccggctgctgttgaggatccacgcgtcactatcgagttgatcaatgatggttttcatgtgcagaatccgatggtgcgtttgggatttggtttcgcaccgcatcgcacggcattcgtgactgatgccatggctgctaccgactgcccggacggtcattatctgctgggtgcgttggatgtggatgtgatcgatggtcacgctcggctcgtgtcgaatggtgcgattgccggttccacgctgacgttggaaaaggctgttcagcgtgcggcgctcgaattgggattcacgcccgccgacgcggtggaggccgccacgttgactccggccaaagcattcggtttcgaccgcgcgaacccggtcaccaagcaacctctcggtctgcttgctcccggctacgctgccgacgtgcttctgctcgatcccgccacctggtccgtcacccacgtctggtgtgacgctcgccctctccgctaaagcgagattactgaagcacaattgcagggccggctccgcaacaggatgccggcccttgccgtatctcaagtttttatatttagtcttgcggggtgaagctgtcgcgtgcgacgagactggtggagattcgcatatgctggctgattttgcggtcggcggtcagcgcttcggcaagcataagcaccgcggctttcgcaagctcgtcctggctaatgtcgtacgacgacaatgcgggagacgtgtattttgcgatctcctgattgttgatgctgatcactttgatatctcgcggcaccatcacattttcggtggcaaatgcctgcagcacgccaaccgccaacggatcggctgcgacgattaccgcgtcgggcagatcgtccgcatgatcctgcaccaactgacgcccctgcaaacggccgttttccacagtgaacgggccgtccgcatacaccaatccttgcgcatccaatcccaagcgcaacgcccaattgcggaatgcgaacgtacgaatatcttccggatattcatgcttgcccataatgttgcccaagccgccaatgaagccgatccgagagcaacccgaccccataagcgcgtcgatcgcatccaatatggtttgttccaaatccggctgtaccgaatcgaacaatgccggcgcaggattgatgtcgatgaatacgccgtgggggagcttcttatgcaagcggtgaagcgtcttgtgatttagtggggacgggccgatcgaaataaatcccgcgtatttatcggcatcggcgatcagcgaatccacgtcctcgtgcatggtcacgttcatacgctgctcttcggcatgcttgacgagcacttcgcgcagctcgtcgaaatacgcgtcctgcaagcccttgtcgggtacgacattgtcgagaatcgcaacatcctgcggaatggtgatgcgctggtattgcggtacgttcttgtatcccatttccagactggcgtttagaatcttctcgcgggtggaatccttcaccgaaaaagtgggatcgtccttcaaaaccctggaaacagtggcttgggagaaacctacccgtttcgctatctctctgatagtggccatgtgaatcctcctcaaagccatcgttggctaaacacgtttactaattaatttagcacacatgctcccatctcgccatatttcctccaagcgtttcacgagatgaagcaatcgtgcgacaaacgagactcctctttactcagcttgcctcggggcggcttcgggcaatgaagtgcccatggtttcgaggcgcatgaggaactcgttggcgctcatggcgttgctcaacagcgtgccctcggcgagcgtgcctccgatggaacggatgaactcaacctggtccagggactccacgccatcgaacaccacatggaacgcatcgttatcgcgcgaaatctcgagcgtgcgctgcatgatctgctttgcgcgaggcgtacggaaatcgcgaaccaccgtcttgtcgaatcgtgcgaaatccaatggcagatgcgcgaacgcggcaacctccgaatacgtggtgccagcattggtcaaacccaactcgacgttcggcaaagcggcaagagcggcaacctcatcatcaacttcatcatgcaccacatgaatggcatgcgatcccaactgcaggccgaaacgcagctgtggctgctcatgagtcaactgctccaagcgctcgtggaagatggacgcgcctaattccgaaccattcatgcaaatgtccacaatatccaattcgggtgccaccttgcggaatgcggtcatgtctttcacgcaggtttccagcacgtcgagcgtcagctgcacgctcatgttgagacgatgcgcttcagccgttacgaaatacggtgccagcgtacggcccttcgcgtcatgcacgcgcacaatcgtatccagcgaagtgatacgtttcgtattcacatcgaaaatcggctggtagagcacggaaatcgtattgtcttcgatcgcatggcgaagcacgtcggaagcgttgaaatagtctcccgaaccattctgcgcggcgagcgtggacgtcatgccgtcgactacgggcagattggagctctccgactcgtagatgtgcgcgctcgcatcggcgaggagcacggagaagccgtctgtcgcgttcgagaacgaaatgctgctcgatacgtccacggaaacctcgccttcttcggtgtataccggcatgacggcaagattgcgcatgcgcgtggccaactcctccacatcgctggttgacgtcacatcggttacgatcatggcgaattccgcgccgttcacgcgcgaaagcgtggcgtttcccggcagcagctggcttaaacgcatgcccacggatcgcagcacggcattgccgattttgcgtccataatgttcgttgacggtgcgcaaatgctccacgccgaaatacaccacggcaaccagattatgcacattctcggtctgcagactcttcaaatgtccgatgaacgcacgatacgtgagtgcgccggtcagcgtatccgtttccgattcggtgcgtagcagcgtcacttccttgttcacgcgtaacgattcggtaagcacttcgccgcaggtgagcaatatcgtctcgtcggtcgacatgaacggacgattccaaatactgcgttccatcgcgagataatactgtcgcgagccggtggaaataggcgcggaatagcggtaggaataccctcttttatcaagattgtttgcattgctgatgaaacagcgcatgcgggtgaggccacgattgatgcgtcttacgacggtctcttccggcacttgattcggcaacggcagcgcgtcgctcacattcgctatgcatttcaacgcacttcgggatcgcgtgagccggctcatcgtatcgaccgtcatcagcaacagcgagtaggcgatcagtgccagcatgaacacggaaagcacggtggcagtatccgagccaatattggcgaactccagaatttcaggaatccacacaatcgccatcaaatcagccaaagccatggcaagaatgtgagacagcgaatactcgcgcatggctttacgaatcggaatttgtacaaaaaagaacgttacaatatcacaaatcaatcgaataatcggcactgcaacagtcataatcagtaatggcagcaaccaatgctggaattgataaggattaatcgcagcattgacggaattctggctgatgataattgacagtacgtgagaagtgttcgcaaataatattttgatcagtgggattggcgcaagcgtggttccggcgcgaagaatgccgattttcagactgcgtgcggtgatgatcgacgtgatgatggtaacgatgatcaggaacatggccacgtcgggaaaatagccggttaccagcagtatgacggtcaacggtggcagcacggtgtgttcggcggcaacgcgatacgacgaacgctttttgtggtagatcaggcacggcagaaagcacagcgaccatatgcagatgcgcgcagggtcttccataagttgctgcacgccttcctgtgcatggaatgcgattgcggccgcaatgcacaacgcatagatgatggccagaatggtgagtctggctggttttctgatgccgtcttttggctggctgccggtggctgcctgatgctttgattgcttcgatgtcatgattgcctgatttcgttcccctgttgcgtgccacttttactgaaaagtagcgactgccttgtgttcctgccttgtattgtgtctgtggttgcgtctcgctgcggcaagcgtttataacaccggtccgatgatgcgccacggtgcgttcgtgccttcctcggcgctgtccggctgctcgttttcgttgttgcccaacgattcgtagatattgccgttccagatcaccttgtcgccttgcttgtacagtactcccggttcccacgtggggtaggcctgctgcgaggaattccagctggcattgtcgaagtcgacgagcgtgcccggcgtgcctcggaatcctgaccccaatgtggtggcgaattcgccgtccgtctgtttcatgccgctgcagaacgttttgagcgtgttggtgttcgtatagttttcgccgcattgctgatcgcggttcagcgaccacatgcttaagtgtcccaaacttgtttccagcgagaacgtgttgatttcgcgcgcattgtcgagcgtgaaatactcgtttttggtatcgttctggccgatgagcacggtggctcccaacagctcccagatctgatggtcgctgaagagtttgccgcgactgtacagcaacgttttatattgcgcgtgggccgcgttcagcgaacttttgatcagcgtggattgcgtgatcgacgtggacgccacgttgaaatccatggtcatgagattcacggtggatagcgtcacgccggcatccagaaacgcgttcacggtttgcattccttgcgttgtaagacctttcgcgtcggctggaagcgtcaaactgatgatcagatcgtgactggtatcgtctttccctttgtttttggctttttcgttggcgatgagttttgccacggcttgcgctcgccgggttgcggtttcgctgtacccgtcgagattcgagttttcgatgtcgaagtcgagcgaggtgatgtgatagcggttgatcacctgctggtatgcgtcggcaagggaatcgacgtcggaacatgcgctggcaagttcggtgccgttatgcccgccgaagctgacggttaccgtgcgatcggttttgtaggtttgcgcgatacggctgtcgagatcgagcgtggaggccgcttcgtcgagcgtgtagtagccgccccagcttggctggcagccgtcgccggcggtgacgaatccgagaatcacattccggtagacgttgcctaccttggattcgaactcgtatgagggtgttgcggtcacgtccacatagccgccgaaccagggttccggcaatttcttagccgccgttcgcgtgaacgtgatccacgaccatgtgccggccgcgacgagcgcgatgcacagtatcgctatgaacagtcgaaggaaggaaaatcgtcttcctggaaacaggggtttcatcattccctttcgaaatcgtcaggtcaccaatgctgatggggacattggggcgtctagcaggctgtgtcccgctgggcttcagtgcatatgcgggggattttacgggggattaagctttcctctcgtgcgctgtttttcttatatctcgcttacagttagggagtgtagtctgtggctagtacgacgatttcaacagtgatgtatggtttatgcaggtgaggcagcgctgataaggcaaaggggtatatggtggcaaaaataggggattttgacggcgatgaccgcaggcaccagtggggtgctgaaacctccacgcaaccgcttgcgatcatgcatgccaagccttcgccaacgcgcgttgtgcgtggttacgttgccatcatctgcacggttgtttcatggctgatctacatgatcacgatgattctgtcgttgttcgtcaacaatccttcactcacgttacgtttcgtggttgaaggcgtgctgtacatgacgattgtgaccacgctgattttcagcgcgctcgtctacttgaccacacggcaaggggcgctataccgtttcatccggcatgaacgcgtgcctcgggcgatgctcgacgaccatttcgcacacaactacgataagggaatcacagtgctgattccttcgtacgtggaacagccgaaagtcgtcgaaaaaacgatctggtcggcggcattgcaggaatttcccgaccttgcagtcgtactcctaatcgacgatcctccgcatcctaacaatgacgaagcgcgagcgattctcaaagcaagccgcgaactcatgccgaaagtattggccgaattggcggcacctgcggaacgtttcaccaaagcgcgcgacgaaaccgttgcggcgctcgccgatcagatggacgcaaggcgtagtgtggtcgcacgctgtgcggaagactatcgtgcggccgcgcaatggttggagcataaggccgacacatggctggtcgaagatcataccgacgatttcttctgcgatcaggtattgcgcggtcttgcacgcgacctgcgtttgacggaacaggcgttgaacgaatcgatcaccctgcagcagcatgtcgacgcgaatcgcattctgcaactgtacgaacgtttggtacgcattttcaccgcaaaaggatggtcgttcgaacgcaagctgtatgcgtcgacctcccgtgaaggcaacaaagccatgaatctgaattcgttcatcggattgatggggcactcgctcaagcgcgtggaaacgtcggacggggtgattctgcgtgacgtgcgcgagggggaatctcccgatttcgtgatgcgcaattccgaatacgtgctgacgttggacgccgattccatgctgttgcgcgactactgcctgcgcttggtgtaccagatggaacagcccggcaatgagcgcgtggccgtgatccaaaccccgtattcctcgtatcgtggcgcgccgacgcgaatcgaacgcatcgcggccgccaccaccgacattcagcacatgctgcatcagggcatgacctactatgacgccacgttctgggtaggtgcgaacgcggtgatccgcaaggccgcgctcgacgatatctgcgtggtgtcgactgagggcacgcgcacggtgaaaacgtatattcaggatcgcacggtgatcgaggacaccgaatccagtatcgatttgggttatttcggctggcatttggtcaactatccggagcggttgagctatagtgccaccccgcctgatttcggttcgttggtggtgcagcggcggcgttgggcgaatggcggtctgctgatcatcggcaaattcttccgcattgtgcacgcgcggcatcagcagggcaatgatgtgaagctgggtgagtgggcgctgcgcgtgaactatatggcgtccatcgcatggtcgagtttcggcctgatgttcctcttggcatatccgttcgaccagcggttgctgagcccgtgggtggtgctcgcgtcgctgccgtattttgccaccatgtcgagcgatttgaaacgcaacgggtataaacgttccgatattttccgtatttacggcttcaacatcgtgctgttgacggtgaatctttccggcacgctcaagtcgattcagcagggcatgacgaacacgaagattccgttcgcgcgtacgccgaaagtcaataatcgtaccgcttctccggcattgtatgtgacgatgccgtgggtgatcatcatttactcgtgcatggtgttctacgccgatacgctttcgcacaattggggcaacgcggtgttcgccggcttcaatgcgatcgtgacgttctgggcgttgaccgcgtatatcggcatctggcattccgtgcaagacatggtggttggtctggtccgttggttcttcgtgccgatcaaggagcctcagcaggaggcggcccgcaagaaggcctcttggcgtgacgccctctacttcggcgaccgccaaatgatctacgagtcccgcccgctgtagccttgagacttctctagcccgtgtgtacgtgtacgggcggcggttgtagatgcctccattcctatgcaacttgcgtttccgtctgcacgtcctagtgtttggggaggatggccgcacgtttttggcttgctgacctcacgatttgggaaaaagcggaaaataaaatcgtaaggtcgaaaccaaatcgcaatcgtgcgacgggactcaagattgcaacggtcggtacatcaaaatcatgatatgaaggaacggggtcgcagcatcctggtgtccatcatttcgaggaatgacgggtaggtgtgtcgaaacgtttgacaaagctgagttgctggcttacgattagtgaaacgtttcgacgaaacgattcgataaaatacgagcgtgattctgcggaagaaattccggaaggctcggcggatggctttgttgaacgatggacgagagctgcggtacgcatgacgtgtaacgcaaatgacttggagagccgaaggaggcggaagatgacgggcatcaaagatgtggctcgggaggcgggggtgtcagtcagcaccgtttcgtacgtactttccggcaagcgttccatctccgccaaaaccaccgataaggtgatggccgccgttgaacgacttggatatactccggatgccagcgcccgtaaaatgcgtggtatgcgtaatcatatttttgcgctcagcgcgccgattcgcggtgatatcaatcaggccaaatacaacgcttactttctgcagaccgcatggcaggcaaagaaccgtggctacgatgtgctgttgcttaccggcgaggacgcggtggccgacattcggcgcgtgacgcaaagcaacttggttgatggcgtggtgctgctcgacattgaggaacatgacgagcgtaccgcccaggctggctcatattccaaaccctgtgtggccatcggttaccctgcagagcatgaaggctgtgcctgtgtcgatatcgattttgccacggctggtcgtatggctgtggattgcctgtattccaaggggcatcggagcgctatgtttttgcgtgacaatgagaccgattacgatcgcggttcgggctatgtgctgctgttccgcaaggctttgctggaacgtgccgaagagttgggcatgacgattcatgaatcctccaagcatcgtgacgatcgctttgatgccgcggaattcgtgcgtgagcttcgttctttggatgagcgccccacggcgattgtcaaccaggcgaacgccaatgtgctgaagttggtattgcagcaattacaggcttcgggattgcgggtgccagatgatatttcggtattgtcgtgcggcacgtatttcgagggagagctgatgccgcagccgattaccgagatgccggtcatgccgcaggaattatgttctaaggctgtggatctgctggtcgacgccatcgatgagcatcgcgacatcaagggattggtggagctgtccgctccggtcatgcatagtcgaggttccgttaccaaagttggtgacgtgtgaaaagaaggttgtaggagtatgtccgtgaaaggcggacggatttccgtatccataatcgaaacgattcgaaagtaagtgaaggcgttgtagccgaagcgaagatggtgattgccgaattgaaaagcgccaatccgcagccatcgtcgaaacgtttcgaaaaaaggaggcgacacatatcaatcttcataactgaaaaacaacttgagacataactcaacaacacaaccaccaataacaaaggagaaccatgaagatcacacgaggcatcgcacttgcggccgcggcggcaatgtcgctgaccacgctcgctgcatgcggcagcgacaccgcgcaagacgaggaaacgccagacagcctgtcgttctggtattacgaggaagacgacgctggccagacccaggcatggcgtcgcgccgcggaagccttcgaaaaggaaacgggtgtcaaaatcaatttcgaacgcaagtcgttcacgcagatcgcgcagaacggcagccaattcctcaattccgatgaggcgccggatcttatggaatccaatcgcggcaacggttcggccggcgtgctctccaccatggggctgctcaccgatttgggtgattacgtcgatcaatacggttgggacaagaaggtgaccggcgccaatgcggccgtggccaagtatgatgaaaacggcatcatggatggtgacacctggtacggcatgaccagttacgcggaattccagcgcgtctactacaacaaggatctgttcgccaagtacgggctggagattccgaccacctatgacgagttcgtggacgtctgccagaaattcgtggatgccggagtgacgccgatcgccgccgatgcgcaggaatacggcgtgatgtggctgtggtggcagctggtttccaaggaggccgacgccaaattcatcgacaactggcagctctacaagggcgatgtcgactggaactccaagattctcaccaattccgtgaacaccatcaacgactggctcgacaagggcttcatctcccgcaacgccaccggtatgaaggccgaagacaccacgcaggcattcatcaagggggagtatccgatctatcagaccggcacctggaatcagggacgtttcgtcaagcagatcaccactttcgattgggacgccgcggtgatgccggaatcgaatttcgcgattggctgcgcaggcaatctgctggtgattccggaacgctcgcaccacaaggatctcgctgcgaagttcattgactacgtgctttccgacgatgtgcagaactacctcggcaacgccggcggaattccggtggcgggcgacgccagcaagatcaacgacgagaagagcaaggccatgatcgaggaatacgcctcctacgccaatgatggcaagctcagctactacccggattacgccgcttccaaccttaccgatgctgttccggcggaattccaggaactggtgaacggcaccaagaagccggccgacgtgctcaagggtatccacgagaagtacgacgtcggtgtggaagacatgggcgtcaagaccaactgatcgtatatctgatctcatatccgacatcgcacgggattattccggttttgctcagtatcaatcatgaataatcccgtgcggtatcgcaaattacaacttgcgaaccaatatcgcaatcgtcaatattcacaggcaacgcagcgcaaccaaaggaaaagccaaaatgtcaaagaagaccaaaaacgggggagtctcaatgtcaaggcttcccggaaaccgttccgcaaaattcgtaccatatcttgttcccggactggtaggtctgctcgttatcgtcgttattccattcgcatggaacatttatttgagtttcactcgctggcgcggagttggtcctgctaaattcgtcggattgcagaattggaaacgtctgttcgctgattccacgttctggatttcattcgctaattcattctggattattgtggctatcgtagttattcctacgattctcggactttttatttcgtcactgctgactgacgttattcagaagaaattcggcggcaagacggcttccttcctgcgagccatgttctacctgccgcagctgctgccagttgctgtcgcggccatcatcatgggctggattttccgcccggaagatggtgcggtgaacgcgctgctcgttaagctcggcctgggatcactgcagcataactggctcggcagccctgatagcgcgcttccggtactgatgttcatcctggtgtggattcagctgggctatccgatagtgattttcatgtccggtctgcagcgcgtggatcctgaactttacgaggcggctggtcttgacggagccaactggtggcagaaattccgtgtggtcacgctgccatccattattcccgaactgctggtggtcatccttactgccaccatcggtgcgctgaaaaccttcgcaccggtttatctgctcaccaaaggcgggccgggaacggcaactaccgtgccatcgtactattcctacaatcaattcttccaagtgcaacaagtcggctacggcgcggccatctccacagcgctcaccgtggtcatcatcgtgttctccatcgtgttcaccatggtgcagaagcacgtcgaaaaggaactggtctgaacggtccaaaccgtaacagacccgccaaatgtaagactcgcaagacttcgaaagccgaggaaaacaaccatgacgcaaaccatgaccgcatcggcagcgcggaaagcatccaagaaaacccaacatgtgcgctcgaccggcgattggatcaccctcattgtgctcatcgcagccgcactgctcgtgcttttcccgctgctcgtactcaccgtcaacgcgtttaaaacgcctgccgactacaacgccacaggtccgctttcactgccgaaacacttcaccatggatggcattatctccttctggaccaccaccaaattcccgctgaaattctggaacagcctggttatttcactggtagtggcagtggccgccgtcgtgctttccgtgctgaactctttcgcgctcggcatcggcagggtcaaaggcaacacatggattgtgctcgccatcatgctcgccaatatgatgccgcaggaagcgctgctctacccgctgtacaccatgttcaagcaggtcggactgtacaacaccaaactggcgatcatcatcatcttcaccatcatccaaagcgcatacggcacatatctgctgtcgtccgtatacggtacgtttccgcaggccattctcgaagcggcggccatcgacggcgcctcgcgctggcagattctgcgcaaggtggtgctgccgatttcctggtcgaccatcagtgtgctgttcgtgttctttttcgtgtggacatggaacgaatacatgattccgatggcgttcctgatgagcgatgacgtgcagaccattccgctggcgctcgccaccttgcaggggcagcgcacgatggatgcgaccacgcttgcttcggcttcgctgctcagcattgtgccgaccattattttcttcattattttccagcgcaagttgtcgcaaggcatcaccgccggtgccgtaaagtaacagaaaaggggtttcttatgactcaacataacgattggagcgctatgcagcaaagttcgtatcatgatatgcaggtcgattcgtcgggtgcgttcgccgcgcgcagtccgctggactcgcttgcggttgcggccccagggcgcacgcgttgtgtgaacgccgagaatcccacgggcggcaagggcactgcggccactgcggccagtgcacttggtccgtcgcgcaaaggcagtccctgcatccaaaccgtgaaagcgggggagagcgtcactttgatggatgtggatggtccgggcgtgatccgccatatttggatgaccgtcactgaccgcacgtcgcctaccggtccgaacgtgcttcgtaacctgatcctggaattctattgggatggcgaggaaaccccgtccgtgcaatgcccgatcggcgacttcttctgctgcggccacgcgcaggcctgccgagtcaattcgatgccggtggtggtcgtacccaatcgcggcttcaactgctacttctccatgccgttcgaacatgcgcgcatcgtgctccgcaacgatcacaatgaagacgttcccgcgttcttctaccaaatcgactacaccgaatatgactcgcttccggtcggcaccatgcgtttccatgcgcagtggcgtcgcgagcgcgttaccgaacttgcccgcgattatgtggtgcttgacggcgtgcacggtcgtggcgcgtatatcggcacgtatctggcgctcaccgcgttagaaagccgatggtggggcgagggcgaagtcaaaatgtacatcgatggagacgaccagtaccctacatggtgcagcaccggtgccgaggattatttcggtggcgcgtggagcttcgctgattttgacgagcatggtcgcatgcatgagcagacattctgtgcgccgtacgtcggatttccgttctactcgcagcgtctcgcctcgcatcgcgagagcgcgtattgggatgtgaatacgcctgtgacccgcggactatatcgctggcacattcccgatccgatttatttcgagcatgatttgcgtgtggaatggcagcagatcggcactgaagagggtggcaatttcgaacgtcaggacgacgtcgcttccgtcgcgtactggtatcagctcgagccgcacacgccgttcgatccgattggagatcgtcatttccgccagccccgctgattttcacccccgaacctgtgatttccggtctatccggtcggttcaggggtgttgcgctgtctgcacgacttgcgttctgtgcctgcacaacccgggtttttaacccgattttatgggttgtgcagatgcagggtgcgggttgcgcaggcgggaaacgtgactagatggggttagatgtcacggcgtctgcggcgctgattatcgtgcgaacgttctgcgcatccacgcgacagccagttgcgtccagatctgcatgctcggttcgatgccgtcgacgccctgccatgcggtttccgcagtgcccagcgacagtccgtgaccgccctgcgggaacaggtgcgcctccacactgacgccagccttcttgcaggcgtcgatcatcatcagcgtgttctcatatggcacgatttcgtcgggaacggtgtgccatacgaacaccggcggtgttttagtgtcgatatggtgttcgatcgatacggattcgagcgtttccggatcgtttcggcgcccgccaagcagcgagtcgaagctgccgcgatgcgcgagcgggccggacgtgatcaccggataggcaagcatcaaaccattcgggcgcaccgcatccggatcgtagccatgggcggcgagcacgtcgtcgctggcggacgtggcgagattcgcagccagatgaccacctgcggaaaaaccgatcacggcaatcgcattcggatcaacatgccattcggctgcatgctcgcaaatcatcttcatcgcatcagcggcttctaaaagcgcaactggaaaaacggaaggcttcaccgaatatcgcagcacaaaagcgttgaaaccggccgcaagaaactgcattgcaatcggctctgcctcgcgatccgacgtcatttcgtaaccgccgcccggaatcacgagaacggacggacgcacacgatcgggaacgatttcttcactgttatcaaggcaatatccgacgaatttcgctgcgctgccgtcgataccggaaatttcatattcgaaatatttcatatatccatcataggtggaacacggcgcacgctatgcaggaactatttggtcccgctatttttcgtaccttgtgatccgtgggcgcaaattgtgcagtcgggagagtgcgtcctactcgagcagccagtcgaggatgttacggtgttgaatgccttggtagtcgccgagaccgacggtatctagagtgagcagcgtcttggggtgattgtcgcgcaccgtctgcaatggtgccagttcccgcgcaagtgtcgactcgtcaagcacggtttgcgaaacctgatagtagtgcgggccgttggcatcggatgcgacgaaatcgatttctccgccccgaagcttgccaaccgaaacggtgctgtaccgtcgcagcaattccaagtagatcacgttttcgatgcggtgttcgaggtcgccttgccttttgccaagcagccagaatcgaaatcccatatcgcccaaataatatttggattcgctatgcagatacgctttgccttgcaggtcgtatctggttgcttcgaaaagcaggtaattacgaaccatttctttgatatacccgctgattgtggtgggggaaatgcggcggccgcttgcggtgaggcctccggccatgcttttcagtgatgcaagattacctacattgtcggcgaggaatgcggctacatcgttgaatgcccgcatatccatacgggggttccgctgtgcgatgtccgctacaagaatggtgttgaacacgcctcccaaatagtcggcgatgtcccgatcttcggtgagctgcgtgacgtaggggagtcctccatatgtgagataccggtcgaacagcgcattgtcatttgctgttgattgcaatgcatttcggtattccgagaaagacagtggcagcatcttaagttcgacatatcgtccggtgaggagtgttgccaattcgctggaaagcagattcgcgttcgatccggtgatatacaaatcgacgtcatcgcgcacgtacagtccgtccgcagctttttcgaaatgttcgacgtgctgtacttcgtcgagaaaaacatagttggtgcagttcggctgcagtctctcaacgatgtaatcgtataaagactggtaatcggttggatagtgtgcgtcgagagattcgaaattaatggagatgatgcggctttctgcaatgcctttcgcaaccagcgaacggcggaaaagctctaaaaccatggattttccgcaacgtcgcagaccggtgatcaccttgatgacatcccggtctttccaccgttgaagccaatcggtgtactgcggtcgctcgataagctcactggtgacc

SEQ ID NO: 856 - DNA, 9540 bp, Unknown
  gut microbiota DNA sequence
tctccaccatgcgctccttcgtaaccgacgacgaggtgaccgtatggcacgaccgcgcgccgcacaacctcaccgacgtgttcggcatgacctacaaccaattcacccgcccgaacggccacgtatccgtggaattcgccggaacgctcgccaaaaccccggcaagcgacgcgcaggcgctcatcgaactggtcaccccattcgacggcaccgacgtgctcgccagctacggccactacgcgtggaagaattacgccgcggtgacccgacatggcttcggcaagggcgacgccgaatggatcgccaccctgctcgacgccgacaccatccgcgccgtcctgcgtgaagccgtggaacacgccggcatcgccgatgccggcaccgcgctcgccggacaggtgacggtgcgccgcggaacgaacgcccgcggcgagcaggtgacgtatctgctcaactactccgccgacgaggtcaccatcgacagcccggtgtcgggcgatgtggtggtcgctccggtggtggtgggcaccgacggcaccgtcgatgaatccgccaccgcggcgatcgccctgaaggagggctcgaaggtcgaggtgggcgacaggctgacgatcggccgctggaatgtggtcgtcatcgccggctgagccgcaaagcggtggcggcgcgtcggcccgactgggtcaggggatgagcaggtcgatgatggccttccattccccgatgaagtcgacgtcatgcgatccgttgagccagcgcagctgcagaccttccatcgcggacaggacctgcagcgcggtgcgctccggatcggcgacgccgtcgcgcttggccgcgaacgtgtattccttcagcagattgatttcgcgctgttcgaaatactcgtgcacgggatggtccttgctcagcgcctcgctttccagcaaggtgtagagccggaccatctccggacggtcggcgttggtctccacggttcccgtggaaatggccttcagccccagatcgcagtggtacgcgatgccgtcgtcaaggacttcgccggtcacgccctgcacgccaagatgctcggcgatggcgatctgattggtccgatcggcgtatttgagggtttcctcaagcagttgttctttggatttgaagtagtaaaggaggccggcttcggtgatgttctgagcctgggccacatcgcgtatggtgaagccccagaaaccgaactgggagatgaatgagaccgtggtttcgagaatcgccttcctgcgatcctcggcgctcattcgctttctgggtttgttttcggtgcggcgacgcatatgctctccttcatctggtgcttactaaggtacaagaagggggagaagaagacgatgggaacccttggaacacgccggattatcgcagacaaacgatttgttatatgatttaactaagcagttactaggtaataaaaaccggtgactgtgaagctgaatggaacagtgtccgaccggttttgcaaacgctttgagacggcgatgacatgacgtcgacttgtgcctttgcgaaagatggtttacactgaaaacacgttagttaccacatggtagttaacagatggggcgaggccgtcccaccaccacatacaccgctaaggtgcggaatcgcacacaacataagttcactactgaagcatgattcgaaggagagagtttcatgagtgaagcaatcgccagcaaggcggagcgccttgccgcttacaacgccaacatcgccgcggcggaaaaggatccgtcactgtccccggaaaccggcaagccgctgtccaagatgaacgccgcacgtttcggcgcaggcttcctggtattcggagtgctgtggatgtccggtctgggcatcgtttccgcagtgctgctgcccatgcactacaagaccatcccgggcgtcaacgccgatgcgttggtcggcatcgtcaacgcgttcaccgcggtcgcatccctggtcgccaacctgatgttcggcaacttctccgatcgctcccgttcccgcttcggccgccgtaccccgtatatcctcttcggagccgtgctcggtggcgtcaccctgttcctgaccggcaccacgcataacgccgtgctgctgaccatcttctactgcgcctgcatgttcggtctgaactgcatgatcgcgccgatggtcgccatcctgtccgaccgcgtgccttccaagatccgtggcaccatgtccgccttctacggcgccggctccaccatcggcgctccgatcggcaccatgctcggcgcattgttcatcgaaaacctgattccgggcttcgccgtcgccggcgtgctcatgttcctcggtggcgtggtcgccgtgatcatcatcccgaaggagcagtccgcagacttcctgccgaaggacgaaggctccgccaaggacatcctctcctccttccgcccgccgaagttctccaccgcgcatgacttctacaaggcgttcgccggccgcttctgcatgctcatggcctaccagatgatcaacgtctaccagctgtacatcatccagaactacatcggccagtccgtcaaggaatccgccgtcaccgtgtccgtcgtgtccatgatcatgatggtcatgtccctggtcggctccttcatctccggcccggtctccgatctcatcggccgccgcaaggtcccggtcgtcgtcgcttccgtgctcttcgccgtcggcatcgccatgccgtggatcttcaagtccaccatgggcatgtacctgttcgccggcatcgcaggcctcggctacgccgtctactccgccgtcgaccaggcgctgctggtggacgtgctaccgaacaaggaagaggccggcaaggatctgggcatcctgaacatggccaccaccctcggccagatgtgcggcccggtcgtcatgtccgccatcgtggtcaacctcggctacaacttcgcgttcccgacgtccatcgcattggccatcatcggctgcttcttcatcatggccatcaagaaggtcaagtaaggcagctgctgtaaaccgggggagacggtcgtgccataggccgtctcccctccgcggggtcgaatcgtcccgcctctcccatccatactaaccatcaacgcatatccgaattatcaacgacgataccaaggaacatcatgaccacctggattgcaacgacgcaagacaacaagcttgccgaccgaacctccgacatcgaatccaccaacgccaccaccgcggccgacctgcagctcgacggcaacgaataccaggccctgcgcggcttcggcggctgcttcaacgaactcggctggctgccgctgcagaacgtcagcgaagccgaacgcgaccagatcatcaaggagctgttcagccccgacgaaatgaacttcaccttcaaccgcgcccccgtcggagccaatgatttcgccgaccactggtacagctacgacgaggtagacggcgactacgagatggagcatttctccgtcgaacacgacgaacagaccctgatcccgtacatccaccgcgcgcaggaatggcagccgaacatgcaactgttctccagcccgtggagcccgccgacgtggatgaagcgcccgaaggcctacaactacggccgtctcgtgcagaccccggagaacctcaaggcctacgccaagtacttcgtcaagtacattcaggcctacgccgagcatggcatcactgtgaaccagctgcacgtgcagaacgaggtgttcgccgaccagaagttcccgagcgccctgtgggattccgaagcgctcaaggtgttcatccgcgactacctcggaccggcgttcgacgaggccggactcagcaccgacatctggcttggcacgctcaacggcccggaagacatggcctggaccggcggcggctacggcatgacgctcaacaactacaaccgcttcgtcgacaacatcctcttcgacgacggcgcgcgcaagtacatcaagggcatcgcctaccagtgggccggccagaactgcatcgcccgcacgcacgaatcatggccggagatcgagctgatccagtcggagtccgaatgcggcaccggcgacaacagctgggagtacgcggagtacatcttccatctgatcaaccactacttccgcaacggcgccaccgcatacacctactggaacatgattcttgacgaccaggattccacatggggctggtggcagaactccctgttcaccatcaccgccgacacgcatgaggtgcgccgcaatccggaatactacgtgatgcgtcacttctcgcatttcgtcaggcccggcgcgaaggtgctcggcaccactggccatttcaactcaatggccatcgccttccgcaacccggacggcacggtggtggttgtggcacagaacgccctcgacgaggagcgtccgttcgcattcgccgatcccgatgccgccgaacgcggcttcaaggtaacgcttgctccgcgatcgttcaacaccttcgtgctggactgagccggagtgatacggcgtcggttcgcgcgtaatgccggtttttccctttttcccggcgatatgccgatcaccggcgccctgccatgagatgcgcttcctgccctgtcagcagcgtctcattgtgtaggattggctcatccgcattacggggtgggtggagcctgttgctctcccgcgcgatagtctcagggaaatatgagcaaagaagagcggataccgaaaacgtgttcgcaaggtaccggaggagcggtgcgaggaagtgcttgccctgcggtcgaacattaccggcgtcgcgaggagagtgttgtgagaaggctctgatggcatgtgctttgcgacgcatccaacaaacaattgacatatccagctagttgctgtgtggtgagcggatgtcgtcatggacccctgagtgacaagcttcgaggagtatgaaaacatcgattcgtgggtgcacaaggctattaggattccgattgcatgtacttgttcatgggcggcgtgggagacatatatcaggctatgttcccatcacttcaaaactgcatagaaaacgtctgcagcttcttattcttcatcggctgatagttgtagatatgatgtctaatatattgcaatatatgcctcacattccttctaatcccatagcattacaatcttgcttcatcgaagttcatactgtttgagagttgttatgcatgcatgctgtcgttagtatgaactgtttcctgtgttttttgtcttgtattattctccattcaccaatgacggaaggaatcgggtcatttactggtgtaccgtaagaacttctaattgatttcatgcaaaatttgtgaataggtaacagagaaatttctatgtccgtaaagggtatagcattatttccggcgtatgagattgccttgtatactgcttctttcgcagaaaagagtagtctatcccaagcaacagtaggatcattattttttagcttactgatagttgtaatttcattatcaaacaaagaaaaatgtacaatttctattggtaaaaaataattttcttcgatgtcgattcctatagatcgataataattggtgtaacctatagctgctcccacacatccttcgcaatgcgatagactgccgattactccttccggccaaacaggttttccgtatatgtcagaaggaatttcacttcttgtaatgttgtactcgctaaatgcatatcgagcgcaagcccgggcgtctaaagactgctgatagaaacgttgggtgtagccgttctttccttcgacggcttcaaactcatgcgatttaggaagattttttgcataagtataaatgatagtaatattttctgtatgaattatgttgtagagattttctatgtaaaatgagctcattttttgaacatttaccgtaatttacgatgagaggtttcagggccaaagaagccaacaattaccattgcaactatagctaaaacactaatgcttgcatatatcagaccttcttgtttctttgctaggagaaaagctacaaacagtggcataaaaacatttcctgattttgcggcagcgtttactatgccgacgcagcggaaacggattcgtgttggaaataattctggaacataaacagctgtaacagaggcggtgagtacatacaaaaacaatactaaaaagaaccctaatattatcgctgaaattgttgttgattgctttgcgtaagctattcctagaatcgctgtcatcagaaaagctgatacaatcatcttcttccggcctatcctatcaagtagaagtaggcctattaagcagccaaaaggtgctccaagcatcattaagctacttgttaaaagtgaactcgataagctgattccttttgaaactaagattgttggtacccaagttgtgaaagcgtaggagcatacgtttgttgcgactgctgctacaacacctacagtaagcataacgaataaattatgatgttgatcgcgcttcagtagcgcagtcccttttgatttgtcgttatttctataatttgttatagatgcactgtttaactgttccacaataagagctgcttcctcataccgtcctttgctgattagccatctgggtgattcaggaatgtccttacgaaagaaccaaagcacaatggccaatatgcccacaacaaagaaaactacacgccaagaagtgtttgggattaccagagctgataggagaattgatgtaggtaatccacaattagcaacaagcgagactagtccgcaccaccttccacgtcttgccacgggtgcaaactcattaatgaaagtaaacccagtcactatttctgagccaagaccgattcctgcaaggaacctgcagactatcagcatgtccatattaggagaaaaagcactgagtacagtaaatccaccgaaaagtaataagttaacttgatatgctacttttcttcctttgtagtctcctattagaccagcaattaaagaaccgatgagtagtcctaaaaagtttgctgaaagtagcatgctattttcttgagctgtcgaccattttgatgcagtcaggctacttgctaccgcacttcccgtatagacgccaatgctggcttccaacatccctagcgatactagtatcactattttatggaagagtctagattcgatagaattgtcgattctaaataacagttcgtcatttatagaacctgttgcaaaattagtcacgatcgttcctctgtatagaggcaatttttaatcatcatatcgactctttataagataattagaacgttgaataatttcagattcattcttgccggaaataaggaatttcctgtcggaatcgacagaattgtgagcgataccttttttctttcccacagattccaaaactgcccaatccgggatttctttttccttcggccagttcaatccagcggtttccagcagtatgccatattgggatgatcgtgtgatgctggtatccgcatcgacaaggccaagttccagtaggaagttggccttgctctgatccatgccataggcggctgtcagctcctgtttgatgagtccgcctcctctgcgtgccgccatttccccgaatatgaaatcaccggtctcattcttatagaattcgatatgcatcacattgggaatcgtctgatctttgaaggattcaatgagttgctttgtcagccggagcagttcggaatagtcggcgtcgttctcgtctaacattacggaaccggtgttttgtttctcgaaatctagtggcgggacaagatatcgtgacggtgaaatcaggatcgaatcggaattgatatagactacatccacatggtagacggaaccggaacagtattcttctagataatactggtttgaatgtatgtttttgacaaattccggcttggtggctaagacagacaggtcgtctttcgaatgtagtatcgtaatgcccgcggaccctgcgccccagcgaggtttgagaacaaccgtcttccaacggtcgaacgccgaaatgatgtctccgaagcttttgcaggaggtgtaggggataacctttaatccggcattaagggccgtctgcttcatcgtgaccttgtctcgacagcgcagcgccagttcatactgcaaaccgggaatgccaaatagacttctcgcctctgcaaccctcagtacatcttcctctgagctggaaattatcctgtctggtttaaatttcctaacaatatcgaagaattccgcggtagcgctatcggaggaataatcagaaactacgatttccttgatgacggaattcggccaactatggtgtgcggcccgatcgttcgaggtgaaaaccatgacctctaaacgattgaaacgttcttggatttcttcaatccattttggataatttgagaaagatttgggttgttgcatcagcagtactttcatattattccctttctggtgtatttgctaaaatatgagatgttaaaaggagatgatccttaaaaaattctaaaaattgtcttatcttctccctactgaaatacgcggtgttgcatgagacgctaactttggcctcatcgttaaaatattgtgccctcacttcaattggataaccatatgaatatggatacgtgcttcctcgggttaagtttgttgaaagtggagatacttcgttcttatgggaagagcgcgttacgttcagaaagaatgtgggacaagcttctggatatacatgaggggagtttgctcggaatgagttccaggcggtctcttgctgtaacatttcttcatactccgcattaaggacgaccaactcttcatcgactgaattaaatctgccgtgttggtggaaaaatggaatcgaactgctaatccaacctgtcattgaaggaagaacaggacagtcaacttgttcgcgcccatttcgagttacgtcgataacaatgttgtcaaggttgagacattctgacgctgcattggtcaacgctgctaaggatattttatctaataagccatattgttccccatctctttcctgcagcaaacgaatagagcgatctctaatatatagtggtggcgaaactgcgggactattcccatcgctttcgcgataccaagaagcggagagactgtcatgtcttttaatatcgggaagtttttctatcttttttcttcctttgtcggagttataaaagtcctccaagaacccagcatactgcaggaatccgggaatctcttctaccggttcaaatatgctgcttccagttctttttgtttctgccaattcttttaatgcagactcgtattcatgaacggtcaatgcgtcgcatgcccagtggtggataaccagtactaataaatgagtatcgtggttagtgaaataatggagcacggcaatagggccgtcctcaatgtttaaaattgaagctgatgcttcaagagtctcatcaatcttcgactggatatcatcagttggaccaaggtcaatagttttaaccataataggctcatcaatcttgatgagattcggatgttgctctcgacctttgaa

SEQ ID NO: 857 - DNA, 72526 bp, Unknown
  gut microbiota DNA sequence
tcaccgtccttcaaggcctcccggccactcgcgaacgagcggacgatgaactggcaatcattgactataaagaagtagtacaaatacgctcttgagttctcaaaccaccaccacaccaacagaccgtcccgaacctcaggagcggaaccgccgtgctgagcagcgagatgtaaacttacacgtccttgccgatccacgcaaatcgaccttccgtaaacaccgtgtaaacctttgaaaaataacgtatctctcggcgtgtcgaaatcgcaggaaaatcgagtgatgagcaccatttcacagcacaatcccgctggaaaaacctcaacatacctcgctacaggtcaacatccgggcgtgtcacacacgagacgaacgaatgacagaaaggtacaagacaaacagcgggcaaaacatccagcgggaacagacacaacacgactacgcctgacacacatccagcaacgtcaattcgtccgaccaacttacgccttgccacacaacctgcgagcgactccgtctaccagcgcttgccacagcgcttgccaccattgccgggcctgccaccggcgccccacggcccgcgcccctcggcatgcagcacacccagatgatgcttcatggcgaccagcatgatgtgcgtatcttccaagccaagatgtcgttcgcttttggatgcatccaacgcgccctgacgtttggcatacgcatccaacgtattgttgccgtgcggatgctcatcatcgggaatcgacccctcatcccaacgacggctcatcggcaatgtgtcgatgatcgtgatattgccggcacgatagctttccgcatatccggcgacgttcagcatgaaaaagctatgctcgaaccgggcgttatgcgcaacatatggctgctgttcgagtcgttgcagcaatccgatctgagcttcgggccattcgtcgaacagacgaaagtccgcgctggcgcgatcgcgcacgtcaataccggtaaggtcgagaatcagaggattgccaagcagcgcattctgcgcgggaacgccgaaggaaagacgtgcttggccatatgcatcgccggtctcgtaataatcctgttcgtagcggtagcccgcgggctcgccggcaggacgaggcgagatcatgttcatgaattcgaatccggcatcgatgatgtacacgcgagccggatccgtacccgtagtttcgatatcaatgcccatcaccgtgtcgacgtcacggccgggaaggtaggcgtcacgccaatccgactttttgtaatccgccaaacgtcggtcctgcgcggcttccgccgagtcagcggaaccgccagcggatccgagggagccatagtcgaacaccttcgagcctcccggactcgtcaccccgctcaaattcgcgcgtgacatggcgtaatcgctggcacgcttctgctcacgttccgcggcacgacgttcggcacggccattgacgatctgcgcggtacgatcctgaatatcgttaagattcacgaggctttctgctccggcaacagactgcagcacgggcactatcacccgctcccgccgctcttcggcaatcgtccacaatcccatcgcaacaccaatgcgccgcaacacggcaatttcgtcgcacaacctacggttcgcataggcgagcgcgcgaggcaaacggtatgaagcgatcagacggtcgaaatccgtcatgaaggtggtattgcattgcgcgatgatggattcgagccggtcacggaccgctaaatcctttttcagcagattatgcaactgttggacggatggtaccgaatcctgcatgggatccgttttctccgaggtcgacgaaaacgtggtatccgcggcattcagaacggcgatcaggtcgatgccttggcttttggcggctccgatgccgtgttccaagtcgagagacatgacccaatgccagtcgatgcgctcattgtcggagtttttcggcatcgatgccgaccattggctgatgtcttgtttggcttcggtaagccaggaacggcccgtctttgcttcgttcatactttgcatggtagccgagagggggcgcagtacacgtcggcgcgtacaaaaaaccatgatgcttctcggatagcgcaatcttaagttttttgagattcgaaaggttatcttgggttcgttttatttcgttgattttcggtaagagaaagaacaatgctacgaaaaacgattatgttcaccaagcattcgtcgtcaggatacgatcatgcgcgttgcagacggagcacgacgtcgcgtacgaaatcattccatcgcaacgcgaacgccgatattgtcgataatgctgcgaaatgcaaacatggttacgctcatacgtgcgtctgccgtggggagtgtgatgcgtgcgcgcgttgcactggttatgcgcatggtggtatgacgaaaaaatgacggtatgacaaaaagggagaggcctgtgggcctctccccctgcaggatattccgcggattgcgcaacgataggattccgtgacaatcggattccgcagcgtttttcgccgcgcatgtatgcgatttgcggcgtgcgctcctggtttacagttcgaatccgagttcggcggcggcttcggtgggaaccggatcgtcgcaccagaaatcctcaagattctcgttggtggcgaggctgcggatttccgccttgtcgatatacagttcgccgctcagatggtcggtttcgtgctggaagatgcgggccggccagccgtgcagatgttcctcatgctgtttgccatcttcatcctgccagcgggcggtgatgtcgagccagcgcttgcgtaccgcctgatagccgtcgaagctcaggcagccttcgtagaagctgcgggtttcggtgccgatcggctcatagctggggttgatgatgacgtggaatgggaattcggccgcttcgcgcgggtcatcgtcatcgtcgtcgcgcacatggtcttccaccacggcaagcgccagtccgaggccgatctgggttgcggcgagacctacgcccggcgcttcgatcatggtgacgcgcatggtttcgatgagcttgtcaagtgtcttgcggctcagttggccttcgtaggctgcggtctgctggcgcagtaccggttcacctgcctgcacgatgggaagcagctgttccttgccgccggttttgatgagtttttcgacctcgcggttgagctcgaggttgactttcgagttacgtccaaacatggggttccttcgcggattggttcgggattttggattgccaaatactgtgtatcggcggtgtgattacaaggcgagttcttcggccacgactttggcgagacggtcgcagacctcgtcggcctgctgctgggtttccgcttcagccatgacgcgcacgagcggttcggtgccggagggacgcaagagcacgcggccggtgtcgccgagcattttctcttcgcgttcgacggccgcctgcactttggcgttggttttggctgcgagcttgtcgacgtttggcacattgatgagggtttgcggcagttgcgggaagtcggatgcgagttctttgagactcttgccggagttgaccacttcgttgcacaaggtcagtgcggtgagtgtaccgtcgccggtggtggcgaattcgcggttgatcacgtggccggactgttcgccgccgagcgaatagtcgccgcgcagcatttcctcaagcacgtaacggtcgcccacgccggtttgcacggttttgatgcccatggaacgcagggcgagcttcaggccgaggttgctcatcacggttaccacgagggtgtcgtggttgagtttgcccgcgtttttcttggcacgtgcaagaatacccatgatctgatcgccgttgaccatattgccttcgccgtctacggcaaggcaacggtcggcgtcaccgtcgaatgccacgcccaagtcggctccggaggctttgaccatggcctgcagctgttcggggtgtgtggatccggcgttcttgttgatgttgtagccgtctggcgaagcgttgatcacgatcacgtcggctcctgcgcggcgcaacgcttccggcgcgaccacggaggtggcgccgttggcgcagtcagccacgactttcaagcctttcaacggtgtcggctgggacttgtcaggcccgatgggggcgattgtggataccagatggtcgatatacaggttggttgcggttgccgtgtcgtggctgatacgtcccacgcctgcaccggtcgggcgttcccaatcctggccgagcacgttttcgatttcgtcttctttggtgtcaggcagtttgaatccgccgcgtgcgaagaatttgatgccgttgtcgggcatggggttatgggatgcggagatcacggcacccatttccacgttcagcacggaagtcaggtatgcgacacccggagttggaataatgcccgcgtcgatcacgtcgaatccacctgcggacatgcctgcggacagtgccgctgcaagaaaatcgccggaaacgcgagtatcgcggccgaccagtgcacggcgacgaccgtcgaattcgcttttgtctccatcatcgccaagcacgcgcaccgcagcatcgcccaaatccaacgcaagctgtgcggtcaaagccctattcgccaatcctcgaacaccgtctgttccgaacatacgtggcatgagtctcaagtcctcgctatctcaagttatattgccgtgcaccatcgtactcaacgggttcaccattcaacgaaacagtcgagagcatgttgcgatacctgcatactgcggtacgtaatgttgcgcaaaccgcagtatgcaacggcgcgggcttttccgcaatctcacgttttcgcaatatcgcgttattcgcgcaataccgcattcgacagttgcgccacgaacaggccttggtctcgagtgacgatttgggcgcgaccgggcgccgccttcttcggtttgactttgccgatcagctggccttcgttcgaatctccggacagcagaatgccggtcatgccgagatcatggaacgtctgcaataccggatcgtacatggctcggctcgcaccgccggttctgcgggccaccaccacatgcaatcccagatcggaggcctgcgccaaatatggcaccaacgcacgcagcgggttgcctcggctggtggagaccaaatcgtaatcgtcgaccagcacgtaaacttccgaacccgtccaccaggaacggtcgcgcaactgttcggcagtcacgtcctggcccggaatgcgggttttcaggaattccgcaagcgcgtcgagactttccgtagcctgttcgtcattggtcaggtacgctccaaaatgcgactgcggaatctgcgcaagattcgcacgacgataatccaacatgaaaatttttgcttttccatccggatagcttcgtacgatttcgttgattatcacgcgaaggaatgtagatttccccgaaccggcgtcaccgaataggtaacagtgcggttcggtgttgaagtcgaacaccactggagacagtgcgttctcgtcgataccgaccaccatgttgcctttggcgagctggttggatgccttttgacgcatgacggaagccatcatcgcctcgtacggcaggttttcgggcagcaaccgcagcttcggaccatgcggatggccttgccatgcggaacgtactttggcgatgagatcgttgatgccgtcggacaccgtcgccgcatcatgcccgccatcgatgcggggcagcgctgcgagcgtatgcagtttgttggcgctcaggccacggccaggcgcgcccttgggcacggtgtcggcaacgtggcggtcgatttgcgaatcgctcggatcacccaaacgcagttcgagcttggtgccgataaggtcgctgatattggcacggatttccatccaacggttcgcgctgaacaacacgtgcacgccgaaggtgagaccacgggcaacgatctgctggactttggtttccaattcgtcatagtcgccgcggaatacgccccaaccgtcgatgacgaggaacacgtcgccatatccgtcgtcgaccttgccttcggcgcgacggcgacgatacgcgtccatgccgtcgatgcgctgttctttgaagaatcgttcgcgcgcgtcgatgatgccgctgacttcggcaagcgtacgacggactttttcatcctcattgcctgccgcgatgccgctgacatgttccaatccatccatggaggagaacgcgccgccaccgcagtcgatcacatagaactgcacttcgagcggcgaatgcgtgagcgccaacgatgcgacgatggaacgcaacatcatgcttttaccgctcaacgggccgcccaccactgccacatggcctcccgcaccggcaagattgagggccatgacgtctcgcctctgctcgcgtggcttgtcttccaacgcgcatggtacgacaagcgctccggcattgcgccaccttggcgaaatcaagccatactccttggtgacggtcaggtccggcatgaaatcgtcgagcgaattcggcgtgaccagcggaggcagccacaccacgtgcgcgggattgcctttgcctcgcatctgttccaccgcatactggaaggtggtggtttcgccgtccaaccccttcggcacgcccgacacgtaagacgcgcggaagcgggtgatggtgccgtcaggcgatttcagatagccgatgccaggcaggcttggcagatcgtacgcgtccgtaatgcccagcacggcacgggattcggttgcggagaacgttttcagaccgatacggtatgacaggtgctcgtcaagaccacgcagcttgccttgttccaaacgctgcgatgcgatgagcagatgtatgcccagcgaacggccgaccgcgccaatgcgaacgaacgattgcacgatctcgggtttcgccttcaacagttcggagaattcgtcgaccacgaccaatagtgacggcaacggtttaagatcgctacgcccgccgttgacacgcatctcctcatattcggtgatgttggcaaggttgcccgcatctcgcagcagctcctgacgtcggttgacttcgccatccagcgcgtcttccatacggtcgacgagcgacgcttccttgccgagattcgtaatgatggatgaaatgtgaggcatgccgtccatacctgcgaaagtggcgccgcctttgaagtcgatgagtacgaaattcaactggtccggggaatggctcaacgccaacgacagtaccagggttcgcagcacttcggatttacccgaaccggtggcgccgacgagcacgccatgcggccccatgccatgctggcccatctctttgatgtcaaggaacgcggtactggtgtcgtcgaataggccgatcggcacgcgcaaacgctccttgcccacacgatatgcccacagtttcgccagatcgatatgacgaatatcgctgatgccaagcagatcaggcaattcgggggatttcttgcgattgacggattgtgaggaatcgtctccggtttcgttaacatgcacgctcttcaagcgtttcgctatgcagagcgcctcttccacagtcaattcgtccggttggatttccacaggcttgagtgccgtggaaaacacttcaaccatattgatgtcgcgcttttcgagaacgttcagtccttcctcaaccacggtctgcgaatacagcacacgaagcacgtcatcttcctcgagctccccccaatcattcggcatgtcgaacacggtcactccaccgaggccgtcttcagcgaacaatcgggactctcgagacaatacagtccggtcgaatccatcattgatcaccaaaacatgaggagcaatctcattatctccggtacgcctgttgcggttcagcacttcctcgcctatcagcgcatcaacttcgcgcacgttgctcgtcagcataaatccatgaccgttatacgtgccttccaagtatttctcgttcagcacacggttatgaggcagcaaccgtacccattcccactgccccatgcgatcagcggatgccagtacgagcactctgcagcattcagccggatgccaaaccgccgcttgacagatcatggctcttgcgagcgcctgcgtctggctttcgtttccaagcaattccacacgcttgtatttcctcaggtcaatgccgtaaggcatattgtgcaacgttttatgtgcaagcatgaaacgatgcgccgccgatgccgaaaccgggtcgagctgcgcgagtggaggcaattcaggtgattcaagctgcaggcacaatggcacactatgcgtgccgcaacgtaatatcatgaaatcgtcgtctgcgggaacacgttcccagcaacgttccggttcctgggcgatcgccgtcaacgaggatggggatggagcgttccacaatgcggcattgcgttgtttccttcccgcggtgcgcacggttttgcgtatgccagccaaataagtgagatattcacgtcttgccgccgcgaggttcgccatgcgttgcgaacgttggcggaagccgttgaccgccacgaatcccaatgacgacaccatgaacatgccgccggtaagcatgccggtgagtcccgaattggtcatcagcatcatgaccatggcgctggcggtgcccaacaatggcaccaacgatgtgagcagcgtgttgacaccgtcgctgggttcaagctcgggtggtgcctgcaatacgatttttccttttggaggtttgggaccttcgagcctgctgttttgttgttccgcagtaatagccatcaacgcctcctgcttttcgatgtgatgatgctgcagcccatgtctcccagtccgatgcgggatccgacatgcatacgcgttcggacgttcggttcaagttccgtctcttcgccgctttcgtcaagcactcgcgtaccgttggtgctcgctaagtcagtgatccagatttggtcgtccaccaattcgatccgagcatggtttcgtgagaccgtaccagtatggtcaggcacagccaacgcgatgtcccctgtctgctgcggggctggcttgcgcccgagaatcaatgaagaaggcacgctgagagttcgcttggagccatcttcaaagaagagaaaggtttggggtttctcaggaggtgtcactggcaccgaggccgtctgttgttcaaccgttgtccgaaccggatacatcggcttttccgaaggcatgggtacaggagaaacctgttttgccgttggcatgggaaccggtttggacacgtccgccactgttttgggaagaggcacgggaggagtgggctgcatccgaggcatgggaaccggaggaatttgcctcgatacgaccggttgttcctccaacgcctcaacacgttgatgaatatcgacgcatcccaaagatgccagtctgtctgcccatccctgatgcaaatcatccttggcgaacaacggtgagcaaatcaccgcaatcagacctatgaccaacgcaagcgtggatccgataaacacacaatacttcacaagaatccggcccattccggcgggcaaagttcccgccgtgacgtcacgcatgccttccacgcgaaccgtacgcaaaccgaacatcatattccccggagtcagaccgcgcgaaccttctccaatagccagcaccgcaaccgattcgagcatcaccaggaacgtgacgggaatattatgtccgagcaaagccgcaatcacgccgcaaagcaatacgaaaccgcaatcgacgaatgcggccgcacattgttttccggctcctgccggacgacatctcattacggaattcgaatccgacatcacaatccccttatgtactgcaacgcgccagctgcgaagaaagccgccacaggcgtgaccatcatggacaggaagcacaacgcatcgccggcgcgagacaatacaagcgaatgaaaaccgcctttttgcacaggaatggcatataccagcagaacgccaatcaggccaatcgcgcatacgccgaacagcctcatgttttcggttgtcatgaagccccaggccctcacgcaggccatagccatcaccatcaccgcagacaaacgcatgcagtaccgttcgaaaggtctgcccgaccggcgcggcttaagggtgagaaagagaaacagggccgcggtaagcacgagaaagccgacagcatcatacatccgatggaaatcgcagaatgcgaccaatgccgcgtacggcaataccagcagcgccaagcaaagcacgaaaccggtcgcgtatcgggcctgaaacgtctgcatatcttcacgaatatcaacttgggtcaatacacgggcctcttcgggaatgccaccgcgcaccgtccaacgacgtgtcatgtaggcacgccattgcacaagataacggtccggcacatgcaccacgatgttcggcagcatttgcagacagcatatggcagcggcaagcaccaaaccggcaagcagccgtacgtccaacgaacacatcagcgttcccgtactggcgagcagcaacagcaacgatacggcaaaacatgcggatatcacgccattaagcaccggctgatcaatgcaaaccgtcattaacgacatattgaggcatacgcaagaagaagataggaaaaccgccgccgcgatcggctgagcgcaaggttcaacgcagctcgccgccacaccggcacacaccgacagcagcacagcgcaagccatggcaaccagcgcaacggtttgctcgtgtgagcgtatgctcaccacgcataaccgatcacaaaacagcatcagcaatatgaggcttgccacaagcagcacaggcaatcctcgcatccgctcgtcgccaccgggaagcaacacgctttcggacagcaccgtaacggcgataccagcaaaaagcactgcgcagacgagcgatacaatgcatatcgcctgtaagtcagctggcttggtttctttgtgccgcatattggctttcccactcacgcagacgagtcattcctttatcgagcgcaacacgagcctgggccgcttcattatcttcgtcgtccgcatcctccacgctatctcgcacataactcatattctgcgcgaggtaaccacgtacttcacgcgcttccggagacttgtcaatgccagcaaggatgtcttcctcacaggttttccccatgtcgatacgctgctgcaatacttgccaagcgcgcccacattcacctttacgccgcttattttcaagttctttcgttttttcggctattttttcatctatttgaactttctctttttcgaatttcgcccgctgcttgtcaagccgggcagacagtgaatccatttggttcatgaaagcttcgaattccgctgatgtcattccacttctcttttcttcgcacataaaattgtcgtaccgaggtcatcgtccgtttcgcaatgcaagtcataacgatgcggttggaaggacatgacgattatcttccatcggacgatccaccggatgccccggcaaacgctacgtcattcgacgtactgccagttccaccgttcgacgtgcctccgccaaaaacgctcagcatgccctctgtttttacggaaagccgttgcataaccatgaggcatacacacaatccgttaagggcttcatacagattgttaagatattccacgatatcggatgcccattgaatcgcctgggtgacttccgcagcgacagtgaccgtagcgagcaccggaccggctccaggaataatcagctcacccgcaataagcttcaacagcgaaatgatttcactcaacgtgtcgaatatcagattcaatgttttttccgcattgtccgccaaagcgttcaacgcctgggccatttccgaacatggctccggagcttccacaagcgcgtcggccaccgcctcattgcgaacaacatatatgtccgcggcctgcccagaccacactgtctcgtcgagactattggaaatttccaataacgccgtctgcacttcaggcagtgtttcagccagcgactgccattttcccgcagtatcgcgaagctcatcccaatcgccgaagaatggtttcctgacccactcatctataggactgacaccaaacaatgccttgcaaatgaagtcaacacctgagatggcaatgcgaagcgtagtaatcttgctatccagcgttttcgccaaatcatgcgcactttgacgagtcaaatccccttccaaagattctgtgaacctttttgacgcatcctcgaacttctggcttttccttccgatgtctttcttatcaaatcctgttttttccaggattctcccaaccactttgtcggctgacgtgtagccaaatttctgcccggaaaggagggctgaggcagcctttcccactttcctactgtcataggcctcgccgactttttgataaaacttcaagtcgcgtttaatgtcgcttaaatcgtctggaacatcgatggtaatcgggccgaaatgcaagtcgttggcagagccatcatcttcttttgcagccatactcttccccttgtgtatagtttgaatgtgatatttacccggttacggccggatatgctttgcacagcatcctgttttattgaatcgtcgtgcgttcaggtagctgaatggtttctctgtcttcgtacaaggcacgaagctcatcctccgttcttcccagaggatctttagctgcgatgctttgccaggcttcatcctcggcttgcttacgcatggcttcccttgccgcttcggaatctccgacgcggacggcgacatcgtaatcgccgtcattgtcgtagtcgagggcaacgtaccgcgaatcttcatcctcatatacgctgaaacgggcattcgcgcctgaatcggagttcatggacacgtcatccacgccatcgttgtccacatccagatcaaacgaagcggatcctgttttgcttgcatcagaaggcatcggaatggtggaattgtcacgctttgtcagagtaacggaaccatccgccccaatcacggcatgcgtattgccatcaatgagattcagagagtagtcgtctttggcgtttccatccacatccaatccaatcgtggttggtcttgttggaagtggaacctcattgaaaatcggataagtgttcgattccgccgcatcacgcgcaccatcagatgttgtttttttctgatcatggccgaattcttgcgatcccgacgccattgcaccagaacctgtcgcagatgatgccggacttcctgccgcttcggaaccatcgtcggatcgaccattaaactgatccactggctgatattgcttgctttgcaaggaatcagctcttgagccaccaccattgccaaagctgccgccatagccggaattgccgcctattccgccatttccctcggaccgtgcgttatgaggatccgaggaatccaacttgtcatccacctgctgaagcagttgcagaatcttcttcagcgcttcaagtatctcctcttcagtggtggtggaatcttctacggtcccctgtatggccgaagcaatcaatttcagcattacttcaacgttggccaagtattcttgcgtagactgcttcgccgcttcatacgccggttccaggcatttgagaatcagcccgaaattcggggttcccgcagacacaaactgcgcttttgccatagcgaactgttgtgcggcctgttcatagtttttcgccgacgtttccagatcggacgggtcaacgcatatgcatgaggaagacactgccttcgctcctttcctgttcaacaagagaacgttttgttcaacgacgtgcggtcatgcgcatagcgcattccgcccatgcctcattcaccgggacgcctgcggtgacctgccatggccgccaacggcttgggctggaattcttcttcctcttcaatggtcggagcaatgtagcccaaggagttgcgcctcttatccttgctctgagacgcaccgccacgccccatacccatcattcccggagtgtttgcacgagatgacgccgcagcttcggcacgcgcaatttctcccttgcgcaatcccgcagccataccggttgcacctttgatcgacgaggatgcaatggacgccttgaccggattgttcgcataatacgaaccgacgccggagccagaaaccgctgccatggaagcttcagacagtgctccggaacttgaaccagctccacctgcgagcttggatacggctaacgctccaccggcaccgatgccagcgccagcgccagccgccaccgcagtacgcccgattccggaacccgatcccgcagagcctccggacatgccgccatgggcggaaccggaaccgttatagctcatatcgctatccacggccatgtggttccgatacacgtagcggcctgtcgccggatcgtatacgtataggttacggtcaagccaacgtccgcttgccggatcatacacgtatttgcttgtgtcgatccattcaccggtgttcgggtcaaacacccgaccattatggctattgttattgtcaccgcccgtatcggcagcgtccgtagggttgttacgtggaggaagaggcggcgtagggctcacgttgggccgggagattgaggccgaacctgatttgggggtattggagaatttcgatgatgcgacagccgcaccgccagcggccgcgagaccagcgccacctgctacagcagctgagattccagtgtcgccaaacgaggtgggatacacaccatcgttttccgaagaattgttttcaccatcctgtgctggccacaggccgttgatatcgacaacgggagcagacggtaaatcatttctaggacacttctgcttacattctgacttaattcgctggtattccttctttgcagtctcctctcgtttatcggcaagcatgtttgagatcaggctgacgccggcatttccaattatcccggttaatgttcctaatccgggaacgacaatattcaatggcgtttcagccgctttaatagcttgttcaatatcactggtcaacctagtgccgggcagctccacattcctcgcatcgtcgatcgcctgattgtatgcgtcaacagtcttaaatagtttacgcaaggctgttggtatgtccacatcctcaataccttcggaaattccttgagcgcattccaaagctaccttttgggtttcgcccccaaaaacataaccttcttcaagttcctttttcatggttttgagtttcgcggcggcatcatctatgactcgttcaaaccgtttgaaatcgtcaaattcctcaatagaccacttggcggtattggcgatatctgacagtttttcctcatatgtttccataaatcttcctctcgtgtcttcttacccgctatcgtttattgcctaggcggcaatggcggttgaggaacgtgctgaccgacctgcccgttcccagcctgcgttggagggtacgcgtatccggccggcgcaccggcgttcggatacgagccagcgacgggagcggaccgcgccgcgggaccgccatacgatggcgccacaccatacgggaccggcggaacaccggccccaccgacggttccaaccggcacggcacggcccgcatccctcgccctccgcatcctgcggaccagcaccgccgccagcaccacgccagccaacaccagcacaccggcacccgccagcaccacgggaaccacccacgacggcaccacggacgaacccgaagcatccgacgccatatccccggcgaccttcccatcctcctcatcggccgtggccgtcgaggaatacttcatgcaatcgctcccgccgtccgcacggcacgactccaccttctcccacgcggcctgctgacgctgcagctcacgacccaccaaggacgcctcgaccgtaaccgaaatcctctccccgttcggagagaacacgtcggtatccgctactccattcctccccaatggggatggatactcgtacatgcccttggtctcctcatgctccccgctggtcttcacggcccattccaggagcgggttcacatccgggtaccgggtcggatcgaccgacagcaacttgcctggatccacgatcccgaaaccacgcttgtgttccggatccagtttcggcccgcccgacgcgttgcccttcgtgttgcgaatcagggactgcaggatctggttgcccgtcgcatccggccaccgctgcatcacgagcgcgagatacgcgctcagattcgccgccgcggtcgacgtgccgccgccagtcaaatccatctcacgcgaatccgtgctccggtaggacggcacgcccacgcccggactcagcaccgaaacgttcccgtccatcacatccgacgactcctgcagattccccgccgaatccaccgcgttcaccgtcaccacaccggggaaataatcagtcgtgcccggagcgcccaccagatcatataggccagcccaagagccattggacctacctgagaccatcaccacgccatggcgcagcgcatacaacatatagtctcggaaaatagcatcactgacatccccatacccgaacgacatattgatgatcctcgcgccggaatcaaccgcatcacgaacactcggacctattgtctgcacagtggattcgttattctgagttctgcaggcaagaggcatattaagctctcccagattgccctttgagtccgcgtccagcatataggcaatcacggaagccctagaagcgatgccttggataccggaaccaccatcccagccgctaccgttacccgcaatcagcgacaccatgtgagtgccatgcgtcatcatgtatccactggacgaaaggaccgttggatcatccgtggaaaccggctcggaggaaacggaaccatcaccggtttccagatagcagggctggccgccctcggtcaccagcttgtacgacacgtccgcgcccgccagcgcgggatagtcggacacaatctgattatcaagcacggcgaccttcacgcccttgccggtgatacccgacgcccatgcgtcgcgcacgcccataccatcgacacgccaatccacaccatccgaagccaccgccgacggcacacacaaccccacacaagccaacaccgccgccaacgccgacaccacgccgcgcacctttcgcacatgcgatgcacacaaatctcgcgtcatcaataaccccttctcgtatggaaataacaaacgcaacacgtcacttaatcagcaaattcaaagagtcttcggcggtagcggaggaatcgaaagcacattcaccacactatccactaatgacagcagcggctcaaacgcctcatcgctctcgttcttcttagaagtctcgtgtatgtcggatgctttaccctttgtttttccaacaacaggtgcagcctcctgaactgttacctcagccttatcgatagaagccacctgctgttcttcggcctgttcaaatattttcgcagcgctgcaaacgcgctgcgagaaactactcatggcttcgcctatattcgctccagttccctgtagcagctgggtatacgcggaagcgctcctcatgaattccttgccaaaagcagtatcgcggctatacgcttcctggccgcaacgccctgcagattcagaaaccgactcgccatatgaatccatgtcattcgctatcgcacgcgcattgtcaacatccgctttgatctcaactaccatacccgatccgctcctcgtcaacacccatattcccaaccggaaagattccgtgtgcgccccacacctttcgtggaacacacacggaatcgcacgacatcagaaacgacccgccgaacgcgcgtcagactccacgtactgctgtgcgatctgtgaggtggcttgggaaatctggccaagaatctgattcatttcctgcaacttgccatcccaattgcgttgcgcctgatgatatgcctcacgagcggaaccgtcccactgaccaatcaaagcgctcacctggctattgaggttttcaagctcctgagcaatgctcttggcatcggcagcgatatcgctcgccaaaacatccacctgctccggacgaaccgaaaaagaacttaccataatatgttttctcctttagctttctagttcaattcgatgatgtcagccaagcaacgcctgcaacttggacgtacgggactggttgtcttcctcattcgcagcctgatccttggctgtaccccgtaggttatccgaaagatcaatgagaatattgttcaaggacgtggccttctcctgccaactggacatcagcgcgttgaacgacacggccgcgtcaccactccagaaagagcccagctccgccatcttcgcttcgatatctttgattcggttctcgatacccgagcgcgcattgtcgaccgcagtgacacccttctcaattgccccttcttcggctctgatctgttccgccatcttgtttccttccttggaggcattctttcttagggaagccacaatgagacacgactcccccaaagaataacaataacagcaataacaaattcagtaaaatttaaattcattaagtatccaaaacccgagatgaactcacgtcaatcgtttgacgttaacttaaaagtcacttaggcatagcaattttactgaaaattaagcaattttttcagaaacaaatgacaatcactgcaaaaatgcaatcatttttctcaatgccttatagttgtattgtttatagacacgatacagcgccttacggcattctctaaggaagagcatgaacatctccctgccaccgctcccgcacggaagacaaaataccccatcttcaccccccatcaatacgacagatacactccaaatcaccgtctcctataaaacgcgcacaatcgcgctgcgggtgaacgacggccccatcatcgccgatcttctaccagacatagcccgacgactcggcatactcgatccgtcgatcgtgtacggagggtacaggctgctcaccagcgacggcgatccactctcccccgcaaagactcttcgcgaacaacacgttccaaaccactccacgctcacgcttgagcccggagcatcatcagacaccgacatcatttacgatgacgtcgtagaggcagtaggcgccagcgtacagcacgtataccgcccttggaccagcgaccacaccacattcacgtcacttgtcatcggcctcggcatgcttgttatcagcgccggatggatcgcgcttttccccgcatccatatgggcatcggttctcgcatttggattcagcgcaatacttctagcgttcacagccgcattatgcggcaaaaacctgctcgtgcaatcaaccgcaatcggactcatcgccagcatttttactgcgattggcggatatcaactcgtcaacctgctcgcaggcaaacagccactgcatgccctgccacttcttggagcgagcctgggactcgccgccgcaggcatactcatgagtctcgccgcatccaaaacacgcccatacagttatattcccattttgataggtgccatctgcgccataccaagcgtcctcagcacactcatgccgcagcagatggggcatatctggatcctcacatcagccgtaaccgcactcaccgcgagcgccctgccttggatgtgtctgtcttttgcaagaatcagcgtagacagtccgcatagcgaatcggaaatcttcgcgcttcctaacgacattgactaccaagacatcaaacgtagatatatagcaggctcgaccatgctcttcatcggacgaatctgcgtcgccgcgctgctgctcatagcggcgccgctcctcaacacgttgggcacgccactcgggtcagcattatgcctcgccgcattcctcggcatgctgctcgattccaggcagatctatacgttccgcgaaatgtgcgtaactgtaggcgccgcaggcataggaatcatcgtgaccggatcgctcagcgtgcaaacgcatcaggaattcagcattccgctgattctactcatgctcgcatgcgccttcgcgaccatactgttcacctatgtcttacgcaagcatacgctattcgccacacgcgtggcggacgccgcagaaaccatatgcatcatgcttattttgccgctcgcatacctggcaatcacgctgtaaggacgctcatggccaacaagaaagaccttgccgaagctcaaagctactcgcgccgcagacttgtcaccgctttcagcagcggcattccagacggcgtggaactcactccgaagaaaaaccagactcccgtaatagtgggtgtagggcttaccgtcatagcaatacttgtcagccttttctacggcatggtaagtccatcattgccagacggttgggagaacaacaagctcatcgtcgcaaaaaactcagcggcacgatatgtcagttcaaatggaacgttgcaccccgtcatcaatgccatcagcgcacgactgctcattccgtcatccgacttcaaagtgctcacggtagccgacgaccagctcaaaaacattcccatcggttccaccataggcatcctcggcgcgccagattcgctaccggaagaaaacaatctcatcgcaggatccatcaatagctgtgtctccgacagcaacgtcacaaccacgctcagcaacgcttcgtctcaagtcacagacacggcaacggcaattgtcgccaatgtggacggcatcagctacctcgtcaacggaagtcaccgataccagcttcctcaggaagcgaccttacgagacgcgttcctcagagcattcggcattcccgaaaccgcttccaccgacgcaaccacacaatggatcaacctgttcgagcaaggaagcccgatcgaacaaatctcggtggacggagcaggcaacagcattaccgtccacggcgttgaagcgctggtcggcagcgtagtcatgcagcaaggcgatgccaagaaaaccaaatatgtggttcgttccgatggatcgctttccccactcaccgattttacctacggcctgtacatcacgggaaaaacggatgaattcacacagccgaacgttctcagcgcggccgacttccaattcttctcaaactccaccgaatccgcaattccggaagattggccctccgaagagctatcggcaacatccggaaacgtctccgcgtgcgcaatctacaatttggaaacggcaggaaggaaaaaagccgacacccatgtaaatttagcagtcaaacaaaacaactcagcacatagcggcacatccaaaacaaacccgtcaagcaataccagttcaacagtgaagctcaaaggcggcaccggagcattactgcaggcctccatcggcacatccgacaaaggctacattttcgccgtggattccacaggaaccgcgtatcccattgcgaatgccaacaaagaaaccctcaaacggcttggatacgccaaaaacgacgtgcaagccattccccgcgcatggatagacctatttagccaaggcgtcgaactatcagcccaagcagcaggatccgctccaggaagcaaccaatccagcgcatcgcaaacaaacgatggcggcaatgcgtcgtcatcaaccgccgatacgaccactgacgcagccactaacgcaacggatgatcctgaaacaggcgccgcatcggcagacgcgcaagcacaatgccaagccggcgtcgaaaactacatcaatgacactccttggaccaacacgctcttcgacttcgaaacactgcaccgtcaatccacgggcaaaggcgtaaccgtggcggtagtcgactccggggtagatgcggataatccacatttggcaaacgccgtaacacctggggtaagtcatatttcaggagacgccaccaacggcatgaccgacatatactcccacggaaccatcatcgcaggaatcatcgcggcgcgtgcagtagacgggtcgtccgtagaaggattcgccccagacgcgaccatactgccgatccgcatattcgaatcgctccacgaagaaaacggaaagcaaaccggcggaccaagcatggaagacgtcagcaaagcggtaatcgaagccgtggaccaccatgcgcaaatcatcaatatttcattaagcgacatcaccgatcttcctcaaatgaggcgagccgtggattacgcagaatcacatggcagtctcatcatctccagcgcaggaaaccggctcacgtcagccagcaccaaggacggacgacgattccccgcagcctacagccaagtcgtaggagtcaccgccgtggatacggatttgaatatcaccgacgattccgtccacggcacccaagtggacatcgcggcccccggcgcatacgttgcctcaaccgtccccggcggcgtggactgcctttacgccaccgacgcagcctcaacaagcttcgcgaccgcatatgtaagcggcgcggcagccctcatcgcctcacaatatccgaatgaaacacccgcacaatggcggcaacgactgctcgtttcagcgaatcgaccaaattccgaccagcgagacaacaacattggatggggactagtggacccacaaaccgcgctgaacatagcgctttccgacagtcttcgaggcccgacttcaacaggtggcatgcacgcccagaataatgccgaaacgtccatgaaaccgcttgtattgcacaaaatccaagatcctgatacgaatttcaaacgattcgtggaagctgccagtatcgccgtgtcttgcgcgtatatggtggcatggcttgtacggaccgcgcgaaagaccgcgcgaaagaacacttcgcaaagtgtatcaacaaatgagcatagttttaactagaataattagatattttcagatagtcatttgaaattaatgccgatctgaacacttattcatagagaaacgaacggcatccgccttatgcagtccctcgcgaagtaatcactcgcccataggaaaagaagatcatattagcgtcccatggcgctgacgcccattcagctcgttttgccaccgtacgacagtccgccggaatacacccacatgccgtagtgtgcggcacgcggatcgttctccaacggaaaccgcgggtcgcactggtccggccagacgatgtcgtccatgcagggtgccgggatttcccgctgcagctgctcgtagtagacgcggtaggcgcggaacagctccagctccgtgtacggctccaaggcgcagtgcatggcgacatgcggttcgcggcccgcttgcagcattcggttgatccacgcgtacaggtaccccttgtagacgaagaatcccggcttgtgggggaacgtgttcatcaggtcgagcatacgtttcgaacatgaaccgttacgcaggtcggcgtatggcgtccatgccagctcgccgacgctgcatgcggcgtattggaacaggttcaggtcaacggtcaacgggaacggggcccttacggcgacccctcttagaccgaatcgtgaaatcatcggatccaccgatcggaaacgataccgtcccccatcggcgaactcgtcatagtacagaggctcgctgtccagaacgacgccatcccagccgtcgcgatgatgggcggaacgacagtagcagtgtttttcgtacagtccaccggtccagccgcgtatcggctcgttccagccgcccatgcacatgtagaccagccatctaggcaggggataataggagcccgtcgagccgacatcctccacccagccacgctcctcaagcgaatacgggtcgtccacctgacgccagccgaaaaaaccgtctcgttccgataccagagacatatttggctcccatctgcaaattagtgagaatggattcggcctgaccgttatggaaaccagcttttgtttgggatggcttgtttggaggcgaaccagcccggactggcagcgggataagccgcgccgccggtccggtcttgtaaggcaatatcacaagagtgatatcagatgcagttatcagaagtagctactaagaatagctaccggaagtggcatttagaaacggcatcagagggacgcgttgaaatcgcgcaccttgagcgtgcggtgcgacgattcgacattgccgcgcacaatacgctgcaacgcgttgtcggcgtccgcatgcgaagccagccaagcatcaccgagatccaccagcgtggccggatcggcatagctcgggtacaggccttccagcagggcctcagccatgtggaaggtcttgttcttccaaatccagtcggcaacctcgaaatacttggccgcgtacggttcagccaagtcggcacgtggagtggaggcgaaaccacgggccacggattccaactgcatgttggtcagctcgtcgttgtgcaaagcctcgttccaagcccattccttggcctccgcaatgcctgcgaccgcacgcgcacccaatgcgaactcacggttctcagtggtttcacgcttggcaagttccgcgtcgatgtcactctggccgatggcgttgattgcgctcagcgcgttgatgatggtccagcggaagttgttgtcgatctccaagccatcaagcttcacggaaccatcgagcagacccttcgcattcgcttcgaacgcagcatcgcccggctcgccataacccaagtaggcggtgatcagctggaactgctcgtcggaaccggcttcggcagcctgagccagcttgaacagttcggcagccacatgctccaccacttcggcacggtcggccggagcggcgtaatgccatgcggtggtgctgacctgcgccagagcgtaacggaacgtggtggactcatgttccgtggcaagcgcagccaaagaggtttcgatgaaccgctttgccggcaattcgccgtcacgagtcatatcccagaatgcaagccaaatcacggaacgagccaacgcatcgtcgaaacgatacaggttctccgcagcgaacttgaggctcttctcgtcgaagcgcagcttcgtgtatgtcaaatcgtcgtcattcaccaaaatcagcgccggacgtgccttgccggcagccgcttcgacaatcgtcagttcgccgtcaacatcaagttcgaactggtcggtacgcacgatcttgccggtttccggatcctcattgtagaagccgacagccagacgatgtgcgcgcagcaccggatgctcagccgaagcggactggcgcaacgcaagctggcgaatcgtgccatcctcgttttcctcaacttcggtggcgatggtgttgatgccggactgttcaagccactgggcgctccacgccttgagatcgcggccggacgtcaactcgagttcagccagcagatcggcgagcgtagcgttggagtacgcatgcttgttcagataattgttgatgcccttgaagaacttctcacgacccacatagaacacgagctgcttcaacacggaagcgcccttggcataggtgatgccgtcgaagttgacgtacgtgtcgttcagatcgttgatcggcgcgacgatcgggtgggtggtgctcagctggtcctggcgcagtgcccagctcttctcgccggagctgaatgtggcccaagcgtccttccattccgtggcttcggcagtggcgagagtggacgtgaactcggcgaaggattcgttgagccacaggtcgttccaccacttcatggtcacgtagtcgccgaaccacatgtgtgcaagctcgtgcagcacggtgaccacgcggcgctcggcatacgcgtcggtgaccttcgattcgaacacgtactggtcgcggatggtgaccatgccgatgttctccatagcgccggcgttgtattccggcacgtaaatctggtcgtacttggcgtacggatacggcacgccccaagtcttcgcatagaaggcgaaacccttcttggtgatgtcgaacaggtagtcgacatccttggcgaacgcttcggcgagcgcctgacggcagtacatggacatcggcacggtgcgaccgtcttcgttggcgtattcggtgtgccattcggcgtacggtcctgcgcagatggcggtgaggtaggagctcatggtcggcgtggattcgaacacccacagcttggtggtttcggcttcgtgcgtgccgagcgtgccctcttcggtaacggtttcattgtcggtcacggatgcggcaggcatgttggaggtgacgatccacgacttggctgcaagcacggaaaaatcgaacacggccttgatgtcgggctggtcgaacacggcatacacgcggcgggcatccggcacttcgaactgagagtacaggtagatgttgccgtcggaagggtcgacgctacggtgcaggccttcaccggtgttggaatactggcacagtgccttgacggtcacttcgttgtgcgcttcgaggttcttcagttcgatacggctgtcggcgaacgcttcggccggatcgagagtttcgccgttgagtacgatttcgctcacttcggtggcgatcaggtcaaggaagctggtagctcccggctcggcgtcgaacgtgatggtggtttcggaaccgaaattcttggctccacgggtcagatcaagtttgaccgtgtaatgaaccggtgctgcgataacgcttttgcgttcttccgcttcgattcgggtgagatttgctcctggcatgtcactccttatttgtgttgagattcctatttattgaataggagacggcgcaaccggttgtgccggttacgccgtccttcttttgattatgtaatcaacaattattgacgatctgtcgatatttcaatattattccaatattgatttcgctggaatcggcgatattgcgaaaaatattgactatctgtcgattcatcattgcgctgcgttcaatcccatcgcttcgtcaacatcctgtgcgatatcggcaacgaccggaacgatcatcggcttgcgatgcagctgacgtgcgacccagctacccaacgtacgacgcatgatctgctgcaacttgtatgtatcgtgcgtgccagccatcatcgcatcctgcaattgctcgacgatctgatgacgaaccttgtcgaattcgctttcgtcttcggccaccgcgttgagatagatcttcggacctgcgacaacgtcagccgtttccgtatcgacgacgacgaagctcgacacgaaaccttccgtgccaagaatacgacgcttctcaagctcgtcctcggtaagttcgccaacggaatcgccatcgacgtacacgtagccgcatggcacggaaccgacaacagcagcttggccgtggtacaaatcgaccacatcgccgtcttcggcaagcaccacattctgcggatcgacgcccgtcttgaccgcgatcatgccgttggccaccaagtgacggttctcgccgtggatcggcatggcgcacttcggcttgacgatgttgtacatgtacagcagttcgccctcattgcagtggccggacacatgcacggcggcattgtctcgattgaccacacgagcgccaagctgcaccagcttgttgatgatcttgtacacgccatgctcgttgcccggaatcagggagctcgcaagaatgacagtgtcgaattcgttgatggtgatgtcgcgatgattgccgtcggcgatacggccaagcgcggccatcggctcgccttgggaaccggtgcacatgtagacgagcttgtcgtcctgcacgtcatgggccttcttcaggtcgatgaccgtgtcttccggaagtctcaagtagcccaaatccgcagcgatggacatgttgcgaaccatggaacggcccacgaacaccaccttgcgaccgtacttgtgggcggcgtcgacaacctgctgcacacggtgcacatggctggagaagctggccacgatgatcttgcgcgtggcctgggcgaacgcctgatcaagagctgggccaatggtggtttccggcttgacgaagcctggaacctcagcgttggtggaatccatcatcagcagatccacgcccttttcgccgagcttgccgaactccaccaaatcggtgatgcgatggtcgagcggcagctggtcaagcttgatatcgccggtatcgatgaggcttccggccggagtctgcacgaacacagccagagcgtccggaatggaatgcgtgacgttcacgaactcaagattgaacggaccgaccttcagcttgtcacgccccttgacctcaaccagtcgcggattgatgcgatgctccttgcacttggcttcaacgaaagccaacgtgagcttggaaccaatcagcggaatgtcggggcggagcttcagcagatacggcacgccgccgatatgatcctcgtggccgtgggtaagcaccagagcctcgaccttgtcgagacggtccttgatgtagtggaagtcaggcagaatcagatcgacacccggctgctcctcttcggggaaaagcacaccgcagtcgatgagcagcaggtgaccgttgtattcgatcacgttcatgttgcggccgatttcgcccaggccaccaagcggcacgatgcgcatggagcccttacggtacttcggcggagcgatcaacacgtcatcctgctggggcgcggtggtctgcggagcaagacgggaattgcgacggcttccagcagaagagcttgccgcgctggagttcttggaacctctggagttcttcgtgttctttgcggccttcacgtttttcgtgctcttcgagcccttggaggagccgctgccgttgccgcgagaaccgccacgaacggaaccggacgcatcgcccgcacgattgccacggccaccgccacggccagaagacttcgccttcttggaagtcgtttcagccttgctgaccttctcagagctcacagacttcacggattgcacatccgcggtctgcgtgttttcagtgcgcttggcagctttgctgccgcgcttgtgcgtagttactgttttggtttcttctatagccatttcctagttggatttctattactaattgtctccgcctgtgcggaaacgaggaattcagttagtttgccgtattacggcaaacccagcaaacttgtgatcgcaacaatgcccggaatcagcgcaatcgccgacaatcaagcgcttcgcaatcacaagtttcgcaatcacaagttcttcaattacagcaagccggaagcgcgcatgccatcttccgcgcgcttgatctcagcctcgcccggaccgacgttcggcagacgcatcgtcgtggagtcgagaatgccacgcaccttcaacgaagccttggccataacagcctggaaaccgttgccgttcattgcttcgaccagtggagcaagctgcacggcaatgcgctgagccccatgaatgtcaccgcggtcgaatgcggcagccaaatcgcgcatcggaccggaagcagcatgtgcgatcacggaaataatgccgactgcaccaaccgaaaggaacggcaggaacagaccgtcatcgcccgaataccaagtcaaaccggtttccatacgcttacgcacggcacccgcgatatctccggtggcgtccttcaccgccttgacgtgaccaagctcagccaaacgacggtaggtttccaactgaatgtgcagaccggtgcggccaggcacatcgtaaacgataatcggcttgtccgcggaatcattgaccgccttgtagtgacggaacacgccttcctgcgacgggcgcgaatagtacggagcgaccacaagcaccgcatcggcgcccgcctcctgagtctgctccaccatgcgcacggtgtgggcggtatcgttggaacccgcaccggagataacgggcacgctcaccacatccttgacggcctgaaccagctcgaccttctcctccatgtgggtggtgggagactcgcccgtggtgccattgaccacaaggccatcggcgccatcggcaacaagctgcttcgcaagcttctgcgcggcctcgaaatcaacggaaccatcggccttcatgggggtgaccatggccggaagaatacgtccgaaaggagcaggatcaagaagatgcatagtaccgtcagtcatagtgccaacggtacttcccgccacggacgccgaagcgcccgagttcgcgaccatatcgcaatatgaactgccttccagagaccaaaatcccccacccgctggaacaatcctcccgttgccgagcctcccagagtcccgaaacctccagtcactggaacaatcggtacgctaaacaacccctcacattcccaaaacctccacccgctggaacaatcctcccgtcaaccagcctcccagagacccaaaacctccagttaatggaacaatcctcccgctgccaagcctcccacagtccaaaatcccccagcaagtggaagaatcggtacgcttagccgcatactcaggggggattcaagccaaatgacttcacgattttgatctggtgaccgcacgatttcggaatatcgcacgattttgctttcctgaccgcacaacactccaaaacagtgcgatcaccaagagggaaagtgcgcccaccaaaacaaactcaggcaaggtattgggtggggttctgctcgaacttggcggcgcagcccgggttgcagaagtagtaggtggtgccattgtattctcgggtggctgcagcggtggccggatccacgctcatgccgcagaccggatctttggcgggcgcgctctgattgccgttggcagtgtggccgccacagcaggagtgcgcgccgcccatgccttccataccctcgtgcataccttccttcttggccttgtgatcactgaacagtcccatgatgaatcctttctgactatggttgttgtgattattatcgttcgggttcggctggcgaacctgatacgtcttatttgcggcacgcaccgccttgtctggatcgaacaggcgcagtcggctcgcgttcgtcaccacgcatagcgacgagaatgccatggccgcgcccgcgatcatcggattgagcatcatgccggtgaacgggtacagtacgcccgccgcaatggaaatgccgacgctgttatagccgagcgcaaatccaagattctgtgcgatattgcgcatggtggcgcgggtcaagtcgagcgcatgcaccaaacccatcagcgagccattcatcaatgtcacgtctgcggattggatcgccacatccgtaccggtaccgatggcgaatcccacattcgcgcgggcaagcgccggagcatcgttgataccatcgccgaccatcgccaccgtatagccttgcgcctgcagtttcgcgatttcgtccgccttgttctccggtcgcactccagcgatcacgttgctgacgccaacttgatttgccacggcacgcgccgtcgtttcgttgtctccagtgagcatcaccacgttgacgccacgcgatttcaaagctgcgatggcctgctgcgaatcggctttcaccgtatccgcaacggccacgattcccgcaagctcgccgtcgattgctgcgagcatcggcgttttcccttccgccgacagccgttccatggttgcgataatgtcgtcaagatcctcgttgccgacactcggcatggccacgtcaagatcgtcgatcagatcggtattgccgaccgcaacgttgtacattgcggtttcgggagaagatatggatgattcgaaggtcacggaagatgcagaggattcgtcagctgcaacagtcggattatttgcagatattaacggcaacgcgacgtgcgcagtgacgccccgaccggaaatcgcacggaattgcgtggtctcgcctaacgtaagatgcctctcttgcgcgcccgcaacaatcgcggcggcaagaggatgttcggaatcccgttcggcactggcggtaatcgccagcagatcatccggcattttgcgccattttccaagcggaagcacgtcggtcaacgatggctttccagcggtgatcgtgcctgttttgtcaagcacgacggcattgattttgccgcaggtttccaatgcttcggcggaacggatcagcacgcccatctgcgcggcacgaccagtcgaaaccgttacggaaagcggcgtggcaagacccaacgcgcacgggcatgcgatcagcagcaccgaaaccgcagccaccaacgcatgcaccacgcgtggttccggcccaaacgcaaaccacaacgcgcacgaccacacggcaatcagcaccacaatcggcacgaaaatgcctgaaatcttatccgccatgcgctgcaccggcgcttttgaactttgcgcggattgcaccaatccgataatctgcgcgagcaccgtgtctttgccgactttcgtggcacgataccgcagcgatccagtgccattgatggtggcaccggtcacggaaccgccggcctgcttcaccacaggcatggattcgccggtaatcatggattcgtcaacagccgacgaaccagcaataaccacaccgtcaacaggaagttgttcgccggggcgaatcgcaataatatctccgaccgccacctgctcgaccggaatttcctcttcaatttcacctcgtaccacgcgagcgtttttcggctgcaatcccgccaacgcgcgcatggcctctccagtaccgacacgagcgcgcgcttcaagcaattggccgaccagcatcagcgtaataaccacaccaaccgcttcaaaatacggttcgcgagcattctcaggcagaatctgcggaataaacgtgaccacgcacgagtaggcaaacgcacatacggtacccagactgaccagcgcattcatttccggcgaacggtgaataatcgccgcgaaaccactgcggaaaatcggtaatgcggcatagcacatcaccggcagcatcagcacaaattgcacccaattcggcatcggatacagcatcaacatcgtcgaaccgaatactggaatcgtaacgatggctgacacaataagacgcgcaatcagcgttcgcatctcacgagattcggaagaatcgtttgacgaatcagaagaatctgaagaaatattggaagattcagcggattcatacgatttttcatcaacaacagtttgttgcgattgcatatgaacgtgagattcagcagtattcgtgctctcttccgattccgaatgttctttcggcattgcggcatgatgttttcccggcaccacccgtaatgtgccatgcagcatgttcatgccacatgcgaaaccgtactcccccggttcgttagggtgaagcgtcaatgtcgttgtgcggaaagcgggcaatgccaggtcgacaccgaaatcggagaacaccacgtgcgacgagcattcaccgtcttctttgcgatcgaatatcaatcgcaatggcaaaccggcctcagcttcgatgattgccggactatacccacctttgacttcgacaaccgcctcttgcacgccgttatcgacacgagcgcgaaatgctttgcgcggcgcgaagaagaaccataacacggctgccgtcacaatgaacgcgacaatgacggcaatcaaagcctgcatattctcaccaaccttattcacgttcacgtctcaatgactatcatcacaatatacccctatagggtatatttgcaagagaaaagcggtatcttcagcggtaagatcaagatttcagcgttacgaggagcagcatcatgaacgcaacccatcacggatacgcggacgaccagaagaaaatcatcgcgcgcctcaaccgcattgaagggcaagtgcgaggcatacgccaaatgacggaaaacggcgaatactgcatcgacatcctgacgcagatatcagccgtgaacagtgcgttgaaatcggtagcgctgctgctcgtcgacgatcatctcaaccactgtgtcaaagaagccatcgaagagggcggggaagtttccgaagcgaaaatcgccgaggcaagcgcggccatagcacgcctcgtgaaatcgtagaccgcaaaacatgtcaatccccgatccagcaagcgaaaactcaccatcgccgccaaatcggggattgtatgatcagaccggaaaagttccagaccccatagatttacgaggtagatttacgaggtagatttacaggtcgaggaagttgtcgaggccgacggtcacgcctgggtatgcgccggtggagaccttgcgtacggccagcagcacgcccggcatgaaggagatgcggtcgaagctgtcggcacgaatggtcagctgctcgccgtcattaccgaacagggcctcctcatgggcgttaagaccgcgcagacgtacggcgtgcacgtgaatgccgtcaaccacctggccacgggagccgccatcggtttcggtggcatccggcacagggccaagacctgcggccttgcgggctgcggcgatgccctgcgcggtgtggaatgcggtgccggacggagcatccaccttgttcgggtgatgcagctcgatcacttcagcggattcgaagtacggagccgcaaccttggcgaaatagtcggcgagcacggcggaaatggcgaaattcggcgcaatgaacacactctggccctcgcgaggcgcggcagcgagcgcggcacgcacctgatcgagcttctcgtcggtccaaccggtggtacccaccaccacgtcgacaccttgcgccacgagtgcgagcacattgtcaagagacacgctcggcacggtgaactccaccaccacgtcagtgttgccgggggtgatttgggtgaggtcgtcgccggcgtcaagcgcgagcgccaattcggtgtcggccgcgttgttcacggcatcgaccacatgggaacccatacgtcctttggcgccaactacagaaaccttgatcattgcagctccttcaagcatgtcgcacgtacgagcgtacgaacagcatttcaaatcagtctcactcattctactgaggaatgttccatttacgaatgtaaagagacgcttcgacgcgtcaccgcccagccgatcaaggcgaacggaatcgaagcgagcacgaaaatccatggcagcatcagacttatgtctgggctgaaatggtcgagcatgattcccgtggtcatcgaaccgaatgacgcgccgatggttcccgcggtgctcacccacgcgaggccttcggtcagcgattcctccggcacggtctccttcataacgagattgcccgaagcgaacaccgacgaaacggtaagacccgtaaggatttcaaacactcccatcataatcagattgccttggcacatgtgaatgatgaagaagcctaccgttatgatcgcgaggaacgtgatcatatggcgccagcgggagcccttcagctcgcgcgtgccgaaaaacagcgcgcctatgcacgagccgaccgccaacatcgcaagctgcacaccaagcagggaatcaagatgcaacgctttcataacggccgtcatcgacgtatcgaatgcggtgaaactcatgttgaacacgatgaataccatcaaaagcggaatcacgcccgcataggtgagcacattgcgtttcttgcgattgtcattcgacttcaactgcgcgacggtcagtttgtcttgttgtttgtcttgttgcacggaatttgcgccgccattatttccagtattgccgtcaaccgccaatcgcacgtccgcatcgtcggaagatgccgaaacaacagtgatttcacgtactaccggcggttgcgtgtcacgcaatgcgaagaacaccgtgccgccgatcgcgcacgcaatcgtcggcacaaacaactgcgaaacgggatgcacggaagccgccaggaacgcggccagaatcggtccgaaaatgaatacgatctcatcgatggcggattccaatgcatacgcagtgttcagcaatgagccgttgccggtacggtcaagcacatacgtccaacgggtacgcacaagcgcgccgaacgagaattgcgtgagccccatcaccacagccaaggcgaacagcagtggaatcggcacgcgcaccaatgccgcgaacgcaaagccaagcatggcgatgatttgcacgacaagcaccaccgatccgaccttgcgctggccgaatcggtcgaacagtcgtgcgtacagtggcgtgaccgccgccgtggaaagcacatatgccgcgctcatcacgcctgcgatcgtccaattgtcatacaaatggttgagtgcgaggataatgccaaggctcatcatcgacatcggcagtcgcgccaaggctccggaagcacagaacgctttggttcccggaatggagaacagtacggaatatggcgacttcgggatttcggttgcgctggtggcagccatgattatcgctccttaactttcgttgcgtccggcacgtgtgcccgcccacacatgctgcacgagggtagcggcgctcctccacaacgctgcccatagtgcgttaccctacgggcaggctggaaagcgccgcacgttcggcgcaccagcactagtcgttgtcggattgttccggaattccgtagctcaactcggcaaggatctcttcttctgttttgtcgacggcattgagctgtcgatcgccctcaatgggttcactcagatagtagaggcaggcgtcgatagcggtgagcggtacgccctccattgccgacagcaagatacgatacatatccaactgtgctaattttttctgaatttcctcttttttgcgaggtttttttccagttttccaatcgacaatagtatattgtttcgaccgatccgtcccatcgagacccccgaagaacaccgcgtcgagcttgccgttgacgatggtgcccaattgcggcacgttgacgacgatttgccgttccgcccacgcgggcttgcgccgtgcccatgtcgacgttgcgagacgctgttgccaatcgaatatcccgttattgtctgccccattatcgtcttgattgtcttgcgattgcgccgcattgttgcgtcgcagctcggcaagcatcgccaatcgcgattcagctacgcgagtaccgccattgccgctcgcgccaacgccaatgccggcatcattcgcatcggccatgatgaaccgttccgcccaagcatggaactgcgtgcccagttgcgcggccggagacgctacgttcggtatcggacgcaccagcccacgccagtaagtgcgggcgccacgctcgtccatcatgcctgcgcgcgcctgcagcgaggtgacgttctgacgaccggatgcaagaatcctctcgcccttcgcacgcaccgcgctgtcgaacgcatcctgcgacgcctctccaagcatgtcaggcatgagattgctgtcggccaccagcaattgcgcgcatcgcagcagcgaagcacccgtattttcgcaacgcccagcaccttcgccaccgacaggctcgccaacttgcccgccggcccgttcgccagcccgcccatcagtctgcccgccagcattgttcatcgccgaatccacctgcaacgcagacaaacgcaacgtctgcagggtctcatcgctcaactcgcacggccatggcaggaactggttgccttccgacggctcgagcggcgcattccaagcgtcgccgaccaccgcatcttcaaaatcgcgggcatgctcgcccacaaaaaatccatccggcaacggcgcatcgatcgaatgcagactggtcatgccgttttcggaggaatcgatatcctcaacttccgcaatatcggccaggttgctcggctcagccgctctggaaacgatattgagcatggaatcgcgcacctccactaggaaattcgacggtttggacacacgtttgcgatcgcccacggcacgcggatcacggctttccgcattcgttgcgctgcaggtgagcagcgcctcatgacgggcgcgagtcaacgccacatacgcgaggcgacgctcgtcggcatgcaaccgacggccatactcctcgatttgcgtcaaatacagtccgtccggatcaataccttccatgtcatcgacgctcatattccgcaaggtgccgaacacttcgtcgtcaatgatttccgcatcctccagcatttccaacgcttccaacggatttccacccacaagcgcgtcatgggggaatcgcggcagaatatcggcgtccacacgcaccggaaccggcaccgcagcaggatcggtcagccacgttttggcggtctcatgatattcgggcggcgtccacacgccatcctggaaaccgttgagatgctcttcatcaacgaccacacgcagatcgctgcccttgttggtggggaatccgccatcggtcatgccgaccacggccacggcatcccattcaaggcccttcgactggtgtacggtcatcagcaccacgtcgacaggcacatcgggagccaccgcgttctcctcgcgtgcgtcgcgcagcgaatccgcccatgagatgaacgcgcgcaggctcggcgttccctgcgacgcgatctcctgcatatacgtgtcgacgagcttcagcaacgcatcgatcggcgatttggcgagcgccacccgggatgcggcgagcgtggcatcggcctgaccgccgcgcatatgctcggccagctgcatgtcgatatcgagattcaatgcgacgatggcctcacgaaccacctccggcaacgggtggccaagcatgcgctgcacctgacggatcgcatccgcggcgcgaagcacttccttcgtcccttcacgactcaccctgccgtcaatgagttccgcgagatcgtcacgcaacatgaggtccacaaggaaaaccgcattcggcacttgatctcgatattcacgtacgatggcatggatttcagcatcggaaggacccgacttgggagttactccataaattcccagattttccggtttttcttccttgttggattgctcctgcacgattccagccgaaacaagcgcacgataccggcacatcgtgttcacctgttccgcggtatcggcgagcgcctgcagatcgttggcgctgatggagaatcgcggcgtggccagcaatcgcataagcgccgcactgtcggtatgatcgctgacgacgcgtagcaaagcgaacacgtcctgcaccgccgggcgttccagcaacgccgaccgccccactaccagcgtggtcaggcctgcgcgttcgagcgcttccgcgaattgcggcatgattcctttggaacggaacagcaccgccacgtgcggacgattgtctttcatgccattgtcgaggtcgcgcgaggaaggcgtgtgcagggcgatcgcatgtttggcgaagcgcacgaccgcgtcgacctcctgcccgaacgtgtcgaacgcaagcacgcccaccgttccttcgggggcttcgccggtattgacgagcgccggaacgtcgacttcgcgcatcagcgagctgctgaggcgtctggcaggcaagcggagcggtttggtgagattgttcgccgcttcgagcaccatgcgtgagttgcgccgcgtcacggtcaatgcgaatggcctgctggtggcgtccatgccgaaatcgtgttgcagcatgcggaatgcgccaggactcgcccctcgccatgcgtagatcgattggaaggggtcgccgaccgcgttgaccgcgctgcgatgcgtgtcgtcagcgtggaacagcgcgctcagcagtgccgcctgcgtggtggacgtgtcttggtattcgtcgaggagcacatgcgaatagcgtttgcggtaggccgctccgatggacgggaatcgggagacaagctggaatgccgcgatggtgaaatcgctgaattccgccatattgcaggcgcgtttttcggcatgatagtcaagcacaagatcgagcagcaggtcgcgttgcttggcgacgaatgcgagttgcgcgctgttgaacacgcacatgtcgtgcccgagttcgcggtatttctccagtttcttttcgtagtccgcgtcggaatcctttttcagtcgtttcggcagctttggcgatttcggctcttccgttggcacggtttcgccgtcaagcgccttggcgatctgttcgacgaacgcctcatcccagtcgcgcacgcgttgcacggcttcgtcgaagctggtgcagtcgccgccgatcatggcgccggaaatggcgttggacagggcgaacacgttgcccgctatggtgttgaacgatttcagatcgccgtcgaacgccataagatcatccatatgcctgtcaagcacggtgtggatgagctgcatggcacctgcttcgctcaatggctgcgtgttctggtcaaagccgacaagcagtccatattggcgcacgatggattggaagaaagcgtcgtacgtggagacttccggtttgaggaacgtcatgttcgctgatttcaggccgcgttcgcgctggtcgcgagtcacggccgcagacactcgagacaatagttccgaggccgctttgcgcgtgaaggtcagtccgaggatcttttcggggctcaccccctgttcgatcagcgtgatgatgcgtctggtcatcgtgtaggttttgccggatccagcgccggccaccaccaccacatccgcatacgagggcgcttggacgacggcagcctgctcaggactgtcggtgaacttcatggttccgctcatgccgttctcctttcgaatacggtgttctgttcgcccgcacaggccgggcagatcgtagtgtttctgcagtatttcacatgttccgtcgtcggtcttgcggtgatttcgttcgccctgctggccgcggccgcatagaagaccctcgcgatcatggtgagggaccataccgccatcgtgccgcgtaagccaaggaactcattccaatgctcgtcgctcacttccaacggaggaagcatgtcatcgagtccgtcgtggaaatccttgtcgagttttttgacgtaatagcgcggtatgaattcgccggtattgagacttccattggcgaacagcgcctgctgcatatgcgattcggcggcggtgtcgccatacggcgcagggtatgcgtgcttggctacatggaatagcgcgctttgcgtgatgttcggcgcgttcgccaccgcctgtgccccgcgcatgccgctttcctcggggaatacgagtcccagctgatagcagacgagctgcagatcgttgaacaggccttcgccggtcggactgacaccggttttgtagtcgatcagacgcacctgctgcgtgccatccgccatttcacgccgttccaaacggtcgatcctgccggtcaaacgcacggtgagatactcgctcatgccggtttccggccatcctccgaccaacgctcccataatggcgatcaattcgttccgtgaaatcgcgtgaacgccgtccatcgcattgtaggcgtcgagaatatcgtcgaaatcgaattttgcggtaaatttcagctcaggttcggctttcgtaagttttccaacgctgaatgcatcattatttttaatcggataatcaccatgattcgattgcacgaaatacgtggcgatgttacgcaacgcctcctgcgcctgctcatctttcttcaacgcctgataccgttgcgcgggatcggcaatggcgttgaaatcgccgcatagacgcttgtattcggcatacatccattcggtgatcgcattgatattgtccacgtcgctgatggcggtatggtgttccggcatatcaagtccggcttcggtggcctgttgcgccaccttgtggatcagcgagccgaaactcgtggcgacgctgcccatgcgcgggccggagaagcggttttccaacatccaacacaccgggcacgcccacagattgtctaccgcagaaggagacaaagtcaccacgtcggatcgccgcgatttaccgtttcggcccgacgtcgagctttccgacgtgtcgctcatgcccgtccgcatgacggccgcgatcttccgcatggtggcctcgaccgtctcccccataaacggccaacggtcagggtcggccgccgtaacaccatgcgaagccagcaatgccaacgcttccgcggcatcacgcgccttcgggctgtcctcaggttccgacgcaagcacgcttcgggcggccgcgaccagaccacggggatcggtttccagccccgcgtaatcgccttggccgccgaccgacgcatattctcgccgttccatatcggcatcgcgatcgcggtcgaagcactccggcatatatccgtatagaaaatccgaaggcacattgtcgtcattcagcacggcgctcaccaccacacgctcgctggcacgggtcaacgccaccaacaggctcttctgctcggaggcgagcaccgacgccagttgcgcgtcctgcctgcccgccggagtgacgatcgtgtcggacaatacgccgtgcagcatcacatcggccagttcctcaccgccgaacaacgtgttgcgtggtgtgagattcggccactgcccctgctgcaaagccggcagaaaaaccagattccagcgctttcccgccgctcctgcgggagtcgtcagggtcaccgcctgatcaatgggcgcggtatgcgccagcgaatccgcctcaatggtcagcaaacgcacctgttcgatgaacgcctcgatggtgtgtaccgcgaattccccgcttgactcgccgcctgaagcatagttgaacaaacgcatcgccgcgtcaagccgatcattcgcggcacggccggcagccgaatgctccagcgccacacgctgccagacttccgccttgccgcaggccctccatgcgcaatccaacacatattgcggttcacgcgaaaccagtttggcttccgactcgcatgttttgtcaagaaccttccacaatgatgcgaacgccttgatctgcggatccgcgcccagcacggaggcgatcgcatcgaccacgcgatcggcattgccctccataagaagcacgtacagcgcttccatactcagcgcgaaatcgccttcatgctcgtcttcatgctcactatcatgctcgccatcggcgcgaatcgcatgatagtccgtcatataatcgcgccaatcttccatcaaacgagggagcaacgcctgttgttcgacggcagcgtccgccgcatcctcatcatcttcgaaatcatcttcaaagtaatcttcgaaatcatcttcgtcgtattcttcggcagcatcctcatcatggttcgcagccttgctttccacaatcgaagcgagcgaaaccaacgcgttcatcgcggattcgatggatgcgagacgggccggacgcccctcatgccgttgatcaccaccgaccgtaatcagcggagatcccataatcaacgccacgcgcgaacgaatataggatccggcggtctgcaggtccatggtcgaagccgcgatcgtctggtttttcaattcggccaactcgatcaacgcgaacagaccctgcacgaacggctcatccttcaacggccgggtcacgctggaatagcgcacgggaacgccgtcagcgcgcaaccgctcgccgaatgcgcgcacggtggcattgtcgtgcgcgatcacggccatgtcgttccatacacgggaacgttgcaaatgctcagttttgatcttccacaccacgtcgtcgagctcttcggaagaggaacggtacaaggccgtttccacactgccgtcggccggcgtgacacgagcgcccgtatcgtcggccggcaacgtttcgatgggcatcgcgcctggcatatcgctcattttgccgggacgatcgggcagaggcacgtccgtcgactccgtgcttgcgatcgacaggctcactcgcgtcgcgacaagcgtgcgatagtcgccatgcatgccttgctggttcgacacggtttgcgcggtatcgccttcgtgcgccgtttgcagaccttcgatgcgttcaagcctcgctcccatgcgcgtctgcgcctggttgaacagatattccggatatgatcctcggaacgtctgcacggcttcgtcgggattgccaaccaacagcaggcgcaccccgcgttcatgcagggcttcaagcagtgcgaaaccagccaacgtcgtatcttgaaaatcgtcgacgatcagcatgttcgcaatatcggcttcctgtatgccagacacggcttcggtggcgtcgatcatcagctgcgacgcgtcgagacgatattcgccaggataagacgaacggatcgcctcattgtattcctcacgcaaggcgaaggcgagacgccattgagtgcgcaggcgttcgcgacgttcgtcaagcatgccgtccctgctggccgcacgggcgatcagcatgtcttcgaactgcggtttcgcgccaatctcgttcatgcgtgcgagcatgtcgcgcaattggttggcgaatgcgtcggtggaatcgtcggccaccagtcctgaccattcggaaaccgcgaaataggtgcgcagcagatcgcaggtggcgcaatcgtcgccatgttgcctatgctccacatgcgaagccagtaccttgcggatgatcacatcctgttccgcaccgttcaacagtttcggcaacggttcgccttgacttgatctcacggccgtcagcagacggaatgcgacggcaggcaacgtagtgaccggtcgcgcctgcgacacggccgacaattcgcggatcgcccgatcgcccaacgcatcggcgatctgcctgccagacaccgtcatcacggcattcccgtcaccataccgcctcattgcggcaaccagcatgcccagcgcaaactcggtttttccactgctcggcgcgcccgcaaccaacgtgacgcggtcaaggtcttccaaattcatcatgcctcccaacactactagtctcgccctcctttacctgacaaatccggaacctgcaaagttgtctcgaagccaacctttatccaacacaatctgcggtgcaaccactccttcgtggcatctgcagcaacgccgacaacacatcaatggtcatttccatttgagccagatgcccgtcatccagcaactgaatgtatgtactctcatcgtcgccacgaaggccgtctcttaaggttcgcacgttctttctatcactacgacttctattattcagccacaacatgtctcagatgcccgtctttgtatatggacattttgaccccttgctgataggtttctgggttggtcttcagttaggataggatccagagagagagcggccgaaaagcatacgcaccacgaggaaagagagcatatggaagccatgaacggcattccccctcaaatccctgggtatacattcgcccaaaagttgggttcaggttccgaagcgaacgtgtatttgtaccagcagctttcccccagccgacaagtggccatcaaggtcagcaagggaacgctcgatccgcgcgcggcggcgcggttccgttccgaagcgaacttcatgggcaggatctcctcgcatccctacattctttcggtgtacgaaagcggcgtcaccaccacgggcaacggctacaccgtgttcgaatacgctccgggaggcaattacaagaccttcctggaatccaacaggctcaacgcagaccagatgctcaccgtcggcatcaatctggcgagcgccctttccacagcgcaccgcgaaggcatcatccaccgcgacatcaagcccagcaatattctcatcaacacgcatggcatgcccatgctttccgatttcggcatcgcgggaacgatctacgggcgtcccggcatcggctacaccatcgcgtgggctccgccggaagtgctcgcaaagaacggcggaggcaacgaatcctccgatatttattcgctgggagcaacgctgttcgccatgctgacgggccagtcgccatatgaatacggctattccgcagctcttggcgcaacccgaggcaaagagcgcggcgctctgctgagaaacatcattctcaccgatccgctccctaagctcaataggccggatattcccccgcaagtggagcggatcttgcgcaaggcgttgaataaaacgccggaagacagatattattcctcatacgatttcgcgcgtgacatgcagcgtgcgcagcaggaattgtatggccatgccacgccgaccacggtcgaaggcgaaccgccgttcccgcaaaatctgtacgcacagtcccaggcaagcagccaggcagccgcggttgttccgaaacagcgcagcacttgggccaagcctcttgcgatcgtcgtttcggcggttgccgcgatcacggccgtcgcgttggcgttcgcgtatgtgatcttgccgaatatggattcggcttccgacaatagcagcgtgcagatcaagactccgggaacgcacgatcaggacaacgattcgcctgattcggccatcaccacaagtagcgtgcccagtgtcgagaatctggccggctcatattccgccgatggcggcagcgtgcagttcacatgggtgaaccccgaccctcaggacggcgattcgtacgcatggtcgctggtaggcgatgcaggagtagacccgaacgcccaaggaaccaccaccaccgacacgcgcatcagcatcaaacccgccgacggctcgcagacctgcatccaggtgagcctcatccgagcggaccggcagatgtcgcagaatcctgcgatcgcgtgcgcggccaaaccataagcatcacagcacttcccaacagggtcggccgacggcattattccatcgcaggcgatgtccggaacgaacacaacgaccatcggaacactcaaggaagaaccgaaaatggacaaacgcaagaacgcagccgatcagccggcacaatcgcacgaacgtcaattgcgcttcggatcgatgatgcgcaaactgctgttgccgtcgggaagcagacggtggatcacgccgatcgtcatgctgcttctgctgctgggtatcatcgcaggcgcgttcatcgtcagttcggtgacgcaacggcatgtgcaacttgacgacggcaccgtgtggatcacgtcgctgaaggaccgcaaagccgcacgattcaatgcgaagaacaaggatgtggacgccggagtctcatccgcagcctcccgtttcgacgtggcacagcatgatggcgacacagtgatctccgaagtcaccaaagccagcaatatcgcggcttccaccattagcgaaaccggcaacaccgccatcaaaacggatatcgaaaccattatcggaggcaataccgcagcgttcatcaacaccaaaaccggcaatgtgtgggtgggatccgctgccgatgtgaaatccgtcaaccccaccaccgacaagccgaacatgaaactgggatccggcggaaaaatcgcggtgacgcatgacggaaccgtatacggataccgaacttccgatggcgcggtgctgagcatcaaagggccgcagggcacgcgtgagcaagtcggcacgatcgaaggcgccccgcacgccgaatcgttcaccgtcatcggcaaaaccccggtggtggcggcgaaaagcaccgtgtactggccgcagggaagcgcgaccatcaacctgcagggcgatatgacgctgcaggccccctccacggacggcaagcagaacggatgggcggccgtggcgacgccgcgcggactcgcaacggtggatctcaacaccaaaaagaccgcggaaacaacgaattccggcaagggcgaggccgcccaaccggtgtccacaggcggatgcgtgttcgccgcatgggcgcagaaagccaacaattacgccaaagtgtgctccgtagacggttcggatacggcattcgacaccctgaccaacatcaacgccacttcggaactgatattccgcaccaaccatcgcctggtcatactcaacgacgtggtcaacggcaacgtttggaatccacaggaatccaccaaggtcatcaaaatccaatggaacaaggtggaaaccaaacagtcgaagcaacaggaacagaacaacgacagcgccaacaaccagcataatttcagcaagacctgctcgtcgcaatccggccagatcaaagccgaagatgattcgttcggcgcgagaacaggatcgcagcagatcctcgacgtgctccgcaacgacgaacagaccgactgctccgtactgcgcatcacctcggtaagcgcccccgacggcgccaacatcagcgtttcccccgtatacgacggacgatatctgcagctcgacgcttccgcggcatccgaaggatccgtatcgttcagctatgaaatctccgacggacgcgggcaaacctccaacgccaacgtaagcctcacactggtaggcggggacgacaacgcgccccagcaaaccgatacgccaccggaaatcgacgtggaacaaggagcgacctacaccaccaacgcgctgggcagcttctccgatcccgacggcgacccgctcaccctcgtatccgcaaccccgcaaaacaccgaccaggtgaccgtttccacacgcgccgacgggcagctcgtgttcaacgcgggatccatgtcttccggacgcgccggcatcgaagtgaccgtttccgacggccagcagaccggcaccggcatggtgtatttctcagtgaaaccggccaacacgctggccgcggtgatcgatccggccgtcaagcagaccacgccagacacccgcaccaccatcgcgctcaaacaatacgtgcatggcacctcggccgaacccgcgcagctgaccgccgtggaaaccccatccggcgcatccaccaccatgaacgccaccgatatgtcgttcaccttcagcgcatccaaccccggcacctactacgtgccctacaccatcacacaaggatccatcccctcgaccggcctggcccgcatcgaagtgcaggccgtggccggagactccgccaagcccatcgcagccaacgacgtggcactgctcggcgccgacaacaccgcaatcgtggaaccactgtctaacgacgtcgacccgatgggtggtgtgctatccgtgaccagcgtgaccgccgatgcggcgagcggcatcaaaaccggcgtcgtaagcaacaagcgcgtctacatcaccgcacggcaggtaccgaccgagcccgtgcagatcaaatacagcgtcgccaacgcggcaggcacgtcaaccggcgtgatcgtactgcagccaccggcactgaccacctccaactccgtgccgaaagccgacaacatcaccacgcaggtacgcaccgacggcatcgtctccatcgacgtgctcgaccacgtgacctactccgacggcaccacggtaagcctgcaaaacgacctgcaatacgacaaaaacacgttcaaaggactcgtattcgtatcaggcaacaccgtacgataccaagcatccgaccaaaccggatccttccccgtaacgtacaccgtcaaagacaatctcggcaacgcggcatccgccacaatcaccatcaacgtgcatcaaaaagacgcttccaacaaggctgcgccaacaccatccgacgtcgaggcgcaagtcgcggccggccaaaaagtccagatcccgatcaccttgaccggcatcgacgccgacggcgacgacgtgcagctgctcggtctcggcaacaaggcgccgacactcggacgcatcagcgaagtcggcgccacctacctggtatacgaagcctatgccgactccacaggaacggacaccttctcatacgccgtcgaagactggaccggccaacgatcccaagcgcaaatccgcgtaggcgtattcacatccggcaccgactcgggcgtatacgcgcgcgacgacgaaatcacattgcgccccaacaccgcagcaaccgtgcccgtggcgcaaaacgacatctccggagacaacaccgacctggccgtcagcgaaaacgtcgaatcgcaagacatcagcaatgtgaccgtggcggacaatacgctcgccttcaccactcctcagcaggcgggcacctattacgtggtgtatacggtcaaagacaaggcaggattgtccgacaccgcgacattgacggtgaacgtggacgacaacgccaccatcgaaccgccgacagcatacgactaccgtgtgccatcttccgcgacgatcgataagaaatccatcgacgtggacgtttcgcaatggatcgcgaacccttccggcagcgccgacgaactgcaggtggccgtggatgattccgccaccgaccatgcgcatgtcaagggcggtgacaagtccacgaccattagcgtggacttgacggacgaggcgcgagccgtgccgtacaccgtgaccaacacgacgtataacatcacgtccacggcgttcatccaagtgcccgcgtacggcgtgttcccgccgacccttcgaccgaaggcgccggcattgaaggtgaacgcacgcgagacgatcaccatcaatatcgccgattatgtgcgtgtgggcgcaggcaagaccgcgtatgtggacggcgccgattcggtgagcgccacgaaggccgcggacggcgacctgtatgtgaacgaccagacgttgaagttcaccgcatcaaaggattactccggtcccgcgtccatcaccttcaccgcggtggatggcaaacgcgacaagaacgacaaggtgaaaatcatcaattcggcggtattgacgttgccgatcaccgtgatcggacgtgacatgcccgcgccgacgttctcctcgtccaccattgacgtggtcgcaggagaaagcgccaccaccatcgatctgaccgcgttgacccattcggcgtccgacctgtacgacgatgaaaagcagtacacgtattcgggtggcgctgattccgaccaggtgagcgccaaagtgagttcgaacggcaagctgaccgtgtccgccgacaagaccgcttcgccgggaacaacggtgagcgtgccgatttcgattcaatattcgaagggcacggtgagtgcgggcgtcacggttcgtgtgacggcctccaacaggcctttggcacgcatcaacgcgaaaaccgtgaaggtcaaggcaggatccagtgaggaagtgaacctgctgtccgatgcgtataatccgttccccgattccgcattgaccgtgaccggatgcacgtccgatggcgcgtcgaagctgaccgtggactgcccgtccaacggtgtggtgtcgatcagcgcctcgtccgatatcggcgcgagcaccaacaaggtgatcgtcaacgtgcgcgatgccaccaatacgaaggaacgtgaggtgacgggcaccatcaacgtttcggtgatggacaagccggatgcgccgctgctctcccccatcgccggagacccgcaggatggcgcggtgaatctgagttggacggccggctcttcgaacggcagtccgatcagcgaatacaaggtgtcgtggggcggcgacggttccggcgagaaatcgtgcggatccgtgacctcctgccaaatcaccggcttgaagaacggcaagacgtactcgttcaaggtgcaggccaagaatgaggtcggctggtcgaaggagtcgaatggcgtggaaggcacgcctgacaagcttccggacgcgccgaccgatgtgaaggccgaagctagcaagaacaccatcactgtcacatggaaggctttggagggtaatttctccgccgtcgacaagtatcaggtgacgttgagcggtccgaatgtggcgaatccggtccaggaagtcactggcaccagcatcacgttcaaattcgacgacaatgcgatcaccgacggcgcatcctataccgccacggtcaaggcgcataacaaagtgaactggagccagccctccacggcatccaatgccgtttcgccttggggtacgcctgacaatccgactatttccgccgatcaatcaggcgacaagattgtggtgagagggcggatcaatgacgcacgtaactcgaaataccagtcgattacggtaagcatcgagggcgaagacaaatccgtggagacaagcgccaaggattattccgtcgaattcgacattaagaacgagtggtactacagaaaacttaagccgacgattaccgtggttacggaacgcagtggctcattgcgcaacgaagcgtccgtttcgactttcacagcagtcgatcctccaaccaatgtgaagctggaactcaacaacaacacatgtgtggcgacctggtccagaaaaggtggacgcgtcacaggtttcgttgtaaaggccaagggttattacgatgatgatgttcatgagagcagagccgaatggccgctttccggtgattggagcacctgcgatacggtaagcgtgcaacagtacttcatcgacacctcacatctcagcgacccagcaatcgctaccgataataccgtcggcaacaaaaagccagcggaaatcacactgccatcctcattgacgtgggatacacagaacgccaacatcattcatgtcaatggcggtagttgggaggcccacgggcgaagtgtcaaaggccagatcgttatcactccggcaggggaaagctcgcatacctacgattggccagctaacggcacactggatgtttccgacatcaccagtccttccggtaccagatgcgattgggaggttcgcgtgatcaccactgccggggaaccagaaatcaatgcgaccaagaaaagctctgatcccgtgaccggagtccgatacgaggagaaaacccccgatccggaaccgggaccaacccctgataatggagagacgcaatcctcgatagacaccaatgcttcagccatctcattacgaacagggttggcaggaaaacaggcgcgaggcatctcattcaccgtcaaataagcaaattcaacatcacaaccaatcatcaatacgatcaatagaagcaaccaaggagtacctatgagcaacgaaaacgacgacgccacccagctgggttccattgggcgccatatgagcaagccgcaacagcccggcaatccgcaggcacgccccgcattccaagctccaagcctgccgacgcatccgcaggaacaggacggagacgaagagggcacggtactcagcacgcataacgcaactccttcgaggccgacgaggcctacggttccaatggcgcagcccatgcaggcgcaaccgacgcaatccgctccaacacaacagccgctaccacaatcgcaatcggctcccgtaatggcaacgcgccaattcccgcagactacggcaccaagcgtcaagcccgcgcagccggccatggcttcttccatgatgtccgcgccgcaggccgacatcaccgaattccatgaactgttcgcccaactggtcggtaacgtctcccaagtcgtggtcggcaaggaacagccgatccgccaatgcgccaccgccatgatcgtcggtggccacattctgctcgaagacaatccggggaccggcaaaacgcagctggcccgcggcctcgccaactccatcgacatgtcgttcaaacgtatccagttcactccggatctgctgccgtccgacgtggtcggcgtaacctactacgaccagaagaacggcgaattcgaataccgcgaaggtccgattttcgcatccatcgtgctcgccgacgaaatcaaccgagcctcgccaaaaacgcagtccgcactgctcgaggtcatggaagagcagaaagtcaccgtcgacggcgaaacccatgcggtaccgcagccgttcatggtcatcgccactcagaaccccatcgagcaactcggcacctacaaactgcctgaggcgcagatggaccgtttcctcatcaaaacaaccatcggctatccgagccatgacgtaagcgtgaacatcctcaagcaggtcaacgtcaccgaccgtgcctccaccgtacatgcggtgctcaccggcaacgacgtgctgcgcatgcgcgccatcagcgaaaccgtgcgtctcgacgacgcgatcatcgaatacatcgtgcgcttggtggaagcgacgcgccacaacgaacgcatccaagtcggatcgtccatgcgaggcgcgctcgcactgacccgatgcgcccgcgtgtgggccgcgtccagcaatcgcggatacgtggtgcccgacgatgtgaagcaactggccgtcgccgtgctcgcacaccgcatcacgctcaccgcggaggccacattcgcgggatccacccccgaacagatgatcgaacagatcctcaatgaagtgccttcaccgaccgtgggcgccaccgcctgaaacgcacggcgcagccagccgcgtacgacacggcacacgcaaagcgcacaccccacacgaaacgttcgtaaacccccgaaaggtcaagcatgcgacaatccaaaaccatgcagcgcaggagaaccatgcaacgatccctgcgtcgcatcaagcatcgcatcaaacgactggtcacctcatacgtgtcgccgctcggatgggccgtgaccggactcgccatcgcctcactcatagcgttcacaatcctcagctggcatgaactgctgaccatggcgatcgtgttcgcatgcatgatggtcgccgccatcatgctgtcgctcggcaacacgtcgttcaccgccaccatagacgtgtccagcaggcgcgtcaccgtgtcagacacggtgaaagtcgatgtgtgcgtcgacaatccagggcgcacgctaaccacatcagcacgcggcgacctgcccatcggagacagccacgaacgattcgccatccccatgctcgccgccggccaatcacgccaaaccaccgtggaattcaccgccgtctcccgcgcggtactgccggtcggtcccctgtccatacgcaaaggcgacccattcggactcgtacgacacgaaaagaaacttgtcgaccaaatcaacgtgttcatccacccgaaaaccgttatgctgaacacactcaacgccggaattccgcgagatctcgaaggccagccaagcggcgaaatcgtcgacgacgacctcgatttctacggactgcgtgaatacgagccaggcgacgacgtacgcaacgtgcactggctcagctccgcaaaaacaggcgcactgatgatccgtcaatacgaggcgacccgacgcaccgacaccgcattgaccatcagcgtgaaccccgacgactatgtgagctccgacgaattcgaactggcggtatccgtccatgcctccatcggcgtgcaatgcctgctccaaaaccgaccggtgacctcacacgcgggaaccgaacacatcatgccacgcaactccacggaattccttgacggctgcagcgccatctcccccgatatcagcgacaatccgaatctggcgcaaaccaccctcgcccatgcccccgactcatcgttctactacatcaccgtcggcaggctcaaaaacatcgacgaaatcaaacacatggcgctcgcactcccccgatccgcaacctgcgtggtactgcaaaccgccatcggacagccacgcgccatcaaacgatacgccgatttcaccctggcgaccgtaggaaacctagacgatctcccaatgatcatgggggtactggaatgagcaccacaggactttccacacacaacaccaacaccggcgacaccggccgcaccaccggattcggcaacaccttcaccggaaccggcaccggctcatgggccgactccacacactccgtcatctggatgtcacgagacggcaaatcacaggcactcccctacctacgccggacacgcgcctcgcaatacgcaagcctgctcgtcgcagccctactcaccctcgccgccgccagcaacctcatcgacgtctacggatcggccacatcctgggcgctcgccgccattccggccaccatcatcggatctctcgtggcgctcgcaggcacggttccggcacttcgtctctggtggcagatgctgttcatggccgtcgcccagctggttgtcggccctgtactgttcctcaacgacaccaccatcgcccatattgttccgaccttgcgcacgcttacacaaggctggatgaacatgctcggatcgttcaaattcattctgtcggtcgaacctcccaccggtaccgccgatggctgtttgctggccgtatggaccatctgcctgtggttcgcgctactgaccggcattttcgcagtgactgaagatggccgattcaccatgatcgccattattcccgttaccgccaatcttgcgatttgcgcgctgctcggctcatcttccggctattaccgcatgttcgtaggcaccataatggcgctcatattggtgatttggatcagcgcacgttggaaattactggaattgggacgttggctcagttccgtcgtgatcgtggtgctttccgtcgcattggcgattggaggatgcctcgtcgtcgatcaggaccgcaccattctgcgcgaccattatgatccgccgcttagcccgtacaattacaccagtccgttaagcggcatgcgctcgtacattacaaacagtaaggacgacgtgctcctcaccgtcgaaaatctgcccgctggatcaagcgtgcgactagcggtcatggaccgtttcgacggcaacgtatggaatctgtccgactccaccatgtcgtcggactcctccaattaccgacgtgtcggcacctccatcaccaacaatgccgaaggcaagaaattcaccgccacattcaccgtggacaaaggactcagcgactactggctgcccatggccggagccgcatccagcgtgacattcgacaacagcgaaaactccgactcgttctactacaacagcgacaccatgtcggccatctacccctcacgcacctccgaaggtctcacctacacggaaaccggcatcatgccaacggttcccaccgacaaacagatcgccaaaacagacgcggccgccatcagccagccaaaagccgaagatgtgcccgactgcgtagacaaactcgccacagccatcgccggaggccaatccaaaggcggcgaagcggcccaggccttagccgaaaagctcaaagaatccggttggttctcacacggattaagcggcgactacccgtcaaccgcaggccacggcaactaccgcatcgaccaactgctcgccggaacggccatggtcggagacagtgaacaatacgcctccgccatggcattgatggcacgcagcctaggtcttcccagccgtgtggtactcggattcctgccaaaagacgacgaaggtgaaatcagcgaaagccgcaccgaagaacaaggaacaaccaccatcacgaaattcaccggcaacgacgtgaccgcatgggtggaaatcaaactggacggctacggttgggtggcattctatccaacgccaaaggaaaccaaagtccccgacgaaaaccagaacctcaccccaccgaatccgcaaaccctggtacgccagcccccggtaccactcaccgacccgctacgcgacgacacccaggccaaaggcaagtcctcaatcggcggaagcatggccgacgaaacctcagccaacctgttctggcagcatttcggcagaatcgcaagaaaagtagccatctacggaagccctctatggacgctgctcatcatatgcggtctcctgctcgccatcaaagcgatcgcactggcacgatcaagaaaacacggcagcacgcagcagcgtgtggcagccggctggcaatcggtcgccgcgctcgcacggcaaagcggactcgacattcgaggcacacgcagcgaacaggcggtttcgatcgcgaatcagatggatatttcccgcgagaccttgctcgctttgggcgcgcaagccgattacgcggccttctccggtaatttcgtcaacgaagagcatgtgcagcaatattggcgcgatattgcacaggaacgcaagtacatgctcaagtcattgccgacgttacgccgatggcgtgccaaactttcgcttgccgacgttttccacttccgcagcaaccgtagcgggcggaacaacggcagcgatcggaagcacaatcgtaagaaaggacgggactcatgatcttccgtagcatcgaggccggcctgaatagcaatgtcgggtgcaaaagaaaaaacaaccaagacaacgctctcgccagccgtggcgtatatgtcgtatgcgatggcatgggcggcggcaaaggcggcgagcgggccagcgcacaggtggcggcatgtttctcgcagcttgccgaacagccgtcgcgcaaccgtacgtccatcgaacatgcgttgagccaatcgcagcaacaggtgctcgaacttggccaggagcttggcggcatcgccggaaccaccatcaccggcgtggtgctgccgactcgcgttgaagatagcgtgcatgaacaagccatcgatgagtactgctacgtcatcaatgtcggagattcacgcacctaccatatgcgcgccgatgcggaaggccattggatggcggagtcgctgatccggatcacacgtgaccattccgaacggcagaacgccatcgacaccggcgaaatgctaccggacgaggcgaaccgatgcataccgcgcaatatcatcacccaatgcgtcggcgctcctgacggcattcagccggactggtatgcggcgcgctccacgggacgtttcatcatctgctcggatggcctgcacgcgcagatcgatcgggaactgctcgccgatgtggcggccgcatatggcgatccgcaagtcgccgcggatatgctggtgcagtccgcgctcgacgcgggcggcaacgacaacgtcaccgtgattgtgcttgatatatgcggcaaatcatcggattattcggcaaatgacgattggaacgtcagcaaaatcgacgatcacgaggatatcggcgatttacaggaaagcacattgcaaacgttacgtgccgtccaataatgcgcatgttctcgcaatgacaatcgtcaataatcggatttgtcacgttatatcagcgtattcaatacaatatttacagaacacgagataaggagatcatgatggtcgatttcgatgccgcggtggcggccgtgcaggatccgaacgcagatcccgtgtttctggcgaaaatcgcttacgaaaatccggaattcggcgcgaatgtggttgccaatccgcgtgcgtacccaggcctgaagcgttgggtcgcccagttcggcgacgaacgcgcacggcagcagctggtcgcgatggggtggccggttccgcaggacggaatcatgcagcaggaggccgagacggcttctgaacaggcgcaataccagatgccaagcgagcaggtgcaataccagcagccacagcaatcatcggaagtgcaatatcaggcgcagcaccagccgccggcaacccagcaatgccagcctgagccgtttgcggcaacacctgcatcgaatatggcgaacgatgcttcgacggaatacgtcgacccatataccaaccccgcagacctgtctgaagtggctgatttttcgccgattcagccgcaagagccagtcgcgtcgaatgctggtttcaccgcagaattggccatgaccacggaagatcagatgctgatggctgaaatcgcaagcaaagctccggagctgcaccccttccttgcgcgcaatccgcatatctacccggatctgctcaactggcttgccagtctcaatgattccgccatcaacgcagccatccgtctgcgacggtaacccttggtagaacttggcaaaagcccgacgaaagccgccaaacaaggcctaataaggcctaataaaagccgcttgcattggtaagctttcgtaccataatatgttcgttgcgccgtcatcctcatttatggattgacgacgcaacatgtatcgcggcgcgaaggaaatcagcgctgttcgaaagtgaagaactggtctccgatacgcaccgtgcaaggcgcgtcaagcttcatcggcttgcgttcgaccttgatctcctcattgccttgaatgatgtacgtgccgttgagcgaaccgtaatcctcgatccacaatacgccatcctgatcgaagctgatcgccgcatgattgcgtgagatggtgcgcgtcggatcctccaacttcacgaatttcgcaccttccggcacttcagcggaaggcttgcgccccagcagcacacccatatcgacgatcacttcctggccggtctgctcgttgtaaagcatgtattccagcttcggctgcttcatggtgaatgccgaagacagcaccgtgccatcccaatcgatatcatcatcgtcattgaccggttcgacgtctgacggttccggcgatgcggcagcctgttccaccggctgtatgttcgccgcatacgattccgcggattcctgcacattttccaatgcttggaatgcttgggattccggtgattcgtatgttggctgcgactgcgcagcctccgccatggcgggctcaacgagagaagacattactgtggcatcatcgtcataccaacctggttcaggtggaggcggatatggaagaaagctcataccttcattgtaatttgccatgcgattttgcgatgaagatatccgctctgcaatacgtacggttccgcaataggctgactgttgtcgtagggatcgcagcaactgcagttccgcattaaaaatagttccgcattaaaaaaatggggatcagctgtttccagccaatccccattcatgtattgagatgatttcagacgttatgccattccatcatcgcttttcggatcacagggtgtcgcccaaatccatctgaccgccattgtcgtccaggaagtcatccggattgaagtcgtcgccgagcttcagatctccgaagtcgatgttcgagaagtcgacttcggacagatcggcgtcgccgaaggcggcatcggactcgtcgccacccaaaccgaagttcgggtagatggtgtcgcgaatggccttgtcaggctcgaccacggcgttacggtaacgggcaaggccggtacctgccgggatgagcttaccgatgatgacgttctccttgaggcccttgaggtcatcgaccttctggctcagagcggcttcggtaagcacgcgggtggtctcctggaaggaagccgcggacagccaggaatcggttgccagcgaggccttggtgatgcccatcagctccggacgaccggcagcaggcttgccaccttccttcacggccttcatattggcggccttgaagcgggcctgatccaccagttcacccggaagaaggtcggtatcgccggaatcgatcaccgtgatacgacgcagcatctggtgcacgatgacctcgatgtgcttatcgtggatatccacgccctgggagcggtacacggtgtgcacttcctccacaatgttcacctgggcagcacgcgggccgaggatgcgcaggatcttcttaggatcgacggagccttcgatcagctgggtgccggcttcgacatgatcgccgtccttgaccatcatcggggcgcgacgggtcaccgggtaggcgatcggctcgacggaatcgtcgtccggcttcaggatgacctgacggccgcgctcggtgtcttccaccttgaccacgccagcgaactctgcgatcggggcctcacccttcggagtacgggcttcgaaaagctcggtaacacgagggagaccctgggtgatatcggatgcggaagcaacgccaccggagtggaaggaacgcagcgtcagctgggtaccaggctcgccgatggactgtgcggccacgatgccaacggcctcgccgacatccaccagcttgttggtggccagcgaccagccatagcacttggcgcacacgccgcgcttggattcgcaggtaagcacggaacgggccttgacctcttccacgtcgtgggcaacaagatcgttgagcacgtccatggacagcgcgtcaccggccttgtacagcacggtctcgccgtcggcgggatcgatcacgtcggttgcgagcagacgggagtacggaccgccatcggcggccttgaccagatgcaggttgccttcagcatcacgctcgccgaccttcatcgtcaggccacgcttggtgccgcaatcctcttcgcgcacgattacgtcctgggaaacgtccaccagacgacgggtcaggtagccagactctgcggtacgcagtgcggtatcggccagacccttacgtgcaccgtgctgggagatgaagtattccagcacggacaggccgtcacggtagttggacttcaccggtcgaggaatgatctcgcccttcgggttagccacgaggcctcgcatgcctgcgatctggttgatctgcatcatgtttcctcgtgcaccggactgcacgatgatagccaggttgttcttggagtcgaagtgttcctcgaccgcctcagaaacctcgctggtgcacttggtccacaggtcgatgagttcctgacggcgctcctcttcggtgagcataccgatttcgtagttctcgttgaccttgtcggcttcggcttcgtacttctcgatgtactcgtcgcgctcggacggctggataacgtcggagaacgcgaaggacacaccggaccacggtgcgcgggtgaagcccatatccttcagcgcgtccagcgttgccgccacctgtgcggtggagtaacgggttgcgatgtcgtcgacgatcttgctcagacgcttcttcggagcctgatcgttcacgaacgggtaatccaccggcagcgtgctgttgaacagaatacggccataggaggttgcgaaaagcacggaaccatcatggaagcgctcttccttcaccacggccgggctgcccggttccggatcgacgacttcgatttcgctcggctcccagcccttcggcagcacaaagtcttccggaaggcggataagcaccttggcctgcatgtcgatctcatgcttgtcgagggccatttcggcctcttccagcgaggagaacacgcggccctgacccttggcaccgtcgatgacggtggtcaggtagtacagaccgaggatcatatcctggctcggcatggtcacggtgtggccgtcagccggcttcagaatattgtcggaagccatcatcagggagcgtgcttcagcctgggcttcagcggacagcggcaggtggactgccatctgatcgccatcgaagtcggcgttgaatgcggcgcaggcaagcggcggcaggtggatggccttgccttccaccagaatcggctcgaatgcctgaatacccagacggtgcaacgtaggtgcacggttcaggagcaccggatgctcggcgatgacctcttcgagcacgccccacacttcggagtcgccgcggtccacgagacgcttggcgctcttcatgttctgggcatagttgaggtcgacaaggcgcttgatgacgaacggcttgaacagctcgagggccatcggcttcggcagaccgcactggtgcatgcgcagggacggaccgaccacgatcacggaacggccggaataatccacacgcttaccgagcaggttctgacggaaacgaccctgcttacccttgagcatgtcgctcagggacttcagcggacggttggaggcgccggtgaccgggcggccacgacgaccgttgtcgaacagggaatcgacggcttcctgcagcatgcgcttctcgttgttgagcatgatttcaggagcgccgagctcgatcagtcgcttcagacggttgttacggttgatcacacgacggtagaggtcgttgagatcggaagtggcgaaacggccaccgtcgagctgcaccatcgggcgcagatccggcggaatgaccggaatcacgtcgagcaccatggcctccggcttgttgccggtggtcaggaaggcgttgacgaccttcagtcgcttcagggcgcgggccttgcgttggccggtaccggtgtcgatctcttcgcgcagctgcttggaagcggcttcaagatcgaagtcctgcaggcgcttcttaatggcttcggcgcccatgcagccttcgaagtaatcgccgtagcggtcttccatctcacgccacaggtcgacgtcgccttccatgtcgcccggcttcaggttcttgaagcggtcgaacacggcgctcagacgctggatctgctcgtcgaaacgaacgcggatggcggccatttcacgctcggcgctgttgcgcagcttggcgcgtgcggagcccttggcttcgccttcggcctcaagttcagccagatcggcttcgaccttcttggcacgctcttcgatttccgcgttgcggcgcttctccaggttggcgatatcgttgtcgaactcgtcctgcagacccggaagatcctcatgacgctgttcctcatcgacgctggtgaccatgtaggcggcgaagtagatgaccttttccagatccttcggagcgatgtccagcaggtagcccaaacgggacggaacacccttgaagaaccagatgtgggtcaccggagcggcaagctcgatatggcccatgcgctcacgacgaacacggctcttggtgacttccacaccgcagcgttcgcagacgatgcccttgaagcgcacgcgcttgtacttgccgcaggcgcattcccagtcgcgggtaggtccgaagatctgctcgccgaacaggccgtctttctccggtttcagggtacggtagttgatggtttcaggcttcttgacctcgccgtggctccagttacggatgtcgtcggcggtggccaggccaatcctcagtttgtcaaatgcgttgacgtccagcactctattgtcctgtctatcgattcttaatgcttaatcacgtttcatcaggctggtcgcgccgcgctgtcaggcaacgcgaccagccttgggatcactggaattcaggttcttccacaacctggtcttccttggcggccgcgtcaggacgtgcgccaatgttgaagcccaaatcgtcggaggaagtagacggatcgtcgtcctcgtccttcatgtcgatggccacgccttcggcgttgagcacttcgacgttcagcgacagggactgcatttccttaagcagcaccttgaaggattccggaatgcctgccggcggcaggttgtcgcccttcacgatggcgccgtagacacgcacgcggccgtcgacgtcatcggacttggtggtcatcatttcatgcagcgtgtaggcggcgccataggcctcgagggcccacacttccatctcgccgaaacgctggccaccgaactgagccttaccgcccaacggctgctgggtgatcatggagtacgggccagtggaacgcgcgtggatcttgtcgtcgaccaggtggtgcagcttcagcatgtacatgtagccaacggagatcggcttcggatacggttcgccggtacggccgtcgaacagcacagccttgccgtcgtcgccgaccagcttgttgccgtcgcgatccggaagggtgcaggacagcaggcccttgatggtttccggacgaacgccgtcgaacaccggagttgccaccggagtgcccggctcgcccttttcggcgccctgcggaatgtacttcttccaagcggcttcggcatccggatcaagggagatgtcccagccggcgtgcgcgatccagcccaagtgcagttccagcacctggccaaggttcattcgagaaggcacgcccagcgggttcagcatgatgtcgaccggagtaccgtcggcaaggaacggcatatcctcttccggcagaatgcgggagataacacccttgttgccgtggcggccagacagcttgtcgccctgggtgatcttacgatgctgcgcgatgtagacgcggatcatctggttcacgccgttcggcagctcgtcgccgtcttcctcggcatcctcgcgagtgatctccttgacggcgatcaccgtaccggtttcgccgtgaggcacgcgcagcgaggtgtcacgcacctcgcggctcttctcgccgaagatggcgcggagcagacgctcttccggagtcagctcggtctcgcccttcggggtgaccttgcccaccagaatgtcgccggcttcgacctcggcaccgatgcgaatgatgccacgctcgtcgaggttggccaccgcgtcctcgccgacgttcggcagatcgcgggtgatctcttcggcacccagcttggtttcgcgggcgtcgatctcatattcctcgatgtggatggagctcagggtgtcgtcctgcacgagacgctgggagatgatcacagcatcctcgtagttgtagccgttccacggcatgaaggcgatgagcaggttcttgcccagtgccatttcgcccttctgggtggccggaccatcggcaagcacggtaccggcttccacacgttcgccgtcgtggatcagcggaacctggttgtagcaggtggtctggttggaacgcaggaacttggccagcttgtaggagctggtggtgccgtcgtcgttcatcacacggatgatgtcggcggaaacatacgtcaccacacccggcttctcagccagaatgacatcgccggaatcgacggccgcacgccattcggcaccggtgcccaccagcgggcgctcggattcgatcagaggcactgcctgacgctgcatgttggtacccatcagcgctcggtggccctcatcgtgctccaggaacggaatcagggaggcgccgacggaaaccatctgacgcggggaaacgtccatgtagtcaacggagctgacgggcacatcgactgcttcttcttcgccgactcgggcaagagcctgcttcttgacgaagttgccgttctcgtcgagttcctggttggcctgtgcgatcacgtgctcggcatcgcggtctgcggtcatgtattcgacctcgtcggtcacatggccgttgatgaccttacggtacggggtctcgatgaagccgaacggattgatgcggccgaaggttgccagagaaccgataagaccgatgttcggaccttcaggagattcgatcgggcacatacggccgaagtgggacgggtgcacgtctcgcacttccatggatgcgcggtcacgagacagaccgccagggcccagagcggacagacgacgcttgttggtgacgcctgccaacgggttgttctgatccatgaactgcgacagctgggaagttccgaagaactccttgatggtggcgttcaccggacgaatgttgatcagggactgcggggtgatggcctccggatcctgggtggtcatacgttcgcggaccacacgctccatacggctcagaccggtacgcagctggttctggatcagttcgccgacctggcggatacgacggttgccgaaatgatcgatatcgtcgacgtccacgcgcagatccacatcctggccgtcacgcttgcccgggaacttggtgtcgccggcatgcagggtgaccaggtacttgatggtggagatgatgtcttcgcgagacaggctgcgatcgttgacatccttttccagaccaagcttgcggttgatcttgtaacggccaacgcgggccagatcgtaacgcttggtgttgaagtagaaggaatccagcaggttgcggccagcttccgacgtcggggtgtcggccgggcggatcttgcggtacagatcggtcagagcctcgtcctgggtctgcacggtctccttggcaagcgcgttcataaccagcgggtaatccctgaacgcatcggcgatctcatccttggtcatgccgatggccatgaggaacacgatggcggactgcttgcgcttgcggtccacgcgcacgccaagcacgtcacgcttgtcgatctcgaactcaagccatgcgccacggctcgggatgatcttcgcgccgaagacttccttgtcggaagtgcgatcctggctgcggtcgaagtacacgcccggagaacgcaccagctgagacacgatcactcgctcggtaccaccgatgatgaaggtgccgtgcggggtctgcagcgggaaatcgcccatgaacacggtctgggacttgatttcgccggtgtcgccgttttcgaattcagcgttcacatacagcggcgcggagtaggtgtaatccttctccttgcactcctgcacggtgtggcgcggttcttcgaaatacggatcggagaaggtcaggctcatggtctgagcgaagttctcgatcggtgagatctcctggaagacctcatcaagaccggaggtgtggggcacggtgttggtgccgttcgccagatcctcctcgacacgcttctgccagcgctcgttgccgatgagccagtcgaagctgtcagtctgtacacccaacaggtagggtacatcaatgggctcgcggatggagccgaagttcacacggtccgacgccttgtgcagatcaatatcgtgctggtcggcgcgtgcgatgatggtggtggtgttcgtcgtagcctcagccaatggacgttccttatcgctcgctaaatcgtttcgatatgtttccccggaagcgctcccattggccaccatatgcctagtacgcgggcgcttcttccttgtcagcgtgcccgctatatgacacgcatgtacgcaaagtcatgagaataacatatcctatagatttttattcaatagtgacgccgaccggatcggacttcgctttgggatgcccttcaatcgaaagctgcgccgaatacacgccacgatccaccttcggcagggtggattgatcctccacgcattcgctgccagtacgcgttcccggccaggtgatcgtctgtctgacctcgtcgcccttcgccaacagacgatagtcggtgtcaacggggcacacattcgacttccaaaccacatcatcgcccgatttgatcgtcaacaccacgctggaagccgacacatcaaccaagcaaccaaccttgctggaaccgtcatatttgacgtccgtagtgaaatccatcgaatcgcccacaccgaaacttgacgccgcaggagtcaacgaaagcgcgacattggacgcatcgcaatccggcaccccgcttttcttctccttggtcggggacggcacttccttacgggaaatcgcatacacgtccgcatgatgaatctcacgattcaccgcgacaatccccctcgacagggagtacaggcaaaacaccagaaaagaaatcagcactatcgaagcgatgccgacgacgatgcgacggcgacgaaatatcgcctgctgttttttcgaacgtttcttgccggatttcgaggacgtcttctgtgccatgatttcacagtctagcgtgcgcacatccaaagaacgtcggcattcttcctttcataccggaagacgcacatccgcattcggcaggatttcgataagaccatcctcatccaacgatgcgatgcaccgatcaagctggatatggtcatcccacagtcgttcaagcgacttgcgattaagggcggtcgcaccttccggcagattgcgcagcgcattcagcaccagcccacgcacctgacgatccgtaccttggaaacgttgacgcggccgcgtgcgacgttcccccaatcccggacgaccattatgcaaaaacacgcaatgtcccgaaacagggcacgcctcgcacaacggagcctttgccgtgcagacggtcgcgcccaattccataacggactgattccacaccactgaaggacggtcgaaccgtctgcattttgaggcatcatcctgcggcaacatctgcttcgccaacgcacgttccgcaggtcttgcggcgccgccaagcgactcctcgccaagaaaaaccctcgaaagcaccctgcgaatattcgtatccaccaccgcgatgcgctcaccaaacgcgaaactcatcaccgcgctggccgtataatcgccgatacccggcaatgccagcaactcatcgtacgtacgcggcagcttgttatcgtaatcggaagcgaccacgcgggcgcattcctgcaatcgcaaggcgcgtctcggatagccgagcctgccccaagccgtgatcacatccgctttcgcggcatcggcaagcgcgaccgcatcaggccagcgttccatccaatcgttccaatacggtaccacacggctcatctgcgtctgctggctcatcacttcggagacaagcacgccccacgcagtagtgcggccgaaacgccatggcaggtcacgcgccgaagcatgccaccattcggcaagcgcgtccgccacagcttcggcgttttcaatttcggtattaggctcgttcgtgtcgttcatcgtacctattcttgcattcatgacgaacgaagagcataccaatgacgcgcaaggcgcaaccgcagaggaagccaaagtcgagaaaatgttcgaatacggctaccgcaagtcgaattatgggccggacgaactcgtgaccgacgcgcacggcaatccgatttccgtggtcgacgcgatgctgtcagccgaagacgcggccaaagccgaaacctccacgccccacttgtgctactactccccccgcattccgggcaataccggttcggcaatccgcctgtgcgcggtgaccggcacgatcctgcatttggtggagccgcttggattcaatctgcgcgatacgaagctgcgccgcgccggactggactaccacgacatggcccacgtggtattgcacccgaattttgagaatctggtggaatccatgccgaattcgcgcatcatcgcgttcaccgcgcacgccaccaaactgtataccgacatcgaatacaagccgactgacattctgctgttcggcccggagccaggcaatattcccgatccgatggatattatggccggtccgcacgtggccgaacaggtgcgtctgccgatgcgtccaagcctgcgttccctgaacctcaccaactgcgcatccatcgccatctacgaagcctggcgccaactaggcttcgccggcggccagtaatccctcccctgcctgccaacttctaggtttttcaataatttacttgcttttgtatagcaagttccgcgggagaggcggcggggtctattcccgacacgttccaggccgctcaggccaagtctttacggtctgaaacagaccccgccgcctctcccgctacgctgagttcaacttaagtaagttttcttttcttttatacaagacacaacgaaatgtacgaaagcgagcagaagagcgggatattctgttcgagaccgtaagcttggccgaacggccttgagtgtgtcgcgaatagaatatcccgctcttctgcgacctccccattacagcagcttatgcacccaacgcaagcacaaatcgcaagaatgaatcgcacgcgacaagcatgcatcgggaagagggaagggaggggctagtttttgaagctgtggattggggcggggatgcggccgcctcgggtcacgaaggcttcgcagctggtctggttgactggaatgatcggagcgtagcccatcaggccgccgaagttggccatctctcctacgcctttgccttcgaccggaatcacgcgcacggccgtggttttctggttgaccatgccgatcgcagcctcgtcggcgatgatgccggaaatggtggaggcggtggtatctcccggaatggcgatcatgtcaaggccgacggagcatacgcaggtcatggcttcgagcttttcgatcttcaggcagccgttggttgccgcgtcgatcatgttcttgtcttcggagacggggatgaacgcgccggaaagtccgccgacgtaggaggacgccatgatgccgcccttcttcacctgatcgttcagcatggcgagcgctgcggtggtgcccggtgcgccaacctgttcgaggccgatcttctcaagcacttcgccgacggagtcgcctacggccggggttggcgcgagggaaaggtcgatgatgccgaatggaatgccgaggcgacgggatgcctcctgtgccaccagctggccgacacgcgtgatcttgaacgcggtgcgcttgatggtttcacataggaattcgaagtttttgcccttggcttcgtcgagcgcgcgggaaaccacgccggggccggaaacgccgacgttgatgaccgcatcgccttcggttacgccatggaagccgcctgccatgaacgggttgtcgtcgggggcattgcagaatgccacgaatttcacgcatccgtatgaatcgttatctgcggtggcgtgcgcgatgtctttgatgatgtggccgagcagttcgacggagttcatgtcgataccggttttggtggatcccacgttgacggacgagcagacgatgtcggtttcgctcagcgctttcggcagggagcggatgagcagctcttcggcgggggtcatggacttggatacgagcgcggagtagccgccgatcaggtcgacgccgaccttcttcgccgcatggtcaagtgcatgcgcgattttcacgaaatcgtccgacgttttacacgagcttgcgccgaccagggaaatcggggtgacggtgatgcgcttattgacgatcggaatgccgtagtcgcgttcgatggctttgccggtggatacgagatccttggcgtacgtggtgattttgttgtagatgttgtcgcagacttcgtcgacgctgtcggccgcgcagtccagcaggctgatgcccatggtgatggtgcgcacgtcgagcttctcctgctcgatcatctggttggtctcgtggacctccatgatat

SEQ ID NO: 858 - DNA, 24320 bp, Unknown
  gut microbiota DNA sequence
attccttgtcggtgttggaataatccacaatcatcatcatgttgaagaaaccgtcgatgatggtctgagaaatgtcaagcacgttgacctgatgctcggaaaggtaggtgcagacgcgtgcgatgatgccgacagtatcctggccgacgacggtgatgattgccttgttcatggaactccctaaacgttaggtgcgaatatccagttaccgtctcggcaaaatgccggacgtgccttaagtatagaaaaggcagatgtcaaaaaagtcgttttttcggcaatcgcattacattgtgagacgatttcttccgtcaaaccggtttcaaaagttgcggaaagtcgttttttggaatatctgttttcgacgtgaaatcggatttcataaaagaaaagcgcctgccgatcgtttggaaatacgatttcggcaagcgctttttacaatatgtcatgcgattcacttttcgctgatcttgtcttctttcaggaagaaggagaagaccagcacgatgacgatcagcaccaagccgaacacatagccgtagcgggatcccgcaacgaagccttccgcatcggtggcgccggagcccatcgacagcaggcaggtggcgatggacgtgccaatcgcgccgaacacctgctgcatggtgttaagaatggtggagccgcagcttcggtatctcatcaagctagccgtatctggtctacggcatcgtgcctgctggccatcgtcgtgagatagctgtgcacccatctggcccacaagtgaatcatgcagaaacgcgcgttggcgcacgtccttttcatggacgtgcgccaacgcgcgtttctgcatcagcttctgcgatcaggcctcacggctcgcggaagccgcagcgaacgccggcaaggcgcgaggtgcgttgaaaccttccttttcgaagcggtcagcaatcttctgtgcgatctcgtgcccctggcccttatccaccagggcgatgatggagccaccaaagccgccgccggtcatacgcgcaccatacgcaccgttggcacgggccacgtccacggcaatatccaactcgggcacagtcacttcataatccgcagcgagcgaatcatgagacgcgttgaacagtcggccggcctcgtcgatcttgccgttggcgaaggcacgcacgaaggagttgacacgggcgatttcggtgatgacgtggcgcacgcgcttcttcatcgtgtcgtcttccagcttgtcgagcgtttccttgagcgcctggaacggatcgtcggacttggcgatgctgtcggcgaccacacgcaggttggccacgccgaggatttcggcggccttctcgcaagtggcgcgacgctgggcatactgtccgtcgttgagctggtgcggagcctgagtgtcaagcaccagcagttccagaccgtacttgtcgagatcgaattcctgctgggagacgttctccagcgggctcagctctggacggcaatcaagacgcaacgcatggccgaaagtgcagcgcatggatgcgttctgatcgagcccaccggtggacgcgcccgccatgtcgttttccgacttgatggcggcgttgatcagcgtcacacgaccggcatcggatgcgccataacccaaaccgtacacgtcatccaacgccaaggcggtggagcaggtcatggctgcggaggagctcagaccggatccgagcggcacgcaggaggagaatgccgcatcgaagccctgcaccgcatcgaagccggcttcgcgcaatgcccaggcaacgcctaccgggtaggcggcccagccttccacgccaccggcctgcaggccgtcgaggtcggcttcggtaacgctttcggagtcaacgtcggaaaccacgcgcaccttggtgtcttcacgcggcttgagcgcgatgaacgtgcggtgcggcagtgcgatcggcaggcacagacccgcgttgtagtcggtgtgttcgccgatcaggttcacacggcccggtgcggcccatacgccagccggctcctcaccgtaggtggcacggaacagatcggtcgcgttcttcacaccctcgtcgtgcgagagcggctcaatgaattcaacagcagtcattggtgtcttgtcctttgggttttattggctttcagccttcgatatcgattggtccgagctcgtggaagcgcttggcgatgagttccggcgtggtgtcggaaacccatgcggccatgccggattcggatccggccagatacttgatcttgttggctgcgcggcggaacgagaagaactgcaggttcaggcggtagttttcacggcgtgcgtcgtggatcggagcctgatgccatgctgcgatgtacggcaggtccatgcccttgccgtcacccttgtcgaagaacgcgttgccgcgcttgagcagggtggagtacatgacggccagatcccaacgttcctggtcgttgagctcgtcgagggtgagcacgtcgcgcaccggggccacatgcacctcgaggggccagcgggctgctgctggcacgtaggccacccagctgtggttgcgcatgacgatgcgctccccggcctcgatttcggagttcatgagatccttgagcaggttgccgccggtcttctcatggtaggcttcggtctgcttgagttcggcttccatcttcggcgcgatgaacgggtagcagtagacctgtccgtgagggtgtgccagggagacgccgatttcctgtccgtggttttcgaacgggaagatctgttcgatgccttccatcttggagatttcggcggtacggaacgcccatgcttccacgacggtgcgcagacgggagaccggcaggtctgccggcagaccgtcttcgtccgggtcgaagcagatcacttcacagcggcctgcggcgagcttcttctcccacagcgggttgccgttgacgtattccacggcttcggaacggcccggcacgcgaaccatcgacgggaagcggttttcgaacacgaccacgttgtagtcggtgtccggcacttcgccgtcctggtacgggtcgcccggcttgcgtgcggccagcgggttgcctttggcggtggcgccagggcccgcggtgatcggacggttcatgcgtgcggtcgccatcggaatccagtcgccggtcagtggatcgcgacgcatttccggagcagcgtacggcacttcctcaccggccgcgttgagctggttggagaaacgatatgccagctgacgaggatcgttcagttcgcgcgtcttcgcgccggaaacgtattccggatcatcgtcgaggtagaagaaagcgcggccatcggcgagcgtggtcggcgtgatgcgaatgtgctccttcgcgtactctccgggagtgtagtttgcgaattcactcattatggttattcaccttcctgaataggctcgctctggtgtgccagcacgagctctttaaccaaatcccttgttttcccaaccgaatcggggtctagtccatcatcggtaatgaccgtgtccacctggtcgaagcgtgcgaaaagcgacaatgatgtgcagctccacttggtgtgatcggtcaaaattatggtgcgatcggcaatgtccatcattgccatatcggttgcggcctcaagcgagttcggcatgaggaagccgcgcggaatggacacggaatgcgtgcccaggaagactgtgttgacgcgcagggaggccaccactttgtctgcgatcgggcctacgagcgagttggatcgggtggtcacgccgccggtcacgatgacttccacatctttcgattccagcgcctgcaccagttccgccaccggaatggagttggtgaggatggtgatccccgacgactgctgtgattccagcagatgttgcgcgaatacgtatgcggtggtgccgccgccgatggcgatcacgtcgccgggtgccacatatttgatggcttcctgtgcgatggcgtccttcaatccgatgtccatctgcgactttacggagaacagcggctcactcagcagcgtgctggtggtgacggcgccgccgtgcacacgcttcagcagacccttgtcggccagatcggcgatatcgcgtcggatggtcatggcggaaacgcccaattccttggacaatgcggtgatacgcaccgcaccgcgggtacgcaacctgctcaaaatcagatgctgacgttgtgacgatatcattcgaacattatcgcacatgttcactcaaaataaaaactgagatgagcgtttcgcgcgttttcctcacgaaaaaatatacttggcactcctgtaatcgttcaaatcgaacaaaaacgaacgtcgacatcccgtcagcgaaatcaatcgacgtgttgctttcctgcgacgaacggtgcgagaatagtgaaccatgacgtatgtttctgagaatttctggcacgatgcggtgaacaaagccaccacagatctcttcaccttcggctacaagcacatcatcaagccgcatttcgtgttcaatcagacgcccgatgtggcgcacgaccagatgatccagttctgcaagatcaccaagaacattccgccgctgatgtgggcgtgccgtgaaatgctcaactattccgaccccgtgctggaaaccagcgtgatgggcgtcgacttcgtcaatccgttcggcctttccgccggcctcgacaagaactgcgagatgccggtgctgctcgacaacgccggcttcggcttcgaaacggtcggatccaccacgtctcgtccgtgccccggcaatccgaagccgtggttccaccgtctgcccgaatatgattcgatgatggtgcatgtcggtcttgccaatgagggttcggaaatcgttgttccgcgcgcggaacaggcttggacgaaggcgcgcgacatgcagatttccgtgtcgatcgcgcgtacgaatgacgataagaccggcgatttggacgaaggcatcgaggattactgcatttcgatgcgccgcacggccggtcgcaccgccatggtcgaagtgaacatctcctgcccgaacacgatggccggcgaaccgttcaatcagagccctgaagcgctcgacaagctgttcaccgaactcgacaagatcgaacgtccacagcccacgctggtgaagatgccgttgaataagtcctgggaagagttcaaggatctgcttgacgtgcttgccgaacacaatgtgcagggcttgtcgattgcgaatctgcagaaggaccgcgccggcatggagattcctcgcgattgggagggcggactgtcaggttcgccatgctatgaggccagcaacgaacgcatcaagcaggtgtaccgcgagtatggcgaccgttttgcgattgccggcatcggcggcgtgttcactccgcagcaggcgtatgcgaagattcgttccggctcgtcgttggtcatgttcatcagctcgctgatgtatcgcggaccgcagcagatcaccgtgttgaagcgcggccttgccgaactgctcaagcgcgacggattcgaccatgtgagccaggctgtcggcatcgacgcctgataccgattatttcaatcggcagcgagcaccaaaaataatgcgccctgcgaccgccaacgcggtgcagggcgcattattgttgttcgattgttgttcgatattaccttggttattggttgcgtttagtatgcgccacgcacatactgcggctggtagggcgcatcttcggtcggaataccgagcttgtgggcggcgcgaagaggccaattcggatcacgaagcgccgcacgtccgatttcgatggcgtcggcggcaccggatttcaaaatcttcttggcctgcttcggcttggtgatcaatccgacggccgtggttggaatttcggcacgcgagcgcacctgttcggcgaatggaacctgataatcgggtttgacgggaatggtcacgcccggaatcatgcctccggtggagacgtccatcagatcgacaccgtgcttcttcaggactttggcaaggtcgacggtctgatcgagatcccagcctccggcggcccaatcggtcgcggaaacgcgcaccagcaccggcatggtgtcggggatgacggaacgcacggcgtccacgacttcgaccagtatgcggatacggttgtcgaacgatccgccgtattcatcctcgcgcttgttgatcagcggatcgaggaattgcgacagcagatagccgtgggccgcatgaatttccaccgcgtcaaagccgatatcataagcacgccaagcggcgtcgcggaactggtcgacgatggcatggatttcgtcaacggtgagttcgcgaggcttgtccaacggcccgaacgcgttggcacttggccccacggtctgccatccgccctgctcttccggcacgctctcatgctcgtatccgatggagaagcagccggtggaagccttgcgtccggcatggttgagctgcaccgccatcgtcgcgccggcggccttcgcatcggcaacgatccaacgccatgcgtccatctgctcgtcggcccacaatcccaagtcgcacggcgaaatacgaccctccggcgtcactgcggtggcttccacgataaccatgccgaaaccgcccatggcacgtgacacataatgctggtagtggaatggcgtgggcaggccatcctgggccaacgcggaatacgtgtccattggcggcagccagatgcggttgcgcacggtcatgccacgcaaagtcataggatcgaacaggccaaccgtgccattggttttggccttcttcgaccgcttcgccttcttttcgtcttcgctcatcgtagtagctcccctccggtcgcacctactggctccatgccgatcggctgaaccttcttcttgtattccccttgagcttctctggagatttcgtgccataaaaccggcactatctgcattctacgcagaacgcccgccgggcgtggcgggcgttcattgattgttcacttccattcgctggattgcggaagcgtcactcatcttcggtctgctgctgatcctgatcatcctgctggtcgttctgctggctttgctgctgaagcgactggttctgctgctgaatgattgtgctttgctgctgggtggcattctgctttccaccgccgatcttggtgaccgtgccggatgttgcggaatacttggccgcaggctgcccataatcgttgtcaatcggcagctgtttgcgttccgcataagcattcataaagtcacgccatgccggggccgcgatggtggaaccatcccagtagctgtggtactggccgttgatagcgatattcgcaatcgggtgtccaaccgggttctgcacgtcaccgacaagcacgaatgtggcgatctggttcggaatgaaaccacccgtcgtaactagctgatcctcgtgggtaccggtcttggcgaaggtcttacgtccattggctagctgtgccacaccgcctgcgccgtcaggacggacaacgccttgattcatggcccaagcaagcgtttggatgatttccggatcgaccgcctgatggcagttcgcggaaggcaccttaatatcattgccgtccacatcagtcacctgcttcagcgcgatcggatcgcactgcacgccattggacgcatatacagcgaagatgcttgccatcgtcagcggggacacgttgacgttgccgaccatcatggcaggcacgaatgatgaggtcttgtcgagcgtctcaccggtattcgcatcatgatagccaagttcagttgcggtatcggcaatcttgcacaagccgatgatggatcccatggaagcctgcgtggtgttatgagaccttgccaaagccaatgccggcgtttccgggttcaccgttccattggttattgcgttggtgacgttccacgtatcagtgccgccggtataacgatcgcatgcgaacaacgaggtcgaatacctcgtggacgtctgcaggttctcgttgacggaatgtcccgcttccatccatgccaccagattgacaggcttccacgacgagccgatggaaaagcccatgccgccgccgtcttctcgatccacggcatagttcatggaatccctggtctggtcgttctgcgccgcttcggtggcatcatacgttcgattcagaccgaagcccaacacttctccggtacccggtttgacggacgccatcacgatttccatgccggaggaatcttccggtgggatggtgttgcgcgcggtttcgttcaacaaggtgttggcatcgatatccaacgtggtgacgatcttcagaccgccctctttcagcagtctttccctgtcctcgctggtcttgccgaattccttggaattcaaaatcttatgcaccacgtaatcgcagaaatagcccgcatcatagtccgcggccatgcaaccggtggaaataggctggacatcaagcgtatctgcgagcggagtattgaccgcctcttgatattccgcatccgaaatatagccctgctcgttcatcagctgcagcacgatattgcgttgcttctcggattccggctggttcgattcgacggaaggatcgtaagcgttcggattcttggtgattgccgcgatggtggcggactgcacgatgttcagctgatctgcggtggtgttgaaataccgcttcgcagccgcctgcacgccatagaggctattgccgccaaactgtgcgatattgagatatccctgcaaaatttcaggcttggaatactgcttttccatttgcacggaaatcagcatttccctcatttttcgtgcgatggtatcttccgacgcatggtattgtgcgatcggatcgtcatcctgctgcgcctgcaggatcagcacgtttttgacatactgctgggtaagggaggaaccgccctgatggtcgcccttcatgtatgtttggacgaacgcgcggaacacaccctgcacatcaacgccgccgtgagtgaagaatcgtctgtcttcacgcgctaccacggcctgctgcatgtatttggaaatcttcttcaacggcacgacttcacgattctgatcccagaattcggtgattttcgtggtgccatcggaagcgtacatggtcgacttctgcggcaggctggtcacatcaaaatcaataccttcgaccgacagcgacggaataaccgccttggcgacgctgttcgcgccgaaaaccgccggtaggaggaacaaactggcggccacgccgccacccacactcagcgtgatgtaggcaatcacgagtgcgagcacacgttgaacggtcaaagtcttcttttcgggcatggtgcccattctaaagtggtgggtctactaatcaaccggccgatcgcagccatcacgggtttctcacaaacaaccgtaaaacttgaaaaacactggaaaacagtcgaaaattatcgtctcgatcgtcgaataagcatgccgggctggtagatgatgatggaacggccctcacgcgcgatccatccacggttggcgaaatccatcagcgccttgttcaccgtttcgcgcgacgaaccgaccagctgcgccatttcctcctgcgtcagatcgtgcggcaccttcaaccccgcctcgaccggctcgccgaagcgtgacgccagattcagcagcgttttcgccaaacgtcccggcacgtccatgaacacaagctccgaaatgcgctcgttgttgtcacgcatgcgatgcgcgagcacctgaagcatgtcgacggccacgcgcggatgctcgtcaagccatgcgaacagggcgtcatgctcaagccatacgactttcgtgtcactggtcatggccacggcggacgcggtgcgcggtccaccatgcggatcgaacaccggaatctcacccagcacttcgccgtacgcatgaatgctcaacaactgcacacgtctgtcggacgattgccggatcagtttgacgcgcccacgttccagcagatacatgcggtgatcggtgtcgccttcgcggaaaatatagtcgcccttgctatattcggcatgctgcagatgcggcagcagttcctccgcctcttcggaagaaacctgcttgaacaacgcggtgtgcagcaacgtcgcgctttcgccactgggtccactattggtctcgtttggcgtagccatttgtcacacctccgttcataggcacatcctctgggcacgccgccaagcgtgttgccgggcgcgctgccgcggcctcgaaagcttggcgcgattccacatgccctcacggaacacaagctttcgtaacgttctcattgcccttgatatcagggcggcttcgaccatcgggctacattgtaactcgcctggcggcgtcgagcagccgttcaaccacgtcttcacgactcatgcccgtctgcgagcgcattggatcgactcgttttaccgctgatttcaccgctttgtccgacattttctcacgtgaggtgttcaatacccgccccattttttccgcgtcgatatcgtaggcgagggtcacgtggtgcagtatggcgccaggccctccctctactggtgtgaatcggcgttgtgcggctccgccgagtttgccgtattgcgtggcgatgtcgttgagtccggagaatcgtacgtcgagcccgagttccttaagcgcgcgcaccagccagaaatcgcagagccggtatgattcctcgatgcttatgccttgggtgaaatcgaacggcgcgtacaacgagtaggtgatggtattgcccggttcgatgaacatcgccccgccgccggtgcaacgtcggaccacggtgaatccttccttctgcgcgaccgccgtattgacttcgtcttcgagcgactggaatttgccgatgaccacggccggagcggcccattcccagatacgcagcgtgggttcgcgtttgcctgccgccacttcgcgcgcccatgcgatgtcggttttcatttgttcgttcgggtcgcgcggcttgtcgtggatgacggtcggtttcaggtcccgccagcgttccagatattcctcttgtgtcagcgcattatgcattcccggttgttccccggaatattgtttcgtggaccgcgcgatatttccgttgcccgttgcatcttccgcattgcgcgattcactgcctgtgattgcgcggagaaaagcgatggcaatgccttctgccgtcatacccaccaatcgcacgttcggatagttcgcggtaatcgcttgcaatcgtcgcgtaatgtcgcgtgtgggcgcgcctcgctggctttgcagcaagttttcccaatcctgcaatagtcggcgggaatccttgtcatcgccgtcaagaaagaaatcgccgtcgatccgacattgttccacggattggatggaacttgcacattcgcggaaatatgctggaatgtcatcagaaagccggacggaaacccctacgagtttgccgcccggctgcttatacagccctctgcccatcaatcttgaagttcttggccgcgcccatcgcggtgccagttggacccgtagctggagcacaggatgaggactgcttcgatcagagcccagattccggaaatgatcggtccgatgaggatgatccatccgatcagggtcagcaacagctgggccacggccttgcctgtgtatcccagatagaagttgtgcacgccgagggtgccgaggaacaggccgagcaggccggcgacgatcttcgacttctgcgcgtagccatagccgggctgctgttgggtcgcctgatagtaggtctgctgcgcgtaggttggtggctgattgtatgcggactgcgtgtattggggctgagtcggctcctgataatagggggtctgcgccgattgtgcgtaatccgtaggtccgtacgtcggctgaccgtagatgggctgtgcaggttgcgcaggctgagtcggctgcccgtaagcgggagcggccgagccatatgcggggacggacgaaccgtaggcagccgactgaccatatggctgaccattgccgtacgtaccgccggggatgttgttgccctgcgtacccggggcatatccctgcacgggctgctgcgatgcgtacgggtcgggattgtgcggctgtgatgcaggctgattgtagccatcctgcgactgcctgtaatcggcttgagttgaatcgttcgtcgcgaaatactcgtcttggccggaaccgttgtaatcggcattgttgtcactcatggtttcaacaatatcccataatttgccttgttgctttcatccaccctgaaagcaatccctgaaatccccctgaatatgcgaaacgcctgtcgaattcaagcatgaactcgatttcgacaggcgtctcaacaggcgagcatatccggcgcaatcatgcgttccggatcatatgtcacatgcgtgccagaatgtcgcgtccgacctcgtcggtggagcgggtagcggatcccagctcttcgatgtccgcttcgacggccgcatcgatcttggccgcggcgtcgtcgaaaccgaggtggcgcagcagcatggccgcagaaaggatcgcggcggtcggattggccttgttctggcctgcgatatccggtgcggaaccgtgaatcggctcgaacatggacgggtattcgttggaagcgttgatgcatccggaagcggagtatccgacaccgccgaccacggcacctgcctcgtcggtgatgatgtcgccgaacaggttgtcagtgaggatcacgtcgaagcgggacggattcgacaccatgaaaatggtggtcgcgtcgatatgcagatagtcgtgggaaacttccggatattcctcggcgaccttatcgacgatgcgctgccacatgtctccggcgttgacgagcacgttcttcttgtgcacgagggtcacatgcttcctgcgcttcatggccagctggaaggcgtaacgcaccacacgttccacgccgtaggcggtgttgatggaaacttcggtggccacctcgttcggggtgccgcggcgaaccgctccgccggcgccgcagtacaggccttcggtgccttcacgcaccacgacgaagtcgatatcacccgggttggcgagcggggaggtcacgcccttgtacagcttggacggacgcaggttgacgtactggtcgagatcgaaacggagcttgagcagcaggccacgttcgagaatgccggccttgatacgcggatcgccgactgcgcccaacaggatcgcgtcggtcttcttgatgcgttcctcttcctcttccggaagaatcgcaccgtcacgcaggtaacgttcggcgccaagatcgaaattctcgtaatcgaattcggcaacgccctcggccgccttctccagagccttctgagcccacggagtcacttccttgccaatgccatcgcccggaatgacggcgatggtgtacttctttgcagaatcactcatagcacgcgactctagtcaacgaatcagcacgtggacttaaaacgctcaactaatggacactccatgccgctttcctgtacgaaacacacgaaaagcatgaatcatacgaatctcacaaatcgcacagcctaatcagctggtaatacccatcacgccaagacaccaagcattctcataggagatctcctcccactgcttgtaccttccagacgtacccccatgaccagcctcaacctcaatcttcgccacggcatccacgcccgcacgctgcagtcgggccaaccatttcatcggctccacatacagcacacgagtgtcattcatcgacgtggtaatgaaaatcttgggaaaaaccgcaacccgcgcatcatttgcatcagacggcgcattctcatacggcgtatattccttcatataccgatacacgtccgcattatgcagcggatcgccccactcatcccactccgtaaccgtcaacggcaacgacggatcaagaatcgacgtcaacgcatccacaaaaggcacatccgcctcaacgcccgcgaaacattcgggagccatattcgccacggcacccatcaacaggccaccggcggaaccgccatcggccaccgtgcgagcaggcgacgccaaaccggcacgctgcaacgcacgcacggcatcaacgaaatcctcaaacgaatgcttcttattgagcaaatgcccctgctcataccaagcacgacccatctcaccgccgccgcgaatgtgcggcaccgcataaagcacaccacgatcaagcatgctgatgcgagacaccgagaatcccggatccgaactgatctcatacgcgccatacccggtaacgaacatcgccgaatcacacgcaggcacatccctgcgccacaccaaggaaacaggaatgcgctcgccatcgcgggcggtaacccacaccctgcgctccatgtattcgcgcggttcaaatccaccaagcaccgtggcacgcctcaacaggcgatcctcgccggtcgccggatcgatatcatgcagttcgccgggacgcgtgtaactggagaacgagtagcgcatgcggggcgcatcatacgaaggattgcctcccacaccaatcgaatacaagcgccgggtctcccccggcatcgcatcggcggtcgcgccatccgatgaggtcatcgccttgcgggaaaccccatgcacggccgacccctcgccttgcgcggcggccaattggtctagcgcgccccacacttcggcacgttcctcgttgatctcgtccaccgactcgtcgacatcccaatcgtcttccaacgcgtggggaaccagctcggtgaacttccatggacgccccgcaagaaaatcctccgcagcggcatccttcgtcatcaccgcaatatgcgtcaggctttccgcccggtactgcagcgccacataatgccggtgaatcgagatcccctcaatgccaagaccatgcgcgccctgcaaaatggctggattgcagggattggaatacggtgtgccgatcggcatctcagaagcgcccggttcgacctcgtcgccgtgctcgcatccgtacggcgaaccgacggccacacgcacgccctcacccaaacggtacgggggctcatgggagcgcatgtcgatcacatcgatttcgaaattcgggttcaacgcattgtgatagaccacggcgagcggaatatcctcaccgcattcgccggcaccttcgaaacggctgaaactcacgtcgtattccacgtcctgctcgcgcggaatgaacgcgcggaattcgccttccggatcgtcggtggaaagcagcagcacttcggtggtagtcttcgacccggtgccgatcaccagattgcgttcgtcgaacgacaggccgatgccaacccagaatcgttcgtctcgttcgcggtacacctccacatcgtcgacgatgggagtgccgacgcggtgcctcatcaccgcgtatggacgccacgcgtcgtcgagcttcacatagaacacccattgcgcgtccggtgtgaagcaggcgccaccgatgccctcgaacacttccggcagttccttgccggtttccaagctgcggatgcggaaatcgtaacgttcgtcgccgctggtgtcggtgccgtacagcatccaacgtccgtctttggaaatatccatgccgccgatacggaagaaatcatggccttgcgcttcggcattggtgtcgaacaccacttgttcgccgtcgatgggcacgccgatttcaatggttggcggatcccaatcgtctgcgcctcgaataggcacacggcattgcaccgcatactgctggccctcctgggtgcgtacgaaataccagtagccatccatgcgtgtcggcacggacatgtcgttttcctgaacgtgcgacttgagctcgtcgaacagtgtggagcgtagggttttcaacggttccatgcgctgctcgcaataccggttctgcgcggcgacgtaatcctgcacgtcatgcgattccttgtcgcgcagccattcgtactcgtcgatgaaggtgtcgccgtggaatacgcgctccttcggcacacgcttcgcgatcggcatcccgcatttgtcttgcacgctttcgtcgctttctcgcgcgcccgttgcgccctgttcaccccgaaaatcagtcatgcacgcgattataccggcattgcattcccaatcccacgcggcacgcaccccctgctccgggcgtacgaaaaagtcagacgcccatctgttgtttcaggaacggcagcatggttttcatcagattcgagccggtcgttcccgtgaataccgggacatcggtgaccgggatcggctgcgtgaccgcacgccccgcaacggtgccgagattgccggcgacttcgcgtggagacaactgccggatgccgatcgccagcacacgccctgggtatcggcgtgcgatcgtggcgtacgtggtcggatccctctgcccgtcatcgccgatcagaatgaacttcatatcaggaaaatcagccatcaattgttcggcatactcgagtttgtgctgcactccggaaggaatgaacgttttcgggcgaggatcgaggtcgcgcaatagcagcggaccttccggaaaaccatggttggcgatgaaatgccggatcgagctttccacattccatggcgatgtcgacaggtagaagaacggcgcgtccgggaacatgtccgcaatgcggttgaacagcaggttcatgcccgcaaccggcattttcttctttggatcgagcagcagcagattgtaggcggctttcatcaggcttggcgcctgcgtgaccatgatggtgtcgtccacgtcggagatcacgccgactttcgtaccgctggggatggtgaacaggttggctgtgaccggtttgcggctacgtaccttgtatgacacgtcgtgcacgcccggttcgagcgaatgttcggccacgagatcgagatatcctgcggaatcggaggctgcgaattcactggagacattgcgctgcgcgtccacttcgtcgtgcacttcggacgcgcccacctgcacggtttcgaggggcacgccgtcgatggcgatgcgcaccttcgtatgcggcgaggggatggtgagcatggcacggatgccacgggtcagacgacccgcctgacgtttgaagggcccatacacggttcggtagatcagtcgagagtaatgttcggtgccgtagccgacatatggttccacgcgcggataccagttgagattgagcaccatgcttgttgagaacgtcacccacttgttgaacgctctggtaatggtgcggcggaacagtcgtgtcagcggaggcttgacttcgatgcgttcgtgtttcgaagccgcgtcgaaggtggtgaccaccttgcgtgcgggaatgggcacggtcggcatgtcatcttcggatatggaatccggttcacgctggggcaacggctgcggttcggtcataaccccactataaaggcaattattgaattacctggtaccccagcgtgaaaatcagggatttttcagggaataccgatgatttcccatccaatttcccgaatcgtgccgttcactgaaccacgatgttggcgtattcctcggaggaaagcagtcccggctcgtcatcctcaagttcgattttgaaaatccagccttcgccatacgggtcacccgttacgatgcttggatcgtcggcggcctcgttgttcacatagcgaatcacgccggccaccggagcgaccagcggcgtgaccgccttggaggattccagttccgccacctcgtcgcccgcctgcacttcggtgccgacttccggcagatcgatgtacacgagttcgccaagctggtcgaccgcatattcggtgatacccaccatggccggctcggtggaagcatccacccacacatgctcgtcggaatattcaagatgctcgggaacatccagattcggcttgttatcgttttcttcgctcatgaaagctcattctacgtcaatcgtatgtatttccctagagcagtgccgaaacttgctacgggaggtcgtgaccgagccattcttcgatcatgtagcgggcgatggtggcctttccgggagcttccatacgccctgccaccaactcgttcatgtattcgtcgcgggtcacccaacgcgcctgcagggtctcgtcgccgtccacgcgcacgtcggtggtgttggccacgcctttgaacgccatcatgagcgatgcggggaacggccatggctgcgatcccaagtatttgagttcgccgatgtctatgccgacttcctctttggcttcgcgccggcaggcatgctccaggttttctccggcttccacgaagccggccgatacggagtacagtccggtgttgcgccatgcgctgttgtgttgcagcagcagacggtcctcatggtccacgatcgccgtgatgacggccggttccactctggggaacagcagtcgcttgccgtccgcttcgctggcgcagcgttgcgcccatcctcccaacgccggttcggtcggagcgccgcatgtggggcaatgacgttggcgcgcatgccatacgcccagcgagatcgccgtcgtggcctggcctgcttcgcgcgcgctggcatgcggtgcgaatccgcgcagatcgacccagtcgaatcgttccgcagcgctttccagcaacgatttcgacgttttcgcttccggttcgtgctgttcgccgaacgcatcgtccgcgcccatatgctcgctgcttgcgaccaccgtctccgcggctttcatgcgagacacgtcaacggcgaccacgtgttcgtcgcgtttgccgccatacgatccaaggaatatggcgagcgccgtcggatgcgtgtgcagttccgccgccacgtaggcgccgggcaattgcgcgagacgcatatgcacgttggcgtagtccgcgatggctccctgtccgcgcggcaccgccaccatgccgtctttgacgagaatgaccttcgtgtccggctccagcagcgccgtgtcgaacaggtcgggttcgccgcgtctcgaaacctcatagtcgatgtcgccttgcgcaagtggcaggaacggcagtgcctgggtcagcgccagtggcgagaacacgctcatcgattgcttctttccttgaatacgattgatagagcggatattttttctctattccgtattttcttttctatttttttatatcttttttgtatttctgattgcgatattgacggcagcggcggaaaataccggctactgcaccctgcgcaccagcgcgagcagcgcgtcggcaaccgcctgcggatgctcgtatgcgctgaaatgcccgcaatcgaataccaccgtcatatccgcgctcgtgcctgtcatcgcatcggcgatcggcgtcatcacgctcggcgggctcgacggatccttgtcgccgcagatcaccgcaaccggtgccgtaatcgcaggcaacacatcgttcagatccgggcgcccagccgccatgcgctcacgccatgcgatgccttcggcaggctgttcgttgatccacgtcgtgaactgttcacggtaggcggccgactgtttgatggtggaatcctcaggtgtggatgccgcaaatcccatcaccggctcatgcgtgcccgtcgattcgcatgcttcggcgatcgcgatgcgcttcgcgcgcatctgcgcggaatccgccgcggccttcgtgtcgcacaatgccaacgcggcaacagcttcggggtgcagacgctgaatgtcgagaaccagatagccgcccatcgaaaggcccgcccaaatcgccttgtcgtaaccggccgcatgcaacatcgcgacataggcgtcggccatatggtccaaaccgttcgggaaagcgccgtccgcgtctttgccgccactggtctcatcggaaggaatcggcccttctcccgcaccgggcatgtcgggaccccagatcgggaaccgtttcacaccatgttccacagcggccgcctccaacgcctccgcacattcgtcccacatgcggtggtccacggggaacccgtgcaccagcaccacgggaagcccctcgccctcgcaatacacgttattatgtaattcgatcgtcatcgtctcactccgttcctctcccctatattgcctatgtatctatcgcttgcgctgcctgcattcgcaagctgccacgcgctttcctggcgcccacggccgaccggtttcgacgtcaaccataagcctgtcggctacctgccggcccaagcgatcgcctgacgcacaatcgtgccatatccgttgctcatctggtttatgaaagtgtcgaggatctcgctgttcgtgttgacccattccacgtcaagcgtctcatcctgcggcttgcagtcgcccgcgatcggcaccacgtagcacaatgcgatcgcatgctggcgggaatcgaaataatcggatagtcccggcgtcgggaaaaactcggccacggtgaacggctgcagactcaccggcagctgcggcaacgcgatatcgcccaaatccttggcgacattacgcgccacggcctcacgcaacgattcgtgatagagcacgcgcccggcaatcagcgttcgctcgatactgccgtcgtcagacacgcgaagcaacgatccgacctgtgaaacacgccccagatcatcggtgcgcaccggcaccacaagcacgtatggaatcggcatttcgccgcgcatacggttgatttcgccggaagcaagccatcctggaggattacctattccgcgaatgaaatcctccggcgtaatgtcgtcgaattctccgcgacgacggcctgcatcgaaatcgccctcgtcgggcacttcatcattcatcactggcatagtcccattatcacgcatcttgtgtgaattggctggaaaagaatgcgccgaaagacgattcttctgacagcggatattgcatatgccgggaatgcggcgggttgggacgcggttatatactccaaagcaatcgcatacgaggggcgtagcccgtcacgcgcgtcgatggaacgaacagcaaggagcaatcatggcaacgcatgcggtcacttcgcaggatttcaatcaggtcgtcgaatccaacgatctggtattcgtggatttctgggcaacctggtgcggtccgtgccgtgcgttcggcccgacgttcgaaaaggcaagcgaagcgaatcctgacatttatttcgcgaaggtcgatatcgaccagaatccggatctcgcctccgccgccaaagtgcaggccgtgccgaccttgatggtgatcaagaaccagcagatcgtattccagcaggctggcgcgttgcgcgcgtcggatctggacgatctgatcgcccaggccaaggagctggacgtcaatgcggccgctgccgaagaggctgcggaacaggcgcaataaggcgaatatcaaaggattgcaaaggtgccgttcgatggcgaaacatcaacggcaccttttgctttgcacgcttgctttgcatgcccgctttgcccgcctgttacatatgcgctcgcccggattccatggcatggagtagaatgtcgcgttggatatgcgctttccggcgaagcctgaagtggcggcgcaccgcatgccgtgcatgtgtgaattcgtcgaggatctgaacgcgcgtttaggagcagaatggctaaccacagcaagcacgcccgatcgtctaccttcgccatgccgagcaagtcctcgctggtgaagatcgccgcaacggtcgcggcggtgggcctgttggctaccggcggcattgtgtcgcgcaatctttacacctccgcggagcagaacacggccaatcaggtcacggccttctccgtcaccgattccgccgaagcatcccgtggcaacgcccgtgagctgctcaatggagacacctcgtatgtcaccgtgaagatcaacggcaagtcgcgcgtggtgcccggtaccaatttcaccgacgtgaagtccgtgctcgacgcgggagacatcacgctcgaaccggaagacacggtctccccttcgctcaccaccaaggtggatgagaagaccgtaatcaccattcagcgtgccggcgcaagcgttgaggtttccgacaccgccatcggtttcaatgtcgtcaagaaggaaacctcaagcctgccggaaggccaggagaaggttgagacggaaggcgaagagggcgtgatggaaaccacgaacctcgtaaccaagtccggcgacaccgtggtctcctccaatatgatcagctcgtatgtgaagaaggctccggtcgacaaggtcattctcgtcggcaccggctccacttcgtcgtcgtcctccagcgcttccgcgtcgatcggcaccactgtgccggcgggcgaaatgcagcagtgggcccacgattatctgctgtcgaacggctacaccgaagccgatttcaccgccaccgtatacatcatcacccacgagtccggctggagcgtcaccgcaacgaatccgagttcgggcgcctatggtctgccccaggcgttgcctggcagcaagatggtgagcgcgggcgccgattgggccaccaattatcagactcagctcaagtggttctggggttattgcgcgcagcgttatggttccattcagggagcctacacgtactggctggccaatcactgctattaaatcgcgattgatcatcattgattgattcgataatgatatagtttgagctccgtaatattcgaagatattacggagctcaaactatattacgatcttaaatatcactgggatatcgccgatttcacagggcattgttggaaccgatcaccgtggcttccttgacgtcatcgatcttcctgcgcctgcggccgccgtgaccggccttcggaccacgcttgccgacggtgccgctgcggaccccgttcttggcatcgaagatgatcacgcgctcatcgctgtgatattcgccgtccagagcgaagaaggcgatcttgtctgcaggcacttccgggaaggtgaagaacttctgcgtcgcaacgagcaggtcaaggttgcgggtggtgacggaagacggcgtatcggcgttcggagcattgaactgaagagcgaaatcgtcattctcatcgcatacctggattgcgaacttgccgcgctcgtaattcaccagcagcttgacgtattcaggacgtccgagaacttcggaaacacccttggaaaaacgaacggattcaagcatgaccgtcatggtcaacttgccaccagttctttcgccaacttctttgaaaccatcaagaacggacatgtaaatccttcctttattgtaaataactacgtgaaatactgtacctcattgttaagaataaaacgaatcgaatttcggggaatatattcatattttcaagaacacaacgtaatacgaaaaaacataccgcagaccatgcttgtctcaatgagaaattcgatacggttcagccagcgcgcttcctaagccaactcgatgggcacaccaccccttgtcaccccgacggttttccgctaaaaacagatgtggcaacccctacctcacccccgcactacgggttgcgcaaattgcaaatactttgcagcacagttttccaatttcatataggaagcgctgaaatatcgtgctttatgcatgcatatcatttgcaaaacggttcatataggggctatcttgcgcaactatcttttgcaatcattttcatttttacaatgattttctcagtaacgattttcattgaaaatccgccatttttcagcatcttttacactccaaccgggatagaatatacactacacggttgcagtattgcaaacgctatcaaagaagatgggacccccgtcgcaaagcagcggccacgataacggagccacaagccccgataccggcccaaacacaagaaaaagaaggatcaggaaggtcaatgaaacatcggaaaccaactcccgcctggcagaagctgggtctgcgcgtcagcaagaagctggcggtgggcgccacagcccttgccacagttttcggcggactggcagtcgccagcgtctccgcacaggcgagcaccgaccgtaacagctatgcggacaccgtaggcaacccgactttcgaagcagcacgcaaaaagtacggtctgaccaaggagatgaagaacggcgccattctgcacgcgtggatgtggtcgttcaacaccatcaccgaacatatggatgagatcgccgaagccggttacacctccattcagaccgagccgatgagcaaaatcaaggtgaacgacgccaacggcaagaaattcaccgaaaattggtattacgtgtatcagccgacgaacacctccatcggcaacttcgtggtcggcagcgaagacgacctgaaagccatgaccgcggcagcccacgcgcatggcatccgcatcatcgtcgacgttgtggccaaccacttcaccgccg

SEQ ID NO: 859 - DNA, 2270 bp, Unknown
  gut microbiota DNA sequence
cagcctccaattgacgcttcaatggtggtaaattgatttcatatgcagcgacctctttctttgaaagttctttaaaagtagccccacgtcccaatacttgcaattctgatgatcggttctttagatatctatacaaatattcattgtttaccgcatcagaacagacaaggtttttgaatccttgattacaacacattggttcaccggcgatagctactttgccgattggcgcacgtgtcgtaagtagaactgttccttctgggaacatacgtagcctcgcacttgcgaatcctgcttctgtcagatgcttcgcagtgttatagataacatgactgtcatcattcagctcagatggggttatccacttgatatctccgccccaataatctttaactgtagttttaggagttgcacctgacacgatagagcagatatcactcagcttcactttctgcccaacaaattggggtttgctcgacttcatgagatgaatttgcggtgggaacgcttgacattatcctgatcaacctgcgcatagcaaagcgtggtatcgattttgctgtgtccaagcaatacttgcacttgttctatcggcatgcccttgtctatggccttcgtagccaaggtacgtcggaacttgtgcggatgcacgtgtttgacgcccgaatcgtcgccgagtttgcggagtctggcttcaactccgctgatttccaaccttttgaagggacgatgcagggaaacgaacaaggcgggctcgtcatccattcgctgttcaaggtatacgagcagatgagttttcgcacgggcatcgaagtagactcgtcgttccttgtctcctttgccgtggaccacacattcgcgtgcatcgaagtcgatatcacgacgattcagctgcaccagctcgcctaccctgatgcccgtagacgtcaataaatcaatcattgcaaggtcacgcgtctccttgcaggagtcacggagttgttcaagcgattcgtccgaatacacgggtttcaacgttctcgaagtcctgattttcttgattctacgtacagggcttttgtaaatgtagtcttcctcttcaagccaggagaagcaactggagatgacgcggcggatgttgtcgattgttgtcttgcctacgcggccatcacgcgaatatcgtgtgagatagtcgcgaatatcgtcggtggtgatgtcgtgagccggcttggagatttccgtagcaaaacgggacaatgtggtcgcatagtaacgcaacgaccgttctgaacaaccttcgagcttcttcgcggcaagaaacaagtctatgcattcggtcattgtttcgggaccgcgtggattcccacctttctcagttagacaggccacaagcaccgtatgaagttccgaagcctgctcatcattcagcataggggccataagacggtcaattcgttcgattgtctgttgcatgagaaaaggcacctccttgttggtttccctacaaaaaaggtgccgtaagccatcgagaaccttgcaatatcagggtttaacgaactctaatctccgaaatactcctgagcgaggctatcgtaaagcatttgcagtttttcgatctgttgttgggcgacaaatcgcgatttgttaacttgtctggcgaagtcgacaaactcctgctgaagagagagcggtggtatcggaatggacaacttggatagtattgcttgactaaggttttggatgttggcgcctcttccaatcatggcttttcgcatcgaatcagacttcatgcagttgagaaaatagtcgaggtttatatcattcgactcaattcggaatcgaatgcaaaagccactgaatgttaacttttcgtctttcgggaaaactgctaggcaacgaccaactagagctttgttgccatttgagcgaacgaagacaatatcgccgttcttgagcatctggctggcgtttggccttccattcaatgacaccgtgccaatctgactcatgtcatcaatcgaatatttatctttgaaatctctgacgctcaggcatttgacttcatacccgttgtcaacagatttgaaattgactccattttttagttcacccatagattctagacgttttgtttgccaattcttcgggttgataatcggatcgccgaacatgtcgacaaaccgggatttgacgagagcatcaaggtccataagatgcgattccgctatcgtcacttgattcgaaatcatttcgaggttccgaacaatactcctttgaatttctatcgaggg

SEQ ID NO: 860 - DNA, 30469 bp, Unknown
  gut microbiota DNA sequence
attttcttttcctgcaatggagtacgggaacgttggcgttcccatacagtcgaaaactggatttgcaactctggtctccttttttgagaaaaaaccagttcgttttgagggtagtttgatggaccaaggcaacatgaaagttgtcggtggcaccgcgagcagttcgtatagggtatttagctcttcgacggtgatgtcgcgttctccgctcataaggcggcgaaatttggaatatggaatttcggttatgggctgcactaattctgtgagtttcggagagcttaggcgaaataatcctctcaccgcattgaagttgttgctgacaacttggcgggtgtcttttgcgctgaagtatttccccatgtttagtcctctctttactgctttcttaattatacatattggcaattctttaatttgacaattccatagttgggcgtaatactagaaatatctttccgaaaatggaaagattgtaatgtaaaaatgctatctaatggtttgcttctactgttctagttcactattggatagtgtgatagtgatgaaggagccgatatggctagcaagattgatttgaaggttccggggcaggctataaggcttattcctcatggtgagggctctatggtctacgagtatgtggatggcaagcgttccgagaaggtccgtgagctgaacggcaagccgatgatgcgttattccgcgcttgtgtccactgatggcgtcagctgcttgggcgacggctatctgtacaccacttcggagatcgttccctcgttcggtgaggtgttcaaagggctgcagaaccagcaggctatcgtttccatatcgcctcgaagcgagttcgagactcgcttgagcgtgaccgtggaaagcatcattcctgacagggagatcgtgcagaaatgatgtttctttttggatttatatttggtgcctttgttatggccggtgttctgtatgttctttatacgggacagtggtaccggatccctttgtggcatttctacgatgctgccggtctgaccaccaccagtgaggatttcttccagttccagggaaagacctatacggacaggcatcgtccgaagatgcgcatgctgcggcttacggacggtcgtttcgagttcgatctgtatcccgcctatgggaagaaactcgctaactacatcgataagaccgaggagatggcccaggcgttgcacgccgctgccgtgaccattgagccggctggaatcggtgaccacgggcatgtgatcgtctacatgaccgatcccattcccgccaagtattccatcgacgagctgtaccgccatgagcgctgaacgtggcactttggtccctctcggtctgaccgacacgggcgcggtgttctacgccgtgttctctcatctgctggtggtcggtcagaccggatcgggcaaggggtcggtcatctgggcgttcgtcatgggcgtcgagcggatgctggtgggatccggtcaggcgggttgggtgcgtttctacggcatcgatccgaaacgtgccgaactcgccggcgtgcgctacgggttcgaacgcgtcgctttcgatcctgaggaacagctggacgtgttgaacgatctggtgcgggtgatgcgcgaacgtcaatgtctcggcatgcgatcgttcaagccgtcccgtgagttgccgtggatcgtgctggtcatcgatgagttcaattcgttcgaggtctcggccgatctgaggtggaagcgcgaggtgagggcggcgttgagcgcattgctttcccaagggcgttccgctggcatcgtggttctggcggcagcgcagcaggggcagcgcgaggcgatcggcccgtaccgtgaccacttcgtcacccgtattgcgttgcgtgtcggcagcagggtcgagaccgatgtgatcctcggctccggcgcggtggagaacggcgcgttgccgcatgagatccctcccgcgtccgtttccaacggataccgtaccgccggcgtggggtacggcctgtcgcttgcgcaatcggggttcgtccggttcagggctccgttcgtctccgatgatgacatacaagcgtgggatgaatcccataaatctaacaagacaacaaacaacaattgaagggaatggacatggagggtttgaaactctatgtggatggcgaaaggctttcgcttggttacgttctgcgcttctgcggtgagcggttggatcttcgcgaaccgtccgaaaaggcgagcatcgcttctttggcttgggcggggtggacgcttatagcagatgagctccacgataggtatgtgtacatactcccgagcggcatggcggaatgcttctccgaggacgaacttgaccatgacgagatcgatgcatgtgtgggtgattgcttcgatgccattgacaggacgattcgtcaggccgttgatggcggaatgttcgccatggcggtggattgcggggcgtccgatggcaagaagtgatgggaaaaaggattttcccgatgactaccgtctgctctcgacctccgaggcggccaaggttctttcggtgtcgcaatcgcatttgtgcgcgatgagatgcatgcctgatgagggcggtttgcgtgtcacgtatgtggggtccaagcgaactccacgatatgccatgcgtgatgtgatacagtttatcgatcagggcggcactcccgtgcggaatggtggcttcctgtgaccgtgcatatcagaacaagagtgggcaagggcggcgggaagtcctatcaggcgcaggtgttcaaaggcaagaacacttacgtcgcatcgaaaaccttcgatcggcgtaaggatgctgttgcatgggggcgagaaaaggaatccgaaatcaaatcgggtgtcgatcctgtctcgaccaaggcttttgtcagggacgtgctgaacgcttgggaagagattctgcccgggcagatcgcggaatcgacggtgaaatactacgggtcggtgatgcgtgttcatgttcctcaatggcttaagggcaagcgattgtgtgatgtcaccgcgtatgacatgcagcgtgttctgaacgcgattgatctgtcggccggttccaagcagcgtatccgtacggcgttcatgtcgttcttcacgtggtgcgtggataacgggtatctggcgaaatcgcccatgaagggtacccgcctgccacgggccgatacggttgaaatgaggatgaacccgttcacgtggccccaactcgaggcgttcgcggggaggatcgcgcaacaatacgatccgctcatggccgacgtgattctggtgctgggctacacggggctgagatggggcgagatccgcgtgctcaaagtgaaggatgtgcagctgaaaccggtgatgcggttcacggtcagggcatcccagacggagggtatgcaggtcaaatgcccgaaatccgggaaagtgcgtcatgtgccggtcgcgaaaagggtcagaccgatcgtgctggagcacatcaaaggcaaggatcccgacgatctggtgttcaccacgcgcagaggagcgcaactgaacaaaggcaacctcaaacgcgcggttcattggaaggagctgtcgcaaggacggcgtctgcatgatcttcggcataccgcggccacggaatggctcaggcatggtgttgatgttctggtggtgaaggaatggctgggccactcgagtctggccgtgacccaaaggtatgttcactacctcggaacggacgcagatattgcagccgtcatgaagctggatgactagtcgggtgtgccgccggcattgacaattggcattgacattttggcgaaaaacgctatttcgaagggaggccgaagattggaggaatctcggaaaaggctttatttcaacaaaaaacaatgattgtgggcgatgagggactcgaacccccgacatccaccgtgtaaaggtggcgctctaaccaactgagctaatcgcccgcaaagctctactgtacagtattcgttgcctgcgacagcttcaacgtgtgtcgcgctgcccaataggggttccttccatagcaaatgcgtgaaaaatggtgtgatttgagtgtcgattcgctgaattttccacgagaaagccaaaagcgtcgaatcaatcacgtagagtaaggacgttgagtagtgcagtaggaggtcgatagccaatggcgcaggaacctgaatccgagaggaacgcatcggggatcgctcgtacttcaaagcgcaagtgggggtatgattccgaacaggtggacgcttttcttgagcgtgcgcacatgctgtacgaaggtgagggagcgcaactcacccagcatgatattcagaatgtttctttcgatttggtcaaaggcggctatgtgatcgcccaagtggacgcggcccttgctcgtttggagcgcgccgtggtggacaagcagaccacatgggagatttcgcagcacggtcgtgtggcgtggaaagcgcagaccgaaagtctgttccgccagcttgacgcccattccaaacgtgagcacggcgaacgtttcaagccaggagaaggcaaggaaccgagctatgaccgcaagcaagtggatcgcatcgtcgatcagtgcctgacgaaggccgctggcgagctcggcgttgaggaagtgtcggaagacgatgccaagaaacttgtcgatctgaactcccagaccgtggcgaatgtgatcttcacccagcgcaagggcaagcgtggctatgacgagcgtcaggtggattattacctgaacgaatgcgtgcagctgctgaccagactcgaatcctatgctcgtgtggccgacttcgtgggcgagccctccgaaagcgcgatgaccgcagccaatccgtccgcaaccagtctggcatcccaagagacgcaggtggtctcgccgttattcgccgttccagccgtttccgcagaacctattgcgcagcccgctcaggttcaaaacagcactgactccttcgacgctttgaataaggcggaacgtgagattttcaccacgcctgcaacgtccccggtgagcattccggccactcaaaccgctgcgccgacgtatgctcccgtggttccgcctgtgttccagccaaccgtcagcaccccgtcggctccggtaactccggcagctcctgtaacgccggaacctcaggccgctccggttgctccagcggctccggaacagtcgttggcacacctgttcaaagcgtccaatgcggttgccgaggagccatcttccgcaggaacggaaaccgaagcgttcaatccgctttctgatgatggcgcgccgagctatgacgctccggccgcgcctgcggctcctgtgattccagacacttcggtcgcacatcagccggaagaatctcacggcatcaacatcgctcccgattcttcgttggctgccttggcgcagatggcccagaacatcgacgctcccgatccggtcgaagacacgttcaccccgcgcatgccaagtctgtcgacgccgaaccttccgcaggtcaataccgactcgattaatctcggaaccttgccgaccgtcccaccctccttcacgctggaaccagcaacctccgcagatcactcggcaacggcaactcccgttgaaccggcgaaaccggcagaggaagagaagaagaacgaaaccaagccggcaaccaatccgatgttcgaagcatccaacagcaatctggatgtcgatattcccgacctgtcgttcccctcttttgaataggcaatcgcactgaacaggctgacgtgaccgtcagcctgttttcgcgttcacacgaataatccaaaacaaatacggagcacacgcataacccatgcaaacctcaaccgtagtcattctgggatccaccggatccatcggcacccaaggacttgacgtcatctcccgccatctcgaccgtttcaacgtggtcggacttgcggcaggcggctcccacgtggaacttctggcccaacaggcggtccaatttcacgtttcgaaagtcgccatcttcaacacaaacgcggtccatgcgctccaagatgcgctaaaccaagccggcgcaagccatgtggaaatcatggccgggccggaagcggtaatcgccatggccggatccggtgccgacgtggtgttgaacggcattaccggatccatcggccttgaaccttcgattgcggcactgcaggcaggatcgcagctggcgctcgccaacaaggaatccgttgtggccggcggtcatctgctgttcgacgcacaggttcgtgcgcagcagatcaatccggttgattccgaacattccgccatctggcaatcgttgcgttcgggcacgcacggtgaagtgtcgaaactcgtggtcaccgcttccggaggtccgttccgcggttggaaacgcgagcagatgaccgacatcacgcctgaacaggcgttgaaccaccctacttggaatatgggtccggtggtgaccatcaactcgtccacgttgatgaacaaggggcttgaagtcatcgaagcgagccgtctgttcgacgtgcctccgagccgtatcgacgtgaccgtgcacccgcaatccattgtgcattccatggtggaattccgcgatggcgccaccatcgcacaggcttcaccgcctgatatgcgtctgccgatcgcgcttggcctatcggctcccgaacgacttggcaacatcgcagcggcctgtgattggacgaaagccgccatgtggacgttcgaaccgcttgacgatgaggcattccccgcagtgagcttggctcgacattgcttggaagcttccgaaaagcatacggccgtgctgaatgctgccaacgaacaggccgttcacgccttcctcgaacatcgcttgccatatctcggcatcgtcgataccgtcaaggaagtgttggacgaaatggatgcggaactgcgcggcaatccgctattcgcttccgtggaggaaatgagccaactcgagctggaagcccgtcgtcgagccgacgacctgataaacaagtaacggaaaacgaaacaaaacaaacagacgaaacgtaagtgacgcaaggctccctaagtcgggagccttgttattgcaaggatttgacgtatgccagaaatcgaaaagccgttccgtaaaaccggtgaggcagccattagcgaaagcccgctgcatccgcgccgcaaatcgcaccgtattatggtcggtcccgttccagtcggcgggggagcgccaatctcggtgcaatccatgaccaatacgctgacagccaatgttcccgcgacattgcagcagatcgcggaactgaccgcagccggctgcgatatcgtgcgcgtggccgtaccaagccaggatgatgccgacgcattgccggaaatcgtaaggaaatcaccgattccggtcatcgccgatattcatttccaaagcaaatacgtgttccaggccattgacgcgggctgcgctgcggtgcgtgtgaaccccggcaacatccgcaaattcgacgaggttggcccttccatttgcaaagccgccacggacgcgggcatttcgttgcgcatcggcgtgaacgcgggctcgctcgataaggaactgtatgcgaaatatggcggtccgacgccggaggcactggttgcgtccgccatgaaggaagcgcgcatgttcgaagacgtcggcttccatgatttcaagatttccgtcaagcatcatgatgtgatcaccatggtggaaacgtatcgtctgctcgcttccaagggtgattggccgttgcatcttggtgtcaccgaagctggaccggcatggcagggcaccatcaaaagctgtttggcattcggtgcgctgctggctgaaggcattggagacacgattcgcgtttcgctgtcggcaccgcccgtcgaagaagtgaaagtcgggtgcaagctgctggaatacatgggattgcgtccgcgcaagttcgacattatctcctgcccgagctgcggtcgttcccaggttgatgtgattcagttggccaatgcggtgaccgaaggtttaaaggatgtgaccgcgccgattcgcgtggctgttatgggctgcatcgtcaacggtccgggcgaggcccgtgaagccgatttgggtgtggcatccggcaacggcaagggacagattttcatcaagggcaaagtcattcaaaccgtgccggaagaccagattgtggaaacgctgctggtcaaagcgcaggagatcgccgcgcagatggaagcggacggacaggtgcccgtcaacgccacaggaccggtggtggtgccggtggcgcaaggcaattgttgatttcgctgaccgcgggcggtcgattgcagattgtgatcggccgcccgctggttttgctggttgtcgattgccatttcagctggagtcggtacaatgaacggcgtgtcagatcaggaacgtcagtcagtcatgtccagcgcggagagccaatccagtcagtggacgaggggcagacggctgatggtcagtctgcctatcttcatcatcctgctgggcattctggtgtcggtatccaatttgacggcatcgtcatgggagtacgagccaaccggtcaaaccatcgaaacgttatcatccgacacggcagtgaccttcgataatccttccggcaaaacccttgccaaacgaggcgattacgaagtgacgcaacgatatgtcaccattgaggcgaaacagccgtcaaccggtgaaatacaacaggtcaaagtgttgattcgagagccgaaagacgcgggaaacaatcggcccggcgtggtgttcatgcatggtgccggatatggcacctgtgacaactcatttggagacatggccaccgatctctcatccgcaggcttcgtgacggccgtgctcgacaagccggtatggtccaccaacgatgcgacccgtgattacccgggctccgcggccatttacgatcaggtcatcaccatgttgcgtgatctcgacaacgttgacgcttcgaatgtcggcatttacgcgacttccgaaagcacctggatttcctcatatctgcttgatcaagaccccgacgtggcattccaggtgttgctgagcccaatggtgtattcgccacgacattcgttgggattccttgccgcacaggatttcgcgctggtcggagcgcatgatggataccagtccattgtgcgccgcgcgttcaacatcgatgcggaattgttcggcctgaccaatctcgacctcgacacgttgaatccccaagcctattccattcccacgcttgtggcatacggcaccaaagacgtgatgaccgcgcaggtggaaggtacggagaaaatcatcgacatggcgcataaggcgggcaattgggacgtgaccgtgcgcacgtaccccatcgccaaccatgtgctccgactcggcgacgaatccaacagcggcactccgttcgccgacgcctacgtggatgatgtaatcagttgggctgtcggcatcacgcggggactgcagcagaccagcgagcgtgtggccggtaccaacttgtatcagtcgattgcggtgccgttggaattgcaggcgaacagcgggctgaccatttatctcgtggtgctgcatgtcagcatggtgctgttgctactggtgatcggcgtgctgtggctgattgtgctcgtacgtaagatttgggcgcatgcgcatcgacgccgatatgtgttggggctgagacctgtgttcaaaaatgcgttgattacgcttgccgttgccaccatggccacttttgtgctgtttggtgcaggattgggcgaagtggttatgggcgtggtcaagctagcgtggggtggcgctcccgccgaggatccgggcatgatgtattggagttggccggttattcaaatggtgtgtgttgttgtggtgtgggcgtggtcccgcgtgttcatgcgtcttatcgaggaggcgacgaatcgtggccttgcacaatggccaccgcgtaaaggggctataggcgcgattgtgagtggccgccagccggtgctcgcgtcgacgaggttcggccgtgtgatgttttggatcacggcggtcaccatgctgtatgtgctgttggtgttcgcgttctggggattgtttatttactgatatcgcgggagagtgcggctggcgcgagaacgtgcggaaagtatagatagttcagttaagaaaacgagtcgaggcgaaggaggtgtgtgaatgccgttgtatcaggacgagggtgtggtcttgcgtaccgtcaaacttggcgaagctgatcgtatcgtcactttgctgacacgtgaccatggcaaaatccgtgccgtcgccaaaggtgtgcgtcgaaccaaatcgcgtttcggaggtcgtttggagcctttcatgcgcgtctcgttgcttattgcggaagggcgttcgcttgatgtgatttcccaagccgagtcggtgtcggcgtatgcgagaggcatctgcaccgatttcaaggcgtataccgcagcgaatgtgatttgcgaaaccgctgacaagctggtggtgacggagcaggagcgttccgtggcacagtatcggctggtgttgggagcgttgaatgccctttccaagcatgcgcatgaggctgctgcgattggcgattcctacgtgatgcgtgctcttgcgatcgctggctggacgccgcgtttgcgtgcctgcgtggtgtgcggggagccgatttctgctgatcgtccatggttcttttcgatttccgcgggcggactaatgtgtttgaccgatcatattcgtgaatcgtttgatgtttcgtggaatgcgatctgccagctgcaggcgcttgtagacggcgattggggagagctggacggtacggcgttgcttccggaaacccgacaaatggtggaaaaatggggtgaatactatttggaacgtccgattcgttccatgcgcttgctagattagcgggtatggcttttgagaacgtggattacaagtcccttgacattccggcggcaccattttctgacccgtcgattattcctgattttccgaagaacaaggttccgcgccatatcggcgtgatcatggacggtaatggtcgttgggcgcagcagcgtgggctgattcgcaccgacgggcatcaggctgccgaaccggtggtgttcgacaccatcgcaggtgccatcgaagccggtgtgcgttacctgtcgctgtatacgttctccacggagaactggaagcgttccccgcaggaagtgcgcttcctgatgggcttctcgcgtgatatcatccaccgtcgtgtggagcagatgaacgcgtggggcgtgcgcgtgcgctggtccggccgacgtccgaaactatggaaatccgttatcgacgaattggaaaaagcacaggaacgtaccaaaaacaacacgaccatcgacgtggtgttctgcctgaattacggcggacgtgccgaaatcgcggatgcttgcgcggcaatcgcaaaggaagtgcgtgacggcaaaatctccggcgatcgcgtaacggaaaaaatgatttccgagcacctgtacaatcctgatattcctgattgcgatttggtgattcgtacttccggcgaacagcgcacgtcgaacttcctgccgtgggaagcggcatatgccgaacttgatttcgtgccggaactgttccccgattgcggtcgagacgtgctatggcgttcgatcgaccactacattcaccgcgaccgtcgtttcggcggcgtcaaaaagtagtttttgctgagttgattaggttaactgcggggagaacataatgttctccccgttttgtttgttacaacgtgctgattcgggtggtgaaggtggggacgaaacgggaggagtcgacttggaaggctacgtggatgcggggtgcgttggagtcgatcagtccggcgggatcgccgatggttcggcctcgggtgccgtggaaatcgccggtttcgagttcgactttcattggtaggtcgatacaggtcaccagcgacggatccacggcaacggcggcggccagcggatcatgcaatggcatgccctgtgaaaacagtcgcgcgtcggccttgaggtttgcggcaatggaaaaatcagccatgtcggcgaggaatacgcgcacatcggaagcagatgggcttgcagccacactcgaggttcgagctgaagctgcatttgaactaccagctgaaccatcaagtgaatcagcgacttgggatgcggtcgagctggtaagtgtgtcagcattcgccgcttcgcgccaagcatgggtcgcatcggaacccatcaggcattgatgcgttacgtccaagccgaccatggtgatgtcggcaccggaatggaacacgcgatctgcggcttccggatcctgaatgatgttcgtttccgcagtcagatcccaacagttgccttcctgcgtcaacgtgccgcccatcatcaccagtttgagtttgccggcaatatccggtgcggccgcgatcgcagcatcaatatcggtcagcggaccggtcgcaaccacagtgacgtcgaaaccataagcgcgaacctgatcaataatgaactgcacgccttcggaaaccgagtcggcggaagaatcatcaacatgaataaaagaagccgaatccgtagtaagcgacaattcaaacgaatcaaccgcaggattcgcatgaacatcatccaacgcatatccgccaacggaaatcagactacgataatcacgagaaaaaacagtatcagaaccggaattatccgaaaaaatatctgaaaaagcagtatccgaagacgaactatcgcaagccgggccgaatcctcccaatccgtccgtgccgtgaaactgcgcacaacctgcatccggaatgaaacaccgagcccatgaaggatgcgacgatccacgtatcaccggaatgtgccgaagccccaaccgttccagcacatacgaagtattgcgaaccgcagtgtcgacggaaacattgccgtacgtgccgatcacgccaagcacgtcaacagtgtcgaacgtcgcaaggtatgccaacgccagtgcatcgtcgataccggtgtccacatcaagaatcagtcgtgtcatatttgtatttaatcaaactcgtgcaatgaagccaaatgcaacgcataatggtgcggcatcccacaaaccatgttcaacccgaactgagcaagcagtgttgggcatgaaataaaaatgcaggatgccgtattccaatattttcgattattcgcacctaaacgggttacaaacctactcgttcaaacccgattatttcaggaattcgtcggtggcgagatccttggcttgcggagcgtcgtgcaccaccttgtcatgcgaatcggtgtaggcgtcttcctgagcgaggaagtcgaaatactgctgggcgccttcaacgtcgttcgtaccgaacgtgaacgaaccatccttgatcttggcgggatcgccccaatactgaccgtccacaatggttttcatgcttttcttgacgaaatcaagcttgagattcgcgtcgggagcttccttcacaaggatcttcgctgcatcgtcaggattcgaatatgcgtactcgtagcccttcttggtggcttgtacgaacttcttcaccagttcgggattgttggaaatcgtcttgtcgctggtgatcacgccaatagtgtcggcattgccgggaacgccgtaatccggttcggtaaagcagttgagcttcggaccgtacatgtcggcctgcacaccctcccaagtggcatagaaaccaccgaaatcagccttgttgctggacagcgtttggaacgtggacgtgccgacggtcaccttgtcgaattcgcccttacctccgtccgactgaatcatgcgacggatcaccgcatcggattcgttggatccgaacgtggcgaaagtcttgccgtcgaaatccttcggggatttgatttcagtgttggaagcgagcgaacaccagatggcgcttggcttctgctgtacctgcagcacctgcttgatggttgcgcccttaacagcgtacgtgcttacgttggtgaggttcgacaatgcgaagtcggccacgccgttgttcacggcctgttcggcaccggcctgtgccacggccacgatatcaacgtcaagacctgcctctttgaaataacccttgtttttcgccacatatacgccgatatgattggtgtcgggcgcccaggacagcatgaaggtcactttggtcagatcgctgctgccagatgctgtgcttgttacggaatcgttgctttgtccgcatgcggtaacgctgaacaacatggcgattgcgctgaagagtgcgattattgtgcttgcgatgtgagtacgtgcggtggcgtcatgcctgctgaagatgctcataaagcgatttcccttgaatctgtattctctatcgttttctagggatatgctgcgagcggagttcgggcagaaaacgatacgaagggcctcaggcccccgctcgtccaatgcccccgacattccttacggtgcctagtgaaaggcgtggaatattgccggtttgccacgcattggcttaacagcgggttttattatacgtaggcagcgtgaccgacatgcaatgcggagtggcgaatgctgcgaatgctgcgtttgcagaaggccgatgatgtttggcgtgtttgacttactggtctgcatcgggatcggcgtcggcatcagctgggccgagcaggacgcgttcgctgaggttcaccaggcacatcagaacgccggtgatggcgatgatgaccagcgtcgccgagaagatcagcggtgtgcggaacgagttgtaggcggcctgtagccaaatgccaagacctttgcgcgcgcccaaatattctgcggtggcggcggtggcgaaaatgtatgcggcggaaacgcggatgccgccataaatctgacgagcggccacacgcagcttcacatgccacagtgtccacgctttcgtggcgccacaagtcagcgcaacatccgaataaaactgggggaccgcttcaagcccacgaatcgtctgcactgcaatcgggaataagccgaataccgttacgatcacgatttttccggaaatctcaaagccaaaccagatcaaaaataggggagcgatggaaatcaacggcatggtctgcgcagctgaaagcaacgggaacaatgcggcgttcgcaatgcatgagcagtacagcagtatgccgatgagaatgccgaacagtacggcgaacaggaatccgacggtaccttcaagcaaagtgacttgcgtggcaggccataacgtcgaccatgtttcgacggtggcctgtgcgatttcgcttggcgcggcgatcatggtgctgggcacattgccgatgcggacccacgcctcccataccgccagcaacagcactactgcaataaccgtgggaatacggcgtttgcaaacgtgagcaaaggcggacaaagcttcgagaagttttgcgacaatgccggcttttgaattcgtgttcgcagccatgcccgaacccatgtgcgaactcgtgtttgagggtatggatcctgttgccgaatccctgcgttgaacgtgcgaaaccgccatcgttcaccttgctttctgcgccatagtgggcgcgcacgtgaccggtggcgagaaatcagtaaggtgaggagcctgcccgcgttccggtcagaaaagttcattaccggggtgccagtataaagcactccctaaaccacgttccaaaccaaaacgaaaggcgggtttcgtatctcattcgacacgaaacccgccttactctttaccccttgctactgccttggattagcctcactccagtccgatggacttcatggtgtggagcttcaaggacttgacctcaagcgtgccggattcggcaacaagtttgatggctcgtgggccttcggaagcgtagctgaaggagctcatggcctgacggccgtcgtttacgtacacttccacgcagccgcgatccacaaacacgcgcagcttgagctcgccggaagccagttcttcggcggaaagcggcgcggtacggtagccacgatcgccctgagctgcggcctgacggtcgatcaccacgcggccgatctgatcgtcgaacgccacatacgtgtaagagccatcctcagtcgcgtgaatcttcagaccggcgcgttccgcggtggaggcgttgagatcgatggtcatttcgatttcaacggcttcggcatcgtcggcaatggtctgctcgccattgacgtccagcgagatcgcaccgaaatcggtggtgttttcgcgcaagccctccatttcgacaaccggagcggtgtgcagatcgccgtcggcgcccagggtgatctcacgcggaagggtcaggttgccgcaccagccgtcatcctgcatcggaatcggctcaacgaacgggctcatccagccgtatacgatctggcgctcgccatcgttgaaggactgcggagcgtaatagttgtggccgcaatcccacaggcgaaactcggtttccggctggaacgcctcgcccggggtccacgtgccgatcatgtagccggcgttggaaacgttgcggttcatgaaaccggaggcctttgcgcccatggcggagaagccgatgacccacttctcattgccctcggcgtccttgatcgggaagaagtccgggcattcaagcatgaagacgttcggatccgggtgttcgaacagcacacgctcgtaggtccaacgaaccatgtcatcggaggagaacagccacatctggccgcgcttttctacggaggagacaccgaaggtcatgtaccacttgtctccggtcttccataccttcgggtcacggtagtggtggtcgaccttatcgagcgggcaatcgatgatcatgccgcgcttggtggcgctggtcagctcgtcgttgtctggttcggcgatcatctgcacctgccagtcgccgccggtgttgtcgatgccgttggcccagcggtggccggtgtagtagaacttgagctcgccgtcatcgccgatcactgcggaaccggagaacacgccgtccttttcctcttcgagagtcggggcgaacatgatcggctcacgcttccagttgagcatgtcgttggaggagacgtgaccccagtgcatcgggccccactgggtgccgtacgggtgcagctggtagaacacgtgccaacggcccttgtagaagcacaggccgttcggatcgttgatccagccgccgttggaggcgatgtggaacttcggataccaacggttgttgcgcgcggcggccatggctgcaacgcccgcctccgcctgtgccagagcctcgctgtggttcttgatttcgtgaaggacgggtgcgtccggggtgaagccagtcatcgttgaatagcctttcttgtgattgttgaattgctgcttattgagttttgagtaaaagttgtaagaatgctgcccgaagcggaaaaaggggaaacgcttcgagcagcacgattcagttatgttcttggccggacttgcgattgcgttcaggcgttcgcttctgcagcggcctgggccttgagctgcttgtcggtgtagaacggatcaccgccgacttcctggtcgtccttcttgatcacgaagaagccgtagatcagggctgccagcacgatgccggagatggtgaagaaggtcgggcgatcgcccatggcgtcatgcagggcgcccatcggggtggagaagatcacctggccgatctgggaagcgatctggaagcccaccatgtacagggttgccgacagcttggtgtcgaagtgcagagtgaagtagcggaatgccggcaggcagaacagcggaacctcgatggagtggaacagcttgacgatggagacgctgaccggatcgtggaacacgccgcacaggccgatgcgcaggaacatcacggttgcaccgagcagcagggagttgcgcacgccgatcttcttcatgatgatcggaacaacacccatcatggcggactcgaggaacacctggaaggagttcagggtgccgtaggtggcgttgccgatttcagtggtggagaagagggaagcgtagtagttcgggaacatctgctgatcgaacacggtatagaaggtgttggtgaacagcatgaaaacgatgagcacccacagggtcggcatcttcagaacggaaatcatttccttgaaggacgggttggtcggagccgcgttcggatcagcttccttcttgagctcttccttctgctcggccggaacccagaaagcgtagatgcacagcatgccgaggccgcagatggagccgacccagaagttcagcagcgggttgatattgaacaggaagcccgcacacagcgccacgatggcgtagccgaatgagccccaagctcgggactggccgtattcgaagccgaacttgcgggagtagcgttcggtgagtgcctcgaacagggagcagccggccatgaaacctgcggacagcacgatggagccgatgagcacgccgatgaaacgggtggtgccgccggctgtcagcatcggggcatacacgaactgcacgaacgggccgacgagcgctgcgatggcggagacgaagatcacgagcttacgcttgatgcccagttggtcctggatggtgccgtaggcgaacatgatgaccagggttgccagggagttgatggagtagatctggccctgctcggcggaggtcatgcccagaccgtgggccgggtcggtaagccagcgggagaagaaggaccaccagatgccccacgagcagaagaacatgaagatgccgaaggagctctgcaggtaggaaggattcttccatgcagatcgagttgtacttgccatgttgttgtttctctgtttctctttgtttgtgccgctgccgcgcggcacctcggttgtgtgccgatgttgtgttatgccgtcattcacccagctgccgtgccaagtggatgaacatggttaaataatagcgcgtcaaatgattgacgtcaatcgattgacgtaagtaattccaacgcttttcggaagtgttggaattaagccgaaatgggggataaaaaagaaggcctctcggcgtgtcgtagcggacacgtcaacaggcctttcatgtggtcttagatcgcgaaacttagctgcgaaccgatcccttttctatcagcgcgcaatggatcttcgcaggaatcggcgaatccaacggcggcatgggagcggtggtattcggccaagacgaactgtcgacgggcttgcgttcgatcatcgaaataagcttgcatgcggcccaataacccatctcatagtggggcagttccaccgtggtcagctgcggttccagcgtttcggcgagcacgcggtggttgtcgacgccgacgatggaaacgtccttgccgacggtcagtccgcggcgtgccgcacattcgtacacataccatgcgcgcgcatcattgaaacaaaagaaaccgtcgggattgcgttcgtcaaacagtttgtcgacggcacgcaacgcaggaccattattgagcacattgcataccagcgaaggatcataggcgaaaccggaatcctgcaatgccgcctgatacccggcaaaacggccatcctgcgcaatcatgttttccgagcatccgatgtaggcgatacgcttgcaatcggcctgaatcagccgtttcgtggcatcataggcgatttggaattcgtccggctcgatgctgggaatctggttgtcggcatcggtggcatccaccatcaccaccggataatcgccgagcgaggctggcacgcgcgcaatgcgattcgacatcttcgaatagaagaaaccgtccacgccataccgtttcagcgtggcgatttcgttctcttcgctcgccctgccatcggtgctgaccgtgatgatcatgtacccgtaggtgcttgccgcgtcttgcgcgcccagaatgatgccgcctgcgtacggcgtggtggcaacttcctcgctgatgaagccgagaattcgcgtgcggcaagtgcgtaggctgcgcgccagaggattgaccgtgtagccgagttcgtctgccttctcgcgtacgagcgcggccaaaggggctttcacacgtccttcatccctgccgttaagcaccagggaaacagtggaaatggacacccctgccgcttcggcaatttccttcatcgtagtcatattcgctacactatacccaaatcaataagaaaagcgcgccattccttataaatagcgcgcttttcgatttttctgacgatctaacagtttattgcctgatttattccgacaggatttcgtccacaagcgcctgcttggcgtggatctgaccttcgaaacctgggcgaatgtcgagacggatcaccacgtcggtgcgatagccctggccagccagcttcatggtggcgtcgcgaatcaccttgagcacgtcgtcgatgtcgccttcgatgttggtgaacatggcgttggtttcactcggcaatccggattgacggatcacgtcgaccgcctgcgccacgtacgtggacttttcagggcttgcgccggcgggggagatggcgactgcggcaagcgtgttgatatacggtttgccggtttccgggttgatcggcacttcctgcttttccgcattgcgatcaagggtcatgttcgttcctttcgttgcgttcctatcggcctgatacgacttggattggttggtgcggatttggctgtcagcgccatttccaagcgtgatccatcggtccggatccgtgaccgaggtcaagctgcgcctccaaggcgcccgtcagatacagttttgcactatcgacggcttccggcaatgtctcgccaagcgccagatgcgatgcgatcgccgaagacagcgtgcatccggtgccatgcgtgttcggattattgatacgacgcgcgcggaaccaagtgactttgccgctcggttcaacgagcacatcgctggcatcctgcgtgccatgaccacctttgacgagcaccgcgcagccgaaatggccggcgagcatatggcctgccgtcaccatgtcgttctcactggagatgctctcgccattctcgtagtcgatcgcgtcggcaccctgctcgacggccaactcgcacagcgcctgggtttccggcatattcggcgtgatgacggtggccagcgggaacagcttggaagtcagtgccgcaatcgcgtcatcttcgataagcttcgcgccggacgttgccaccattaccggatcaagcacgatattcgtggcaccatgcgcaatcagacggtcggcgatcacgttgatgagctccacgctcgacaccatgccgatcttcaccgcgaccggcggaatatcttcaaatactgcgtcgatttgcgcggcgagcatttccggaggagtgttcgtgaccatggtcacgcctgtggtgttctgcgcggtcagcgccgcgatggcggtcataccgaacacgccattggcaagcatggttttcaaatccgcctgaatgccggcaccgccggaggaatccgatcccgcgatgctcaataccggtgccaaagtgctggtcatgaatgactccttacttgcttttgcttgcttatgatgcgaagttctgaaatattcgtgatccgtgattgctatttgcgcagtacgtgcccatgctttgcatcaccgcgcactgccttccatcgcgaaaccatattgcgggtcgcctcttccggatcgcttgcgccggcaatggccgacaccacaaaccagccggccgccttcgaatgtgcgagcatctccatatcgttggcggtcactccaccgccgaccacaaccggaaaatcactcgcatcgcagatcgcattgatctgcgcctcgtcgagcgtatgcccggaaccatcgttgccaccaacggaagcttccggcttggtagtggacacgtgcaacgggccggccccgatgtagtcgatgcagccggcaggcagctcgttgatcagcttcaccaggctttccgtttcggcagacaagcccacaatggcatcttccccaagcaacgcgcgggcttcctgcggttccaagtcggtttgcccaatatgcacgccgtcaactttgatgcccttgtgacgtgcctgccaaactacatccacgcgatcgtcgatcacaaacgccacggaatcggatttgccgttgttctcgataacctgcgcgatatcgcgtgccatgctggtgatgtctttcgcgtcggtgttcttggctcgcagctggatgaacgttgcacccccgcgcaacgcatcctcaatcacaccggtaatagtgcggctcttgcaatcctgcgggccgaccacaaagtaggcgctcatatcgaatgtatcgcgcatcgatgcatatgaataattgttcatataatcaacccttctcggtaagtgattcagaaaacctacaatgtgaaccggcaatcgtccatattttccacatacgcaattgccgaaccctgcatgatatgccgaataccatgcagggttcggcaaagcctagtcgatgatgatttcggaagcggcgacttcctcggcggtgacgttccaaagcgcgtcaagcagcgccacttggaaagatccgggaccggacgatttcgcttcggcgatttcggaagccctgttatacagcaatgatgccgaaatcgcggcgacaagcggttcggccacggccagatacgttgcggtaacgccgccgagcgaacagccggcgccggtgatcttcgtcatcatcgcgctgccgccgggcaaacggaacacgcgctcgccgtcagtcaccagatcgactgctccggaaacggccaccgcgccggctccaacaggggagtatttcgcaagatgacgagccactcgtttggccgcgtcaacggcggaatcgacttcgtcgacggcttccacgcctgccgggcgagtgccgggaacggtggaatcatgctgtgccaaaccccacatcgcatcgagcgcgatgatttcgctcgcattgccgcgcacaatggtcggcgggtatgtgcggaacgattcgagaatggcggtacgggttttgccgatgcccgcggcgaccggatcaagtacccacgtcttgccgttcttgtgcagtttgtaggcgatttccggtagcgcgtccttgaagaacggcaggagtgtgcccacattgatgtagttcgatccggcgatttccgcggtgtcgatcacgtcgtcaggcaggaagctcatggctgcggtgccgccggcggccagctgcgcgttggccacaagattcatcgttacgaaattggtgaacgactgtgccaaaggtgtggtttcgcgtacgtcgtttactgcctgcgcaatctgttcacgcaatgcagctgcatatgagtcatcgcccattgtctgctccctacgttggtcctaaccaacaggttcaaagggtcaggcatttgcctatctcagcttccgctttcgccggaagcccccctgcatgtacataacatacctaacctatacaaaggtgctgacagtggcacgttttgcataaacgaacaatcgacacgttccagttggatgccggtccacctgttatctgcgcgttgcgccgtcgggccagtcgattccaggatcgggcgaatgcaatacgttctcgtaaatgtcgttgcgcacgtaaatttcgcaggcgccttccgaccatgtgcttttccaaggtgtcttggtttcggcgattttgattttcgtgtaatggtttctgtcgtaaccaaggtcggagaagaaaaatggctgatacagagtgtcgtagaattcgggttcgccccacgatttccatgtttcgatgtctttctttcccgcataggggtcaacgcaccattcccacgacgaatagcttcgtcccttgtatgcattggcaagaagcgtatggtcgaagtaaggggctgaatcgataagggtgctgccgtaccaagaagtgtagtcgatgcagtcggtgccgccgcaatatccgcctttgtcgatgattttgttgatttctggattggaagcggtgtcgttcttgctgacgcgtgtccagcctgccatccaacggtattgctccaaatggttggttttgataaaagacgctaccgcccgggaagacgaatagtcgtaccgaatatcgcaaatactggcgcttgccgtccaatacacgctgacaagcatgaagataagaccgaggattttgaagaaacggagataccgttccgttttcttcggtccaagaagagtcataacacggttgttgagattacggatccactgaggccaatcgttggaattgattttttcgatatcgcaatcgatggcgagaatggcgatgaagaatcccaagatgattcccgcatgatgcatggaaagatgcgcggtgaacgcaacgcttatacccaagtatgtggtgagcagcaatgatgcggttttccggcgtaggcaaatctgaataagaaaacaccacatcaggcatgacattacgcacggcataaacagctcgcttggcgtgagagcgatgaactgcatattgccatccgacagggttgaagtgaacaacgtctcggaaggcattaccagccaggtgttgaatacggaaacccatgcgggtgatgttgttgcagtgccatgtatgtcaaagtcaccgtggtatgtgccgggtgcggggagtacgttgaggagcagtataatggcgaataccagtagcagaacaagtcctgcgaaacgctgcttgttttttataagcgagcgttcgccgcagagaaattgaatcgtccaattcaaggcaagcatgccggcgattgccaatccgtaagagctcgtggcgcatagcagcatcatgctgagtatgactggccatggcttggtgttgcggttgttccaattgatggctatgagcagcattgcggcgatcataagcgcatatggtctggaagttacgccatactggtagcaaagaaaataggaaaatggcagtattacctttagtaattcgggtagtttcgttttgaattccaaaagccagatcatcagcgcggcgcacataagattgagggatttcaatcctatttcgtaaggcatgccaagtttggcgggaatggcaagcagcatccaccaaagaggtgggtgtccttcgtaatgggtgcgtacggtaagcagttccttccatgagcaatcacgtgcgatcagccaagcttgcgcctcatcaaaccatggttcgtgaaaacacgacacggtgacggtcactgtcacgtaggcgatgaagacaatgcagtgcagccgttgttcggcgaaccaggtgaagagtctttttcgaaggttcgtcgcgcggttcgccgaaacgtcaggctggatgatggttggtgtttctgctgtgttgctcatgataggtgtaaagatggtgtatgggtacggcgaggttagaaggaggagcgggcgccgcagagtttttcgaattcctcgaggacctgcaccttggcaagagcgtcttcgaaggtgatgacgcccttgttgacgagtctcgccagatcttggtcaagcgtatgcatgccttccttttcgccggattgcagcacggtacgaatctgatgcgccttgcctccgcgaatcaacgcggccacggccggagtgttgatcatcacttcggtggcaggagcgcggccatgcccgctggcacgtggaatcagggtttgcacgaccaccgcgcgcagagtggaggccacctgcacgcgaatctgctgctgctgattttccgggtacacgtcgatcagacggtccacggtcgaaccggcgtcctgcgtgtgcagggtggcgaacaccaagtggccggtttccacggcggtcaacgcggtggaaatggtttcgaggtctcgaagctcgcccacttcgataatgtcgggatcttcacgaagcgcgcgtttaagcgcttccgcgaaacttttggtgtcggtgcccacttcacgctggctcatcacgcaacgcttgtgttgatgcacgaattcgatcgggtcttcaatggtgatgatatggtcggcgcgttcggcattcgctctgtcgacaatcgcggcgagcgtggtggatttgccggagccggtcggaccgcatacgagcacgagtccacgcggcagtaacgccagatcggcgatatgcgggtcgagaccaagctcctgcgcggttttgatttccgtgggaatggttcgtaatgccgcgcacacgcccaaacggtcgcggtatacgttgacgcggaatcgcagcagatcgccgatggagaatgaaatatcaagttccaaatcgtctttgaaccgttccatctccagctcgttggtcatcactttgatggcttcatacgtgcggtccttgttccacacgctcagccctttggcggggcgcagcttgccatccacgcgcagcattggcggatcgttgaccaccagatgaagatcggacgcgttcaattccaccagctggcatatggcagccacgaattccggatccgcatcgggatgttcggcatgcaatgtttctttgacctggtgcgctttgattctgcgttgtccgggaacagcgtcctcgtcggaatcattggtttcgggcactatgaaatccacgattagcctgttgctcatattgggttgcggtctggcagcgggcgcaggctgcgcaatatggttgatggcggaaggctgcatggtctgcgtgttctcctcgtacgccgcatagtcgtccggctgttgcgcgaacggcgtgccgcctggaatgaatgatggcggatcgccgtcgatttgctggatcggtccatgatactcgaatgcaggggtgacttccgtcacgtcatcgtcgaattgcagattctgctgattcacggcttcgttttccggggtttccggaaaagcggtgtcgtaggagagttcctgttgttctgcaatgagcggtgtttccgcaggccgtgtcggagcgggctgcggttccgctacagattgtgatgcaacggcttgcggggcagctgactgttgcataggctgccgctgtgcgctctgttgaggctcggccgccggctgttgctcgaccgcggccttaggcgtggggtcgggaacggtaccggaaccatgccgcaacgcgggcatggcgtcaagcgacgcgaaaatattgcgcaaactgtcatcgtcagcctgaatcgcattgtcgggcgaccaatggcgtcccctacgcggatcctcgttgaatgaaggagcggtactgggaatggtcacacctttcaaaccagacaaatcggtgttcgcatcccaagtcggctgcgcatcgggatccgtcgcggtgttcatttcggttttcagctcgggttgctgttcaatatcggtcatcattgtcctttacatatgttgaaaacgcggtcacacgattacacaactacacggtcacgcgaagcacttcatccacggaagtaatgccttgcagaaccttctgccagccatcctcacgaagcgacgtcatgcctttcgacttggccgcctgctcgatttccagcgacgtggcgccacgcgcgatcaaatcctccatctgcgtgtccacgcccattacctgctgaatggccacacgcccgtgatatccggtgttggaacattcacggcaacccatcgcacggtacacggtcggcaacggagagccgggcgtatatggcacacccatcatcttcaactccacgggagtggccgtatcggctttccggcatttcttgcacaggcgcctcgccagacgctgcgccatcaccgcagccagcgacgagctcaccaaaaacggttccacgcccatttccgtcaaacgcgtcaccgcactcggagcatcattggtgtgcaacgtggacagcaccaaatggcccgtcagcgaagcctcgatcgcaatggtcgccgtctcctcgtctcgaatctcaccgatcagcaccacatcagggtcggcacgaagaatcgaacgcaacgcggcggcaaaggtcatacccgccttattgttcacctgcacctgattgatgccctccatgcggaattccacagggtcttcaaccgtgatgatgttgatttccgggcgggccacatcgcccaacgtcgcatacaacgtggtcgacttacccgaaccggtcggaccagtcaccaacaccatgccgtacgggcggttgtacgctttggaaaacacatcgaaattgcgttcgctgaaattcagatcctccactttgagattgcccgaaggcgtgctcaaaatacgcatgacgattttctcgccccacaccgtaggcaatgccgccacgcgaagatcaaccttctgaccgttgtgacgtacggtaatacggccatcctgcggcttgcggcgctcgccgatatccatttcggccatgaccttaatgcggctgatcacaccttgggtcatggcgcgtggcgctttttggaagatatgcagcacgccgtcgatgcggtagcgtacgagcagaccgtcttcctgcggttcgatatggatatcggagcagtggtcgtcgatggcctggttgatgagcagacttacgaagcgtgccacgggggaggcgtcttcgctgtcgtcttgttcaaggtcgacttcttttttcgcggtcgcggcgatctcgtgcgatagttcggtcaactccgcattggcgcgcaggaaccggttgatgcagtcgcgtacctgcgatggcatggcgaccatggcgatgacgggcatgccggttgttgcggaaacatcgtctaccgcggcgaagttttttggattcgccatggctacggcgatgcgcccgttgacgatggaaagcggcagaagctggttgcgtcggcacagatcgtcgggaaccatgctgatgacttctttgtcgatctggtattcgttgaggtccacgaacggcaggctcatgccttgcgccaacgccatggcatattggcgttcggtctgttcgtccatgccttcggtggacgttggcatggcgggaaaatctccggtgacgtcgcttgtcattgccgcatggcgtggtgtgctcggcgtgaacacctgatggatctcgccggttgtcggcgcgatcggatccatactttgcgggaaagcgttcggcgtgtcgctgtttttgtttcgcctgaggaaggggaaacggcctcccgaaccggcgtcgctcataatgacctcctgcaccgcatgcgcgcttatgcgcctgtcatacggcataacatgaaaccccaagcaaacggcagcatttgtggggtggctgatgttcagttgttcgaagtcatgtgagctacaacgattgcagtattgtgtactgctaaatcagcattgtagccgcaaaaacaggtaaaagctaatcggggcaaagttttttgagaaatatgttgctgtgaaaacgttggcagaatatcgtgatacagtaactcatgtttatggcaccgcgtttggttgcgtgccgaattcctgccgcttccaatgatggggtggcatcttgtgaaggagctgctcatggagtacagcttgcgcacagcgggagacgcccccgattcaggggttgcggcgagtcgcgtcaatcgattgccaaaacgtggcgagtccggcttcactttggtggaagtgctggtggcgatcgtggtgttgagcatcacgggacttgccgccgcacagttcgccattacggccattcgcacgtcatatgcgcagcagcagcggtccaccgccgtgtcgctgggcgacgacggcatggaaagaatgcgtgcgcagatcgccaatgtagacgccaaccaatatctcgatgaactcatcaaaggcatgggggaaacgtccgtcaccgccgcgcagaagaatctttccgacgttggcgccatcgcgtcgcaattggcggatctgagctataccagttcgcctgatccagacaagagcaagtatattcagccggttcgtgccactgcgggcaaggacgccaagcataccgaatatacggtgaacacggtggtggagcgctgtttccgtgccagcggcgagatctcgtgcaagaccgcatctcagctgggcatttcccgtagttccgcaacgagctatacggccaatacctcaacaagcgccacggccgacattctggatccgggcaaaacggtatcgggcgcgttcacgttcggtgcgcacacgtatatgcccatgatccgcgtggtggtgggcgtcacatgggacgacaacatgcatcagggcaaaacctgcctgtacaccacgtcggaactgctggatattggtgtcgacaacaagctcatcatctagtgaggggttgcaatgagcggaacaacaagcggaaaactgcgtattcgcgccgtcgcgcaacgtatggcgcgcggtgaaagcggcgtcaccttggtggagatgatggtgtcgctgttcatcttcgccatcgtctccaccatgttcaccacggcgatcgtgcaatacctgcattccaccagtgcggatgcgatacgaagcaggtcttccacggaaatagccacgtcggtgcaaagcctcgacc

SEQ ID NO: 861 - DNA, 84036 bp, Unknown
  gut microbiota DNA sequence
tggtcagcagcgtgctcctgcgcgggttcgccacgttcgcgaagccggacttcgcagccctcttgcgctcggccttctcgtcgcgcgcgaccctcttgaggcgttccttctcggcctttttcgcggccttctcctgggctttgagctcctgagcggtgagcctctgctccgtgcccgcggcgattgttgcgtcactcattttcgatgctccttagcgtttcttcccctatatgcggatggttcgcgccaccgggcgttacttcatctgctccttcatgctgttgagctgcaccgcgtacgcgatcgccatcgtgatcacggccatcgtgatcgccagggcggcggcgtagttcgactggttgcccgcgaagctcaggttgtacgcgtacatgttcggcgtgtagtacgtggtgatcgcgttgcccggcaccatgttctgcaggatgctcggctcgttgaacagctggaacgagccgatgatcgagaagatcaccgtgatcgcgagcgagcccttcagttccggcagcttgatggacttgacgatctgccattcgcccgcgccgtcgatcgaggcggcctcgtacagcgaatgcgggatcgtggacagcgagctgtagaagatcagcatattgtagcccgtgaactcccacgtcacgatgttgccgatcgaagcgagcagcacgttcgggctcagcacgtcgaggttcgtgcccagccagtcattcagcgagccgaccagaccgtacttcgcgccgtacatgaagccccacaccaaagtcgacaccacggccggcaccgcgtacggcaggaacgtgctgatgcggaagaacttcgcgccgtgcagcttcatggaatccaacgccagggctatcgccgccgacaggaacagcatgattggcacctgcacgcaggtgaacagcgcgaccctgccgaccgagctccagaactgctggtcgtggaacaggcgaatgtagttgctgattcccacgaacttcgtgccgccgatcatctgcttctggaagaagctgatgtagatcgcgtacaggatcgggatcacgaacacgaacacgaacaccaacgcgaacggccacatgaacttccaaccacgccaatccgcacggtgacggttgacgcgaacctggtccgcaggcgtatgcagcgcatccgccgcgactgctgcttgctgagacatgctttcttctttctgtatgctttttgctctattgatcgcacaaccatgtgcaattgttaatccgcaaaatcttttattgtttgaattacaggattgctatttttttgaaatctttttctattgtaagatttcgtttttaaaattatttttgcgaagtgaggcaggcgggtcacgtcagatgattcccacctgccgtcgatcttcatggttgcgatggtgcgttgcgtatgtcggatcgcattatcgcgtttttcgttgcgccgcacggcagcggctgggcgccgtcagtccttgctggtgacggtgtagccctgctggttgccgtgatcggtgagcgccttgctgtagttgacgaaggcttcctccagagtgatgtcctcgctgtaggccttggagatctgatcgccgaaggtggactgcgcgtacgggttgtacggcaggtactggaaggcggagaccttgcgctgggcggcttcggagagaatctcgttcacgttctggccgccgaagtagtcgttgaccttcttgttggcttcagtgttcggatcggtgaaggagtcggaggagaggatcttcttcaggctcgggaaggtgccggtgtcggccatggtctgggcgccgtcgccgtgggtcaagtattcgacgaacttgtaggccgcggcctgctgcttggactgggagacgaccgcgagtgcggagccgccgtcttcagcggagacctcgtcaccttcgttccactgcgggagctgggccacgcgccagttgccggcctggtcaggagcgccgttcatgaggttaaccggcatccatgcgccgatggtgagagtggcgatgtcgccttcgttgagcgcacggttccagtcgtcggaccagttggcgatcttggtgtcgacgaggtcttcgtcgatgagcttctgctggaattcgatgtacttcttcatgccggaatccttggtcatgtcaatggtgatgttctcgccatcaaccttccacggctgcgcaccggcctgccatgcctgggcggtgaagggctggtattccatggaggagccggaattgttggtcatgtaggcgccgatggccttgaccttcttggctgcctcgtaataatcgtcccaagtcttgatctgggagccgtcgacgccggccttcttgagcacggcatcgttgtagaagaagacttccgggccggaatcaatcggcagcgcatacggcttgccatcatactgtagcttgctccacgggcctgcggagaagtcgtcttcgagcttgtcggcaccgtaggcggtgaggtcaacgaggtcgccggtaaccgcgaactgggtgacggtcgggtcttccagcatgaccacgtcgggggcacccttgcctgccgcgacggcgttgctcagtgcggtctgggtgtcggatgcggtgccggtgttgttgaatttgacggtgattccgggattggccttttcgaagtcggcgatcagggccttcatggtgttgccggtgtcccagccccagaaaacgagatccgccttgtctgcgtctccggcgttggccttggcgtcgttgccgccgtcgctgccaccgcaggccgcgaggctggcgagggttgccactgctgctaccgctgcgagagccttcttcatgttgcgcatgttcttttccctttctgccatccgcttcgcatgctgattgcatgtcggtcgcatatgtttcggaacatccgccgcggaatgcacatgccgtgctttccacttggtgatgtttgtatgttcgcgacctgccaaacaatacccccgtggtgatgtttggactggtaggatggctttgtttcctttctgatacaaccgtgtaccattagctccgatgatacacggttgtatcaaggtgtcaagcaaaccggttcgatagcccccctgcaactgttgtgcgctattgaagcgccaacgaaatcatcggcgtttcgcacaaacagaatgacatcgtttgcacaataatctgcaattgtccgcgcatctcaaccaaaaaatggatcgcaagaaagctacctcacaagagaaaacatataaagaacatatacaaaggaggtctgcgaatcgcaaacctcccaaaacaacacatacgacgaagagacggactccgcaccgctcgatgtaagcctacaaactgaggaacagctcgtgaatgcgggtatcgtcggtcagttcggggtggaacgccgtagcgagaatcttgccctgacgcaaaccgaccacattgccgtcgaccgacgtttcgaccgtggcccgctcgccgacctcggcaacgaacggtccgcgaatgaacaccagagggaaatccttgagcaccaccgacgtatccgaagcctcggaagccccctcctcaccagcagccgtggaaatcgcagaagagacagactcccccgacgcaaccaccacagcatccgcatcgtcggaagcgccgaaatcggcggacgcagcgaacgaaccaagctgacgtccatacgcattgcggcgcacgaccgcatccaacgcgccaaaatagacgttctcgtcgttatcgagacgacgagcgagcaaaatcatgcccgcgcaggtgccgaataccggctttccagcggcgatatgcgcggcgatcggatcgaacaagccggtcgaacgcagcaatttgccttgcgtggtgctttcgccgccaggcagaatcacgcgatcgatcgaatcgtcgaaatcctcggcggcacgcagcagtttccacggcgcaccaagccgatccagcatcgccgcatgctcggcgaacgcgccttgcaccgcaaggatgccggtcacgccatgctgcgcggaagccgcaccttcggcaacgtcagtcgattcttccttcgaaatgtattcaacggcaacaaccatcggatctccttacccgaaccatcgcgaatcatgcgaaacgggctgcgcgcggcgcatcgaacagacatgccgacagccgcacgcagcgcacagcgcacgaaattacagcgcaatcactcgccgcgagcggccatgatggtttcgatctcgtcttcgttgatgccgaccatggcctcgccgaggttctcggaaaggcgtgcgagcaggtcggcgtcctgccaattggcggtggcctgcacgatggcggcggcacgcttggccgggtctccggacttgaagatgccggaaccgacgaacacaccttcggcacccagttccatcatgagcgcggcatcggccggagtggccacgccaccggcggcgaagttgacgaccggcagacgaccgttgtcgtgcacatacttggcgagatcgtacggcacggccagctgcttggcggcctcatacacctcgtcgtcgcgaagggagacgagctcgcggatctgcttgttcatggtgcgcatgtggcgcacggcctggatcacgtcgccggtgcccggctcgcccttggtgcggatcatggaagcgccctcggcgatacggcgcagcgcctcgcccaggttcttcgcgccgcacacgaacggcacgtcgaactggttcttgtcgatgtggtacacgtcgtcggcgggactcagcacttcggattcgtcgatgtagtcgatttcgatggcctgcagaatgcgggcttcggcaacatggccgatacgaacctttgccatgaccggaatggacacggcttcctgaatgcccttgatcatggccggatcgctcatgcgggaaacgccgccggcagcacgaatatcggccggaatacgctcgagagccatcaccgcgcatgcgcccgcgtcctgtgcgatcttcgcctgctccggggtggtgacgtccatgatcacgccacccttgagcatctgcgccagattcttgttcagttcgttcctgttgttggccatcgccagcctttcgtcgaatcgtattccaccctgctgcagagcggatatctcttgacacagatactaacgatttttcgttacaaaatcatgtgaactgaatatttgcacgtcttaaaaagttgcttttcttaaattctgactatcattttcatgattgtttcattttcttacgatttcgattctgccgacgattccgcaattccattcgcttttcttgcctgatatgcgccattcgctttcgattcgcgcgcactgctcctttcgaccgcactttcgatgcacgctataagaaatacgaatgacgcatgattttcatacgaccacattgcggacggggtgcgatgcgcacgtacttgcgcgacgctctacatacgcaatatgcgatcggcgatgcgcatggtggaatcgcggtgcgacaccagcacgacggcgctcccccgctcggcaagatcattgatcgacccgagaatcaccgactcgttataggcgtcaagacggctcgtcggctcgtcgaacagcaccaaatcggcgtcgcgaaggaacatgcgggccaatccgatgcgttgcttctcaccctccgaaaggcggccacccagctcgccgacctgcgtatccaagccgttcggcagcgcatcgaccagttcgagcgcggacgccttggcgagagcttcgcgcaatacggaatcgggaatgtcgtgcgcgagatccgaatcggaggaatcagcggaatcaccaccagcattactgctggaattactacagaaattactgccagaattactgccagaatccgaaaaatcggcgtcattgcaggcaatagcgagattttcgcgaatcgttccgtcgaacagatacgtctcctgccccatcatcgtctgcacgcgccgacgccatccggcgtcaacctgcggcaatggaacatccgacagcgaaatcgtgccggaatccggatcccagtagcgcatcagcagtttcaacatcgttgattttccacgcccggacgggccttgaataccgagaatgccctgccgtgaaacatcgagtgaaacatggtcgagcaccggttgcgaggcgatgccggcaccttgttcgccggaggattgcgcttccgcggggcgtgccggactcatgccagtcgcatgctccgaccgcccgtttggcgtgcgttcgccggaaatacgggcgccggatccatagccgaatgtgacatcgcgcattgtcatgccctgatattccgggcgttcgctcccctgctcgaccacagcgggagcctcatccatcaacgcgaacaggcggcgtgccgaagcaaacgtttgcgtcagattcgccggcaacgcactcaacgcaagcgtcggcccaaacgagctggcgagcagcacgaaagccgcaaccaacgctggggcgttcgatcccacggaacccatccacatcaggccttccgacatatcggcggcagtggaaaccgcagtgcacaacgtcatcgcaaggaaagccgcaatcgccgtgaacagcatcaccaataccgcgccaaatcctgcaaaatcgccatttttcacgctcagacgcacacgtttgacccacagcgagcgcgtgcgacgctgaatggacgcaagccgggcatcgccttggccgaagcggatgatttcgccgatgccacgcatgtcgtcaagcatttcgtcatcgagggcggacgactccttgcgcagttccggaccgatgccgcgcaccgcggatgcaaagagtttcggcagtatgacgccgataatgaggtgcgcgatgatgagcgtcgccgcgaggggcggactgagggtgagtagcgcgagcgcgtagacgacggtagtcacgatggcgatgacgaccgggctgatggtgtgtgcgaagaagatttccagcagttccacgtcggtggtgaccagtgcgatcaggtcgcctttgcctttgcctgcaagcttggcgggggcgagacggcgcagggccgcgaaggctttcgcacggaataacgcaagcagacggaacgccacgttatggttcatgaactgttcggcgtaacgcatgccgccgcggatcagcgcgcatacggccatggctgcgagcgccgcgggaacgctgaggttccagaccggcgagccgactgcagcgaaggccgccgcgatgccgaacaccggcaggaaagtggcggcgagatggccgagcgtgccgcagacgcacgcgacgatcatgtacttgcgctgcggcccaacctccttcaacaggcgcgcaataaggcgagacgtgggcattgtcttcgcgtccgattctgtcgaatcggacatccgaacgcccgttttcgcaccctgtgcgtccgtttctgcagaatcggacattcgagacgtagtttcggcacgctgcgtgaccgattcgggagaatcggacaactgagcggtgtttttagtgagttggttgtccgtttctgcagaatcggacacttggagacccatttccgcacgctgcgtgaccgtttctgcagaatcggacgctttaagtgcgtgggatgcagaggtggaatgggttgcgttattgcgtagacctatgttttctacggtttgttgggcgtggaatagtttggcgtacgtgccgttggcacgcatgagttccgcatgcgtgccttgttccgacacgcgcccgtgttcgaataccaccacatggtcggcgtcggctgcattcgccatgcggtgcgtcaccatgatcacggttttgccccgatccgcaagcgcccgaatggtttgcagaatcagggtttcgctttccacatcgacgctgctggtggcttcgtcgaaaatgtagacggcaggctcccgcagcaatgcgcgcgcaatggcgatgcgctgtttttggccgccagacaggttgcttgcgccctgttcgatggccaggccaagttcttgcgattgcgcacgcacgaaatcgctgatatgcgccgcttccagcgcttgccacagttcgctttcggtggcatccggcttggccatcagcagattgtcacgcaacgttcctgcaaaaaggtggctttgcgccgccactatggcgatttccctcgtaagggattcgatggaaagatcgttgatttggtaccgttgcgtcgagttgtttcctgtgtttccggattgcagccacatacatccttcatatccggaaagatttccggagagcagttcgacggcggtggatttgccggatccggacggaccgacgatggcggtcacctgcccgcgccgcgcagtgaaagagacgccatgcaatgcgacgaccgaaccatcatcatctttcgacatgcctgtttttccagcaccaaccacaccggactttcccccgatttgtccagtttttccagtttccatatccgccgtcacagccgtatccgcagccacactcacagccgccgcagcgtccgtattcacgtccacatatcggaacgacacgtcatcaaagcacacgtccacaccgttatcggaagcgccgaattccggcatttcctgcatcccatgcgcaggaatcggcgtatcaagcaatgcgaaaatacgcttggtcgaagtcatgccgttcatcgcgacatggaagaacgaccccaattggcgcagcggaatgaagaaatccgcggaaagaagcactatcagcagcacgccggcaagcggcaatgcggcaccactcgcatactgccagatcgatacgcccacgccggccgcggctcccccgtatgcgacgacgtccatggcggtgagcgagcgcagctgaatttgcagaacattcatggtcattacgcggaattgttccgcttgctcgcccattttcttggcggcatgcgcatccgcgtcaaaagttttcagcgtttcaagaccttgtacattgtcaagaaacacagatcccaggtcggtgtattttccccaatattttttgaatactcgggctgcgcgcattgcgaccatgccaacaatcaatacaatcaaaggcgcgcatacaagcaatgtaacagccgtcggcatattaatcggcgcaactataaaaaataatgttaccggtgcgagaatcgcataaaacagttgcggtaggaataattcgaagaagctttggatttgttcgatgccttcaccggcggattgcaccacgtcggcagtgctgatatgttgcgaatatgatggtccgatcgcaagcattttattaaaaagctgttcacgtaacgcgagtttgacacgctcagccgcttccgcgccgaaataggccgctgcgcgcatcatcagaaaacgcagtaccgcacagaccacgatcgccagtacgcatccgacgtatgtttccgcactgaatccgccgtagccaaagccgatgaataggcgggaaatcaggccactatcacccatggagaacatggggtcgaacgccgattccaccacggcaagtgccggcgaaagcatgaccaccaccgtcaccacgaacacgacgttggccagcagtccgacccattggcagagcactttcgccgcaaccaaccgccccacgccgggagcgagggaaaacagcctcttgtcaaacataaacaccttccgtccaatgagcgcactcgcgttgccagctcgcctacggcccaaagcgcaatcgccatgcatccaacaaacgaatcgcaacaggccaatacgggaaaaccggtgcgtggcaaaccgttttcagcctatccaaggcagctcgcaatcgtcaagggcgcattgcatacagcgaaccgtcgcaatcgaattgccataatcgacctcaaatcagcaacgttgaaaagagaaaggctggatgttcgccgttgagcaggcagccctctgacgcaaggggtaaattgcgtcactcgtgagtgtactcgataaaaaacgctcgcaccaccatttcttcgcatttcgctggttttacggtcctttcggggatatatgggaagcatggcggctcccccgcaaccgttacgtcaagccttttttcgaacggatacagcgcgacaccaaacacttgatttttgacggaatagcaccatttgtcagttcatacaaagttgatgaaatatttcttgtcgcttctcacaatgcagacttacggccccgtaacttagaatgtgcaaggtgcgcaaggggtaggaaacgcggacacacggtttgtatcgctcccgcacgcatcacaagcagaaatacgcggaaacaacgcaaaaaccgcgagaaagagaacgcttcatgctcaccgagtacaccaccccgggcgaatccgttgaggtgcgcgacgacgaatccatctattccctgcttactggacgcatagcgcgcactggcgaagataccgtgatcgcggaacgcaaaaccgcccccggtcaatggacgaaggtcactaccggcgaattccacaatgccgtgctcgccgccgcaaaaggcctcatcgcattcggcatcaacaagggcgatgccgtcaccatcttctccaccacccgctacgagtggggcgtgctcgacttcgcactggccgccatcggcgcggtgaacgtgccgatctacgacactgattccgcggcgcaggccgagcgtatcctcaacgattcggatgtgaaactggccatcgccgacaatcgcgagcgcttcgaccgtctcgactccgtaatcgaccgctgcccgtctctcaagcacattctgatgctcgattccaacgccatgggcgcgttggaaggcttgggcgtcaccgtgtccgacgaggagctggaagcgcgcatcgattcggtgcatgcagacgatctggccaccatcgtgtacacgtccggttcgacgggagctccaaagggtgccgagctttcgcaccgcaatttcatatcgatcacgcgcgcaggcagtctggcgttacatgagatcgttctcgaagatcatccgcgactgcttctcttcctgccgctcgcccactgtttcgcacggttcatccagtacgcgtcgattgcttccgacgacggcgtggttggttatctgccggacacaaagacgctgctgcccgatttgcgttccttcgaaccgacatatctgctgggcgtaccacgagtgttcgagaaggtgtataacgcggcctcccgcaaggccggcacgggttggaagggacgcctgttcctcaaggctgccgaagccgcacgcgattggtcgcgcatgcagcaggccggcgaacgcccgaccgccaagcagatcgcgcagcatctttcgtatgaggcttccgtataccgtaccgtgcgtagcgctctcggcctgcgcatccgctacgtggcatgcggtggtgctcctctggacgtgtctctggcgcatttcttcaacggtatcggcctgccgatgattcagggttacggtatgacggaaaccgctgcgccgttcgccgcgacccgcgtcaccgacaatgtgatcggcactgtcggccaaccggctccgggatcgtctgtgcgcatttccgatgatggcgaacttcaggtgaagggcccgaacgtgttcaggggctaccacaacctgcctgagaagacggcggaagcgttcaccgaggatgggtggctgaaaacgggtgatttggcgtcgattgacgacgagggacgtattacgatcaccggccgtaagaaggacatcatcatcaccgccggcggcaagaacgtttctccgattccgatggagcaggagattgtgaaatgtccgattgtggagcatgtggtagttgtcggcgacaatcgtccgttcatcggtgcgctgatcacgttggatccggaaggattggaggcttggctgccttccattggactgtctgccgatacgccgttggatcgcgtggctgcgaccgccgccgttcacgacgaaatccagaagtacgtcgacaaggcgaacgcgaccgtttcccgcgccgaatccgtacgtaagttcgtagtgctggatacccagttcacgcaggaaaacaagtgcctgaccccgtcgctgaaagtggtgcgtccggcagtgaaccgcgtgttcgcacaggtgatcgatcagcagctgtactccggcaagcgctgaatcgcataatacatgaaagcgtggggtacgagagaacgtttgtattctctcgtaccccacacttttgttctgtctgtacaactttcaaggaatgcaaacgagcgccggtgatcggaagcgatccgacccgccggcgctcatatggcagagattagtgatgaatccagaatggctaacgacactccatcagccattgtcagtaaagcgacaatcagtgacggtttcgtcagtgcataacgcgtgcggtaacggtgcgacagaaggcgaaggcgtacgagggtacgtcgagtcttctgccgtgccgttaacgctccggtatgtcagtgacggttgttgagtcggtggtacatttcggagatctcaaggtcgcgctcgaattctgcggccttggtgttcgcgtcgatggtggcgagttcgacaccggcgatgcgggcgaagtcttcccaagcctcgcgaccgacggaggtggtcatgcaggtgtggtgggaggcgccggaacgcagccagcactcggcggaggtcttgaggtccggctgcggcttccacaggccacgggcgcacggcaactgcttgagctctccgagcggctcgaccacgtcgaccaggttcatggtcaggcggaaacgttcgcgcacgtcagacatggacacgacgacggcgtccttcttcggggcgacagtgaagaccaggcgcaccggatcggccttgccaccgatgccgagcgggtggatttccagcttcggcttggcgatggtgccgacggacggggagacttcgagcatgtgggagcccatgatcatctcgttgcccggggtgaagttgtaggagtagtcttccatgagggaagcgccaccttcgaggccgtagcccatcactgcgccgatgcgcacgagcactgcggtcttccagtcgccttcggcggagaagccgaagccgtactcggacgggaagcgctgcgggccaacgcccggcagctgcgggagagcacccaagtcttcgaagttgtcaacgccggcggtgcagccattggcgcgcatcatgttgaccatggcggcttcttccttggccgcgatgaacagggaatcgtacttggcgtcgagcagagccggatcaacgtcgtacttaaccttgtagtcttcgatgatgctcttgacctgatcgtccttgacggcttcgtaggctgcgacgagctcgttgacggcccaagtgttgatggatgcgccgaacacgcgctcggcttcggtcttgtcgccttcggtgacggccacgttgcgcatgttgtcgccccaacgcatgaccttcatgttgttggaagcatcccagccggcgcaggcgcgtgcccaggtgccgatttcttcggcaacggccggatcggtgtagtggccgaccacgatcttgcggttgatgcccagacgggtcaggatgtaaccgaactcacggtcgccgtgtgcggcctggttcaggttcatgaagtccatgtcgatggtttcccacgggatttcgaagtggtgctgcgtgttgagctgcagcagcggcttggtgagcacttcgaggccgcggatccacatcttggccggggagaaggtgtggcaccaggtgatcacgccgatgacgttcgggttggcggaggcttcgaccatgaaggccttgacgccgtcggaggacttcagggtcggcttaagcaccaccttgaccggaatcttgccggttgcgttgagcgcgtcgacgatttcgccggactgctcggccacctgacgcagcgcttcttcgccgtacagatcctgggatccgacgccgaaccagacttccttgccttcaaacgggttttccattgccatgtgattgttcctttacttcgttgtttatggagtttttaattatttattgcgattgcgaactcgcgcttcgcgttgttctgttgcgtagcgcgagttcgtacgattgtgaaattatgtaggattacggaatcgtaggattgcagctcagtgctggccgtagacgttggtgtaacgatcgttcagcttcgcgatatcctcatccgaaatcggaatgatctcacccaactgcctcgccgcccacatcgtatgagcgacctcctccgtcatcgccgcggccttcaccgccgactccgcgtccttgccgatggtgaacggaccatggttctgcatcagcaccgcaggagacttcggatactccctgagcgtctcgaccacgccctcgccgatcgcctcggaaccgatcagacggaacggacccaccggaacaggaccgccgaactcgtcgcccatcatcgtcagaccgcacggaatgttctgccccgtcgccgcccacgccgtcgcatacgtcgaatgcgtatgcaccacgccgtacacgtccggcatatgacggtagatgtacgcatgcgacgcggtatcggaggaaggagcctccgaaccgtccaccacgttgccgtccagatcgcacaccaccatgctcgacggcgtcagatactcgtaacgcagtcccgacggcttgatcaccatcagatccgcggtatgcaagcgctgcgacacgttgccagccgtccacaccaccaggttccacttgatcagctgctcgtgcaaggtcgccacgacctcgcgcacctgcttgacctcggcacgaacctcaggaccataatcagccaaagtagccataatcatttcctttcaaattgaaataagtttttaaaatatttatttacttggtttccagcggaatgctttcgattgcaacatgctcaatcggcagtcccttgcggaagcgatcgaagaattcctcgaatcctgcgacatcgctttcatccggattttccgtggtcgaagcggcatcggcgaacacacgagcgtcaaggaattcgtcgagcggctggtcggcgtgccacaggtagtcggcaagcacggccatgccccatgcgccgccttcggcagcggtggacattaccttgatcggcgtatcgaatgcggctgcgagaatcttctgggcgaccttcggggtggtgaagatgccaccgtggccgacgagggagtcaacggcaacgccttcgtccttggtcatcacatccatgccgatcttcaccggggagaatgcgctgaacagctgggcgcgcatgaagttgccgaggctcatgcgggcttccggaccgcgcgcgaacagcgggcggccttcgggcagtcctgcgaggaattcgccggagcggaacgggtagttgatgagtccgccgcagttggagtcaacgtcgtccgcgatggcggcgcggaacagcgtgccatacagggtgccggcgtcgaccggagtgccgattgcagctgcgaactgtccgaacagaccaacccatgcgttgaggtcggaggtgaagttgttggcgtggctcatgcctgcgagatcgcctgccggagtggtgacgaggtccacttccgggtgcaggcgttccagcttgcgttcgagtacaaccatggcgaagatggaggtgccggcggaaacgttgccggtgcgcacgcgtacggagttggtggccaccataccggtgccagcatcgccctccggcggagcgaatgtgattcccggctgcagcgtgcctgtcggatcgagcagcttggcgccctcttcggtcagcgtgcccgcaggagtgcctgcaaccagcggttccggcagcaggtcggcaagcttccacggctgggctgcgacttccggaatcgcattgaacttctcaatgaattcggtttcgtaggtgtgcgtggtagggtcgatcgggaacatgccggatgcgtcgccaacgccgagcaccttcttgccggtgagcttccagtgcacgtagccggcgagggtggtgaagaaatcgaccttgccgatgtgctcttcgttgttgagcacggcctggtacaggtgtgcgatggaccagcgttccggaatgttgtactggaacagttcggaaagcttctcgtgtgcttcggaagtgttggtgttctgccaggtgcggaacggcaccagcagttcgccatctttgccgaaggcgagatagccgtgcatcatggcggagaagccgatgcgtcccacgcgggtgagcttttcgccgtaagcgttttcgacatcttcggcgagcgccgcgtatgcggtctgcagcccggtccagatttcttcctgcgaatagctccacaggccgtcttccaagtggctggcccagccgtagtcgccggctgcgatggtggtgtacgtgtcgtcgatgagcacggccttgattcgggtggagccgaattcgatgcccagactcgtcttgccagcgcggattttctcggcggtcagcgcgatgcgatcgtcaagtccctgctcttgcgccatagtttcaaactccttgcatccgagcgcctcacaaccacattgtcgacggaatgttagcgctcactgttaacgctcactattctaaacagaaagtggcgactatacaagttcgacgtgtcacgcaatcgtcaacgtactaccggcagatcgtcagccgattttcttgatataccggcattacgaaatccggcaatcgcagcacatgcggcaaaaagagatacgagaatcacaagaaatacaaaaatcgcaggaaatattcagcgacggctggcggtgcccaaagaagtgcggccgatcaccttcgcgggaatcaggccgacgccatgctgcgacgaggcgaacgaattctcatcgccctcccccagcaaaaacagcgtctcacgcatggcggcaacgccaagctgttcaaaatccgggcgaaccgtggccagcggcgggtacatgttgtccatggcgggcatgtcgtcgaaaccgaccaagctcacatcctgcggaatacgcatgccatgttcatgcagcgcacgagacacaccaaccgcctggctgtcgttcgcacacaccatgcacgtcggcagatttccgccggtacgaccgatgttttcgagaatatggttcatcttgccatacgcttcggtcgattcccaggtttcgcattgcacggtgacagaactcaccgcattggccgcgcacagcttattccacgccatcaaacgcgtggcggcgtcacgccattccttcggacctgcgaaataaagcacggaacgatgcccatgctcgaccaccaaatgcatcacgtcggccatggccgaccattggtccactcccactacggatactcggcgacggtcggccggtttcatcaagcgcaaaccatcctgcacgctgatgctgccgtgcgtggaggtgacgatgacgcgcggctgcgtgatctgcgcacggcaggcggcggaaaacataacatccgtcggcgtgaggaaaatgaacgcgtccacgttcatctcatcgaacgttgagcacaattcgtcgaattccgtctgcgagcagagcgcctcgtgcaccatgctcaccgacatgaacagtccatgctgcctcgccatcgcctcaatcgaggaaatcgcggaaatcggaccataaaagcgttgcccgcccgcaaccaagccgatggtgcgggagcgatgcgaagcgagggcacgcgcggaattgctgggacggtatccaagcgcgtcgatggctttctgtactttttcgcgggtggcatcagacacgtcgggggaatgattgatgacgcgcgacaccgtttgatggctgacaccagccattttcgccacttcgaacatcgaggggcgtttgtttgccgcattgcgcttgcctgccatgctccgtcgccttccgcacactaccgttggtactttcgactattctacacgcaacttcggttagcgctaacagacgctatttttcagccattcgagcgagtcgcgcagcgaaattcggccagtcggtacgcatggcggtcaacagtttacgattggggacttcctcaatcggcacccattcgatttccatgctttcgtcgtcgttggccttcggctccacgcggtgccccggcttttcgaaagcgaacacggtggtgtaggcccacggtccgtggtcttcgcagtatgatccgaccacgtcgatatcttccggcgtgatgttggcttcctcgtacgattcgcgcagcgcgccctcgatcgggctttcaccgtcggcggtggcacctcctggaatgccccatgtgccaccttccgcgctccacaccgcgcgatgttgcatgacaacgtgcgtcacttcgccggtctgttcgcttcggcgggccaagagcacgccggacgcgccgttcgtgccccaatgcttgcggccgcaatcgcaatcaatccaaccatcacccggctgatgcacgttttccttgggaggaagcggcttcgcggcaccggttcgcgaatcgtgttcgacgttcggttcttgatcggctcgcgtcacattccacagatcggtccattccacgccgagctcggcggccaaacggcgcgccagcggaaggctcaggccgataatgccgtgcggatcgccttcgatggagtcgatgaatgctccgccgaagccctcaagcgtgaaggaaccagccacttccaacggttctccggtggcgatgtaccgttcgatatcggtgtcggaatattcgcagaagtgcagcgttgccctgctcgcgcctcgcgcgatacgcccggtggcgaagtcgatcaggcaatggcccgtccacaattcaccggtggcgccacgcatggcacgcagtcgttcccgagccacctcagcgctatgcggcttgccgtaacattcgccgtcaagcaggaacatggaatcgcagccaagaatcagcggaccgactttcgcacgggtcaggctcggcttgccatcaacgaaatcagcaatcgattcggtgatcgtaggaatggtgactcccgaaaaatcgcgggtcttcacatcggaggcggactgcacttcgtccgcacgcaacgtgacacgatgatgttctaaagatgcggaatccccagtattttcagcattatccgaatgttcggaagattcggcaacggctttcagcggaaatccgaccacacgatcgccgtgcgccgccgcagcggtggcggcaacgttccgatacgcctgatgtacggcttcggctttggccgtagcgagaatcatcacccgctgttccacgctcagatcgcttacggcaacgcccatggcggccgcctcacgttcgagcgccgccggctcgtccacgttcgatacgcgaatcgtggggcaaatgcccgccgagaaaagcacgtcacggcgaggcttggatttggaagcgagaatcagcggaatggagttgttcatgcgcgttccacctgcacacccttggtgtcgacgcccaaatgcagcacacgccaatgaccggaagcgagctcttcggaagcaagctgtcccagctgttcgcgagcgtcgccatgatgcagcacgagcacgcatgggccggcaccggaaaccatggaagcgaaaccatgggaacgcagcttttcgatcagcgtccacgacggttccatcaaaggagcgcgatacggctgatgcagacgatcctgcgtggcggcgaacagcaacgcgttgacgtcctgacgctgaccagtcgccagcatcgcaggattcatggcggccggcagcaggctcacgcgagacacattgtgcacggcatccttgaacgccagctggcccggcagcgcctggcgtgccttttcggtggacagctcataatccggcacgaacacggcggcggtcagatcgtcggcaacgcgatagttgatggtatggaagcccttatgcagcggttcgccgcccggaatcggcacggaaccgacaccttcgggggtttccatgtcccaagacatggtgagcccgccgtacacggccggagccacgttgtccggatggccttcgatggccgcagcaagctcaaacacggcatcacggttgagttcgtcgtcctgcgcgaaggcggccgcggctgcgatgcccgccacaatggcctctgcggaagagcccatgcctcgtgcctgaggaatgttgttgtgagcctgaagaatgaagcccacacggcccagaccaaaggtctggcatgcgcggcggaacgtggaaaccaccaagtgggtttcgtcacgcgggagagtatcggcgccttcgccttcgatcatcacctgagccgcagtgttcaccggatcggcgctcagcgtgaattcaagttcgtcgtggtagtccagagcaagtccgaccgtatcaaagccagaaccaagattggcgctggtagccggaacacgcacacgcactttacgagtaactggagtcatatctcgtcgtccttcgtcacatcttctttacaaatgtagcaccgtatacccgaaagggtacaagagtcaaattcaagcccataatcagcgggcgattgagtaaacaatcggcaagcaattgcccaacacagcagccggaatatgaataaagagacggccgcccaatcgcaacgatttgagcagccgtctcataactgttagttgagcacgcggaggatggaaggctcgccaaccacgcagtcgagtgcacacacgtctttcacggtttcacgcagggtaagctcgtcggtcatgtgcgtgacaaggcgcagctgctgcagttcgccgtcgtagcccggatccttcagcgtgggcttgagatcctggttcacaccattgatggacacgccatgctcggcgaacttggccgcaatggccgcaagtacgcccggattgtcgtgaatcacgaaacgcaccgcgaactcggccttggaagcctcgatcggagccttcttcaaatccttatacaacggaatggtcgggccagtgcagccctgtgcgatgtgacgcgcctcggtcaccacatcgccgaccaccgcagaagcggtcggagcgccgccagcgccacgaccatagaacatcagatcgtcagccgcttcggccttcacgaacaccgcgttaaaggaaccatgcacggaagccagcggatgctcgttggaaatcagcgccggatacacgcgggcagacacgccggcctcgccattctccaccacggccagcagcttgatgaccttgttttcggcggttgcggcagcaatatcgtcggcggtgatcttggtgatgccctcaacggacacatcatcgatggtcacgttggtgtggaagccgagcgtggccatgatggccgccttgttggccgcatcgtagccttcgatgtccccggtcggatccgcttcggcgtatcccttggcctgagcgtccttcagcacgtcgtcgaaatcaagacccttggtggtcatttcgtcgagaatgtagttcgtggtgccgttgacgatgccgagcatgctcgtcaccttgtctccgacgagggattcacgcagtggcttgaggaacggaatagcaccgcccacggaagcctcgaagtagatatcgacgcccttagcttcggcggcggcatagatttctggaccatacttggccaacagcgccttgttggcggtaaccacggaagcgccggattcgatggccgcaagcacgaacttgcgggccacgccggttccaccgatcagttcgaccacaatgtcagcattggtggccacgctcatggtgtcggtggtcaccacggacttgtcgatccacgggaacgggtcggtttccgacggatcaaggcaggcgacgccggtcagttcgatcggtcgtccgatgcgtgcggcgagctcatccttctgctccaccagcaggcgtgcggtctgagagccgaccgtgcccgcgcccaacaatccaacgcgaatcggcgcaacatcttcctgtaccaaggcatcctcccttgaatgtgaagtattggtgtaaccctgcctattgtacggtcccgatatgacgtaagaccgcgaaatcatacgaaaatggacggtttccgagctttgccccgaaaaccgcccatactgcatccacgctgcatcagtaatttgagacgaatcgccatgaacaatacgaaacacgagcgaaacgccacgaatcgctattcgctcacatcccaatccagcagatcatcgaccgtctgacggcgaatcatcacatgcgcgtcttgctcggatacggcaacaaccgcaggaatcagcgcctgattgtagttgctggccatcgtgcgaccgtatgcacccgtaacaggcaccgccagcacgtcaccacgctgaatatcggcaggaagacgcacctcgttgacgatgatatcgcccgattcgcagtgcatgccgaccacacggcacagcttggtttcgctggaaccctcacgattggcgattctcgcagtgtaatccgatccatacaatgccggacgaatattgtcgctcatgccgccgtcgacagacacgtacacgcgttccgtaaccggattgccagccttgtctttcgcggttccggcaagctgcaccggcttgaccgtgcccacacgatacagggtgacgccggtcggggcgaccgtccaacggcccggctcgaacgagatgaccggagcgggcatgccgagcgcacggttcacggtggtgaccgcatcggcaaggcgggcaagttccgtatcgagatccatggaatcctcgccatcggtgtaggccacggaatagccgccgcccaagtcgacctccggcagggtgtatgcgtcggtggcgtagaaggtcttgcgcagcagcatcatgcgcttcgcggcctggataaaggcgtccgcatcgtgaatgttcgacccgatatgcgaatgcacgccgaccagttcgagcacgtcctgatggcggtagatctccttcaatacggcgagcgcggggccatcagccaccatggtcatggcttcggcgagtttgcggtcgccttcggaaaccttctcgtggctcatgtcgtacgggtatttgatgtcgtactgcagttggcgttctgcgctttcgcccggagtggcttcgctttcgtctaagcgtgcgttcgaccctgcgggggtcacgtcagccaaatcgtcgagcacgttcagcttgcttgcatcggcaccaaccggcagcaaggcgacaccgaacttctggtcctcatgcgcggtagacacgaattcgtggccgcccgcatgaatgccggacgtaacacgcaacatcacgcgagcgcgcttgccgagacgcttggcgatttcggcgatgcgggccggctcgttcggctcgtccaccacgattttggcgaagccttcggtaatggcgagttcgatttccgcatcggacttgttgttgccgtgcagcacgagtcgccgtccgggaactcccgcggcgagcgcgatgcgcatctcgcccatggtgcaggtgtcgatcagcatgccggattcggtgacgatacggcagatttccttggaaagcaaggcttttccagcgaaactgacgtgggttacggtgttgttgaacgcatttgccgcggatttgacgaatttggcggcgcgggctcgcacgtcatcggtgtcgatgacgtagagcggcgaaccaaattcgttcagcaggctttcggcagtgcggccatggaacgtgatttcaccttgctcgttcacgttggagccggccggccagatgggggtgactgccatggcgatcacatcctgtctggggctgcgacgccaagcaggtcaaggccttcggcgataaccgtcttgacggcgtcattgagcttcaaacgtgcggctgcacgagccggttccggagccttggcgatgcgcagggcttcagcctgttcgccgcgagcttccggatcggtgagctccatgggcaccacgcgttccacgttgtaccacttgtggtaggtggcggcgaggtcttccaagtaatgggctacgcgatgcggggcgcgcaggtctccggcttcgcgcagcagggccggccactgggcgagcgcggcaagcacttcgccgtcggcggcggtgtcgagcaggctcacgtcggcaccctcgtaggtgatgccggcagcagccgcattgcgatccacattgcaggagcgggcgtgcgcatactgcacgtagtacaccggattctcgttggaatgcgaagcgagcaggttcaggtcgatgtcgaccggggaattgtagtcggtgcgtgccaacgaataacgggaggcatccacgccgatagcgtcggtcagatcgtcgatggtcaccacattgccggcgcgcttcgacatgcgcactgccttgccgtccttcagcacgttgacgagctggccgataagaatctgcatgttttcgccaggttcgtcgccgaatgcggcgcacatggccatcatgcggccgatatagccgtgatggtcggcacccagcatgtaaatggcgatgtctgccggatcgttgtcacgatgacgcttgttgcgatagtaagcaatatcagctgcgaaatacgcgtagttgccgtcggacttgataatcacacgatccttgtcgtcaccatgcttggtggattcgaaccaggttgcgccatccttttcgtaaatgtcgccgcgttcacgcagatcggcgatcgccttgtcgacttcgccatcggaatacaagctgttctcatggaaccacacgtcgaaattcacacggaaatccttcatggatttgcggatttcgtcgaacatcatcggcactgcacgcttgcggaattcctcacgctgttcggaatcgccctcacccagcggattgccatcgttgtcaacgccaccgtcgacgcgcggcaggtcgagaatcgcaataccgtcggcttttgcctcatcgatgacgcgacgtgcgatctcatcgatataagcgcccttgtaaccgtcgatcggggtttcctcaccgtgggctgccgcgaccagcgacttggcgaagcggttgatctgctcgccgtgatcgttgaaatagtattcgcgcaccaccttggcgccgttcgcctcaagcacgcgggccatggagtcgccgaccgcggcccaacgggtgccgccgatatggatcggaccggtcggattggcggacacgaattcaagattcagggtcttgccggaaagatggtcgttcttgccgtagttcgcaccctcgttaagcacagtgtcaaccacggctgcggcggacgcggaatcaagcacaatgttaatgaagccggggccggccacttccacggacttgatgccatcggcattggcgagttccgcggcgaacaattcggcgaaatcgtgaggcttcatgccggccttcttggccagctgcatggccgcgttcgatgcccaatcgccgtgtgcgcggtccttcggacgcatgacggcgaatttggcctgcggagggatgagatcggtggtcagggtgcctgccttgccttcattcacaaggttgttggcaatattgaaaatcagttcactaagcgcttctggactcattcctccaagtctaccgattatgcagacagaatcagccttgcgtatcgccccgcgtatcatcctgcagttcgccatgcttcctgcgccaagccaccgaagcgtaatagccgatatagcagatcgcaacgaacggaatcatatacagcaatgtggaacgctgcgacgaatcgcaaatcaccaaaaccaacgcgccgatgcacatcacaatcgcagcaatcggcacgaacgggaaaccgggggcacgatacttcaaatcgtcagccgaatgcccttgatcaagccactgcttgcggaaacgcaagtggcagacggaaaccgacgcccacaccaccagtgtggccaagccggaaaccgcaaccaacgacaaatacaccgtcgaagcggcaaccacggaagacaacaacgccaacagcgatccagccatgctgaacagcaccgcgaacacgggcacaccatggaaattcgtcttgccgagcacgcgcgggatcataccctcctgcgcaagcgaccagaccatgcgcgagcacacgtacaagccggaattcgcagcggaaagcactgccgtcaacaccacgaaattcatcacatcgccggcaaacggcatgccgatcgactggaacacgagcacaaacggactcgtgtcgacgcctgaccgatgccacggaatcagcgcggacatcaccgcaatcgaaccgatgaagaaaatcgcaagacgcaacaccgtggtatgcacggccttcggaatcgcctgcgccggatccttcgtctcccccgccgcgacaccaacaacctcagtgccggaaaacgcgaacaccaccgtcagcagcgtcgaaaaaatcggcagcacaccattggggaaccagccgtcattatagaaattctcaaacagcggtgcgtgatcgtaaccggcaatcggaatcgcaccaaacatggcaagcaagccgatcacaatgaacacgataatcgcaaacaccttaatggatgcgaaccagaattccgactcgccatacagcctcaccgacagaatattgagcatgaacaccaccgcaatgaaggcggcggaccaaatccacgcgggcgaatcaggaaaccaacgttgcatcagcagaccggctgccgtgaattccgaagcgagcgccaccgcccaattcagccagtacagcacggcgatggtgaacgcggtgccggggccgatgaaacgcttcgcatacaggtggaagctgcccgcatacggcatggccaccgacagttcgccaaggctgagcatcacaaaatacacaagcatggatccgatgccatacgcgatgatcgcgccaagagggccggcttggtgaatcgtgtagccggagctgaggaacaagcccgtaccgatcacaccacctagcgaaatcatggtcagatggcgggtttccatcttgcgttcaagaccgccctgctcggcttcagcggattcagcggcgtcagtgtctgcagtggatgcgttgacttgcgattcggccatgcgcgactgctccttcatatttggatgggcgcgttcttgcgttcttgcgtttgcatgcgtttgcacaatacccaatcgcattactatacggaaatcggtggaatcatgttgcctgccgttcacttttagcggcaatcctgagattgcataaacaaaaacaggctcgcatgcagcgtaagaaaccgcatacgagcctgaaaaaggattttctggagatttgcaatcagcgcactgaaatcagagcacggcgatggcgtcgatctcaacgagagcgcccttcggaatgttgttgccgccgaacgcgacgcgggccggcttcacggagccgatgaaggtctgcgcatacacgtcgtcgatctcgtggaagtcttcgacgttcttcatgtagatggtggcgcggcagacgtgttcgatgccggtgcctgcggcgtcaagaatatgcttgatgttcttcagtgcctgggctgcctgctcgccggcggtttcgccagctagttcgccggtgactgggtcgatgcccagctggccggagacgaacacgaaaccgttggccttcacggcctggctgtatgcgcccagcgccgccggggcttcagaagtcgcaaccgcttccatcttctcgctcataatgttctcctttgaagaatgtgttatgcatgttgcttgcgttcaggccgcggcaaaccacgacaacgcaatctcaagcaatcactgtacccatggaatcgacacgcatcgccccatgttccaaataccggctccctgccccggctcttcacttgtctttgtggtgggcttgatggggatcgaacccacgaccttctgttccggagacagacgctctatccactgagctacaaacccgtgcgtcaaactactttacactgccttgagatgaaagcgacactttttacggaaaaacgatcttcgaatctcggatcattattgcgaaaacatagctacggcgggtctttcgacagcacacccaaccctagaggggaaataacgggcatagaacggggaaggaacgagagatagcgtgcgccacaacgaaatttgtagcaccataacaccatttgaagcgtcttttccactagactgaaaatatggttgaggattcaggcagaaatataagcgatttcgaatacacgcgccgttttttctgccgtgccctgccgacgcagttggatgataacgacagtccgacgctgatcatacaaagttattacgtgcatcaggataattacgcgctgcgcgtgcgattgaaaacaaagtccgtccgcattgccatgactccggacctcgacccgctggctgtgctcgaaaagtatcgcgacgaattccggcttggatcagtcaccgtgaaagggccgtccgtgggaggcacgcgatatgaggcgagccgcgatttggattcgcgcatcgcaggggagctcatcaaacgcggcggacacgtgaccatcaaaaaccgtttcaccgactggatcgatgaggacggctggaacatcgacgtgttcggaggcaccaacgctcccctgatcattgcggaagcggaacgtatcgggccggtcaccaatctggtgatcccgaaattctgcaccaccgaaatcaccgaccaatcgcggttcagcaatgaagggcttgccgcgaatccatattcacgatggaaatccgaattcgaagacgaactggaagcagacggaccgcaattcctcgactatttcggcaccaaccgtatggaataagtcttttaaaaaacaaccgtaggccgtaaagaacgatgtagttgcgcagcctacggttgagcggtacctaaaacggtacctaaagtcaataaacgagtcagtacatgagcgtggcgaggcgacggcgggcgcgcttcaaacgctcgtcggtcggctcaggaatcgtgaaatattccagcagacgcttgcgcaccggttcaatatcggccttatggccggccgcaacgaaatccagcaaacgatcgaacgcatcctggatctgaccgccgatcatatcaatgtcagcgacggcaagctgtgcttcaacatcatcgggattgtcggcagcggcggcacgcacctcacgcacgttcgcattggcggaacgggccaacagcaacgccttcgcacgctcgcgggcggcacgcgcatcgttcggatcggcttcaagcaccttctcgtacgcggctgcggcgccagcgtaatcgccctgctgtgccagcatatacgcctcctgatgctccggaggcacctgctcctgggcgccggcagcggaagccgagtttgccgcatcggaattcggatcgccggaatacggcgcggaaccggtcacaccggcctgctgcgcggctgcgaccagattcggaatcaccgtatccacgatctgctgcatttcctcagcggacggcaagccctgcagaatcggcatcggacggccgttgatcaacgcgaacaatgcaggcgcgccctgcacttggaacgcctgcgcgatcgacggattcgacgcgatatcgatacgagacagctgaatctggccgttcagctggttcacggcatcgcccagctggcgtgccatgtcgaacaggcggtcatcggtcggcacccacagcagcaacaggatcgggaacgtggccgacgtctgcaccatggcctggaacgtgttctccgtggtgtcgatcacataaccgcctgcggccggagcgcctccagcctgccccggttcggccttcacctgatgcttcaacgcctcaagatcgacggctcccgccaaggaaactcccggattaaacggcctttgacctgccatgcttgcctcctagatatcaacaatcaacaacattaagcgcccggcgcaacacacattgcaaacgttcgccccaagcttacgcgcattcgtgcgactgtcacgatcacagtgcctcaacacgaaccggctggcgctcggaaccgactgcagtgatcttcgcgtcagaatttgccggaggcacgtacagcgcgaccacattcacatacgtggttttcatggtgctggtggcctgaccgtcgccaaacagcgctttttccgcatcggaagcgggctgcgactcacggccggagccagctgaacgcgtccattcggaattgatctgcgccaccaccagatcgccaccatccgcggaacgcataacgctgatggcatcgtcaaccggtgtgaacacctgctgctgcgatccctcgttcagctccatggccttctgcacctgttcggtcagatcggcaagcttcgtacgcaaatcgtcgtcggcaaacttctgcgcatactggctggacgcaccattctgcaacacgtcggcatacgcggcgaccgcatccttcggggtcatgaccagaccggtgtctttttccgttccctgctcgctaccggttttggaaatctcgaaactcggcatcttcacgcccgaaaacagtcgtgccacaccccacaacttgtagttctgacgtgcggaatcctggcggaacaccagcagacgcttggactgctggtcatccgtggtggaagtgatggaaaacaccgaacgcggccatccactgtccgtggaaatcacggcctgcgcaagatcagttggaatcgtggtcttgcggtcaagattgcccgtgacctgcgccacatgaagttcgctagtgcgaatctcaagttccggcccctccaaaatcgaaccgagggcgtcgatattgcgaccgttattgcactggtcaagcgttttgagaatattcgtacggatggttttctcttgcttggcggtcagattcggcgcgtcttgacgttgcgtggttttcggctgcggcagctgcccctcgcatccgcacatgccaacgaccattcccaatgcgagtacggccgccgcgattacgttgaaacgcttcttcatcacttggcctcctcgttgtcaggttcgtcggacttgtcgttgtcggattcgtcgttttcggatgtttcgttggatccgaccgactcggccgttacggccatttcgtcaacttcgttgggcacgttgatttcatcggataccgcgaattctacagatcccgaggccgctgcggccgcactgctttcctcttgtgcgagacgtgcgaaatatgcggcaagctcgtcttgcgaaatcacggaagtctgttcgaaatcgtcgttttcttcaacaccatcagcggcagcgttctgctgatcggcaacgagattgcgcgcgccgggatcgacaatcgtaggctgcgcaacttcgttttggctattttccgaaccactcgcgcgatgcccagcatgacgacgacgcttacgcttcggcccgctcttttcgctacgggcggcactcgcttcggcgttcttcacccatgcggcaacctcgtcatcgtcaccctgcgtggaaccgatgccgtcaaccatggcaaacgcgcgcttgttgcgacgcttatgcggaggcatggcaaacacggaagctgaaagcaccgcaagtatcgccagcaatccgccggaaagatagaacggcatggcgaaattcagcatcgaacgacggttccaatcaagtgtgaccgaacctcccttgcgatcgccgtaatcgataatcgcaacggaatcctcggcattattcgtattagcacccttgaactgcatatcaacggaaccggcattgcatttgacggtgcgccacatgtcggaatcctggaaggcgacctggccttcggaattatcggcggtgccctgagccgtggtcttcagcgtggacagggtggaccagtcggacagtccggtgacgcgcgtgtatttggatcccgcgatccatccggcgatatcgcgggcggaaccgatggcgatgcacacgttcgcggatttgtcgcgcgacttcgccgaaatggtgacgcgatcgtcaaccaattgcagcacattcggatcggtgaccacatactgcgatcccgtaaccgcagcggacgccgtgacctgtgccgagggcttccaaatcgtcgcgttcaagacgccaagcacgatgcaagcaatggcaagcaagccgaaaataggcgtgacaatgccgcgcataatcttggcgtgtcgcgtgggacccgccttggactgcggcttttcctgttcttcctgcaataaagtcatagcattcactattctacattgcctctctgcaaaagcctgaaaaaactatgaaaatcaatgattgccactaaagtggaacctatgcgcaaatctactcttttcaaagccgtcgcagccgcctgcacaacgatcatgtgcttgggtttcgcggcatgcggaagttccgacacgaagtctgattcctcctccgattcatcttcgtcttcttccgattcctcgtcgaagatgaatcagatcgccggtgtgaccgccacgggcaagcccggtgagaagccgactgtctccttcaaaacccctatgacggtggaagacaacagctacgtcgtattgcagaaaggcaatggcgaccagattgaagacggcgaccgcatatgcacgcagggtatcgccatcaatgtcaaggatggttccgaactcatgagcacctgggagaaaaacacccccgattgctctacggtggtcacctccgacaccagtcagatgactgaggattattacaacattttcaaggatcagaagcttaacgccacgcttgcgttcggtgtgaacgattcgaattccgctggcacctcctatttgatggtgctcacgatcgtgtcgaagtcgaaggatctgacgaaggcaacgggcacgaaggtgcttgacgttcctgccgatctgccgaaggtgacgcttgcgaaggatggcaagccgtcgatcgatatgaacggatacaagggttccgacacgttgatctcgcaggatttgatcaggggcgaaggcgccgaggtcaaggatacgcagaccgtgatcgcgcactataccggatggctgcttgacggcacacagttcgattcctcgtgggatcgcggtgcttcgtcgagcttctcgcttgatgaggtgatcaccggttggaagcagggcttggcagggcataccgtcggctcgcaggtgctgctggtcgtgccgccggaccttggctatggagacaaggattccggcaagattccagcgaactccacgttggtcttcgtagtcgacatcctcgccgcctactgatctacatcacgattcgcttataaaaactccctgcataacaacagggagttttttataagctagaagagtcgtagggagtcgtcttcggcacctttcatttcgtcatagtcgaggatcaggcagtcgaagccgcggtcctgagcgagcacgcgggcttgcggcgtgatggtctgcgcggcgaaaatgccacgcacgggggccaacagcgggtctcggttcaacagctcgcagtaacgggtgagctgctccacgccatcgatgccgccgttacgtttgatttcgatggcaacatgcttgccactgccgtcgatggccataatgtcgaccggtccgatggcggtcgggtattcgcggcgcaccaatgtcgcaccttctccgatgcgttcgatctgttcggacagatacttctgcagatggtcttcgacaccgtctttgatcagccccggatcttcgcccaaatcgtatgtttcgtcggaataaatatgctgcaatgtcacttcgagcacgtcattggatttatccgccgaagcacgaatgactttctgcggaacctccgtagtcacgtcgtcgtcggcatgttccggagtgatgtctttgatggtgcagggcgccgccatccagttgagtggcttgtacgaaccaagttcggagaaaatcagcagactgttatcggctttgataagcaacacacgcttggcgagcggcaaggacgcattcaaacgcccggaatattcggcagagcaatcagcaacaataattcgcacgaggcactaccctaccatgattgtcgtaagccatgaatcccacgatatgtacaatcctatttttgttttgattaatcttttttttaaaaaaaaacagtccgtctgctgcaactacagaatcgcaatcatatgcaattgctgcaatcgcaacagacggaccgtcagaagtatgctaccgagtgctactctgccatcttgacgtcacgtccacgctcaaccgcaacggtgagcttgttcgaatcgaaggagatgaaaccgtcggtcacttcgaaggagcgacggctgccatccggatccaccacaacgatggttccttccttgattacggtcaatacaggctcgtggttgggcaggatgcccattccgccttcagaggcaggaatggtgacggacttcgccgtaccgtgccacacggggtggtcggcggcgacgatgttcacctgcattgtcaatccggccatcacgcaccgtattccttctgcatgtcgtgccacttcttctcgagatcgtcgatgccgccgataccggagaatgcctgctccggaacgtcgtcgtacacgccgtcgcaaatgcgggtgaacgcttcgatggtctcatcggccggcacgtaggagcccggacgaccggtgaacttttcagcgacgtagaagttctggccgaggaactgctcgatcttacgagcgcggttcacggtggtcttgtcttcttcgccgagttcgtcgataccgatcagagcgatgatgtcctgcagctccttgttacgctgcagaatcgccttgacgcggttcgcgcaatcgtagtgagcctggcccacgtaacgcggatcaaggattcgcgaggtggagctcagcgggtccactgccggatagatacccttggaagcgatgtcacgggaaagctcggtggttgcatccaagtgggcgaaggtcgttgcaggagccgggtcggtgtaatcatcggccggcacatagatggcctgcagcgaggtgatggagtgaccgcgggtcgaagtgatgcgctcctgcagggcacccatttcgtcagccaggttcggctggtagcccactgcggacggcatacggccgagcagggtggacacctcggaaccagcctgggtgaaacggaagatgttatcgatgaacagcagcacgtcctgattttgcacgtcacggaagtactctgccatggtcagtgcggtcagcggcacgcgcagacgggtacccggctgctcatccatctggccgaagaccagtgcggtcttctcaagaacgccagcctcatccatttcgccgatcagatcgttaccctcacgggtacgctcgccgacgcctgcgaacacggacacaccgccgtggttctgggcgactcgctggatcatttcctgaataagcacggtcttgccgacgcctgcgccaccgaacagaccgatcttgccgccctgcacgtacggggtcagcaaatcgatgaccttgataccggtttcgaacatctgggtcttggattccagctgatcgaatgccggcgggttgcggtggataggccaacgctcggtgaccgtgatggtttcgtcatccttcttgttgaggatgttgccggacacgtcgaacacgtgacccttggtgacatcgccaacaggaacggagatcggaccgccggtgtcgagcacggtggcgccacgaacgaggccgtcggtcggcttcagcgccacggtacgcacggtagagtcgccaaggtgctgttcgacctcaagcgtgatcttcttcgtggtttcgccctcttcgttggcggtgttggtcagctcaacggtaagtgcgttgtaaatgtcgggcaggtggcccaccgggaattcgacgtcgataaccgaaccctggatacgcgtgacgcgtccagtggtcggctctgcagccgtctcgggagccgctgtggtctgattctcagccatatgcgttcctactcttccttcttattcagcgcgtcggcgctgccgatgatttcggtaagttcctgggtaatcgaagcctgtcgcgaagcgttgagcttgcgggtcaggtcgtcgatcaggctgcgggcgttgtctgtagccgtatgcatggcgttctgtcggcttgcagtctcggatgccgccgcggtgagcaggcattcatgaatacgggactggatgtacttcggcagaatcgcgtcaagcacttcgtcgacgctcggctcgaacgcataaagcggggtcgcggcatcggcatcggattcgggcacagggccggagtcctgctgttccggaagcacgagttcaacgggcagcatacgcagcacgcgcaccttctgaacgaccatattcacgaattcggtgaacacaatgtagagttcggaaactccaccttcgctcgccggcttcatgtaggcgtccatcagtgccttcgagatggactctgcgacttccacgccgggctggtcggtatcgccttcccaagtaccggcaacatcacgattgcggtacttgtagtacgtcacaccgcgacgaccatacacatacagttccggctgcttgcctgccgcatcgaggcgggccagcagcgattccgtttcgcggatgatcgaggaggtgtacggacccgccataccacgatccgaggtgagggcgaggacagccacgcgagggttgtcctcgtccttcttcacgatcggatggtcgatatgggtgtgggccaccagcgcttgcacggcgtcgaaaatcgcatcggtatacggcttcgcgttcaaggcgacgtcacgtgccttggcgatatgcgaagacgcgatcatctcctgcgcgttgaagattttctccaacgacgcggtggaggcgatcctagatttcaatgcgagttgcgagcccatggatcacttctctcctgcgacgatcttttcctgctcgaccggggtggcgttcttgacgttaggcttcttctcgaccagcggcttgcccgcgctggtcacgaaagtctcacggaacgcttccacagccttgtcgagggcagcctcggtgtcggcggtgaaatcttcggtctcgcggatggtcttgagaatatcggtgttgtggtccagatagtccagcatggccttctcgaacggcagcacgtcgttcagcggcagatcatccatcttgccatgggtgccggcccacacggagacgacttcctgttccatggaatacggggagaactgcggctgcttgagcagctcggtcaagtgggaaccacggttcagctgggccttcgaagccgcatccagatcggaagcgaacatggcgaaggattccagggaacggtactgggccaaggagatcttcagcgtgccggagaccttcttcaacgccttggtctgtgccgcgccaccaactcgggacacggagatgccgacgtcgacagccggacgctggttcgcgttgaacaggtcggactgcaggaagatctgaccgtcggtgatggagatcacgttggtcggaatgtatgcggacacgtcgtttgccttggtttcgacgatcggcaggccggtcatcgaaccgccgccgaggtcatcggaaaccttggcgcagcgttcgagcagacgggaatgcaggtagaacacatcgcccgggtatgcctcacgtcccggcgggcggcgcagcagcagggagatcgaacggtaggcttcagcctgcttcgacagatcgtcgaagacgatgagcacgtgcttgccgttgtacatccagtgctgtccgatggcggaaccggtgtacggtgcgatgtacttgaagcctgcggaatcggaagccggggaggccacgatagtggtgtactccatggcgccggactcttcgagggactgcttcaccgatgcgatggtggagcccttctggccgatggccacgtagatgcagcggacctgcttcttcggatcaccggattcccaattacgcttctggttgatgatcgtatcgattgcgatagcggtcttaccggtctggcggtcgccaatgatgagctggcgctggccacggccgataggcgtcattgcgtcgatggccttcagaccggtggacattggctcgtcaaccggatgacgatgcataacgtcaggtgcctgggcctcgagaatacgacggccttcggtcttgatctcgccaagaccatcaatcgggttgcctagcgggtccacgacgcggccaaggtagccgtcgccgacgggcacggagagcacttcgccggtacgacgcacttcctggccttcctcgatacctgcgaagtcgccgagaataaccacgccgatctcgcgggcgtcaaggttgaacgccaggccaagcgtgccgtcttcgaaggtcagcagctcattggccatgcaaccaggcagtcccgtcacgtgcgcaatgccgtcgccagcagtcgcgacataaccgacttcctgagtcggggtatccgacggcttgtacgactcgacgaactcatcgagcgccttgcgtatcgtggtgggatcaatggtaagttctgccatgatcactccttattgttgtttataaattcagtcaagtcttgtttcaggcttgttcaccgtgcggcgaaccgtcaggcggttgccttcaccgtgcgctgaagatgctgcagctgtgcgaccaccgtgttgtcggtgacctcgtcgcccacctggatgcgcatgccacccatgacggtcggatcgaccaccgagttgatgtgcaccggatgaccggtcttcgccgagtaaatggcgatgagcttttccacctgctccttgctcaacggcgttgccgtggtaacagtgaccatcgattcgcccatatggcgggagaatttgttgatcagccactgaatggtctgcaagtagcggcgattgcgcagattgcaggtcgcgtgttcggccagacgcttggtcaccttggtgaaatccgcgtctccaatcaggctgtacagcagcttgacacgggcttcactggaaacggttgcgtcatacagcttggtacgcacgaccggaaggttgagcagtgcggaatgcaactctgcaagctcgatggagacccgcaaagtcgtattggtgtaatccgcgtagtacatcatgccatcaacgccgaaatcctcaacggcattggcgatatcagacacgcggctccaacggcgagacaccagatcggacatgatctccatcacgagcggatgggcctggtctccgatcagagtcttgactaccgcaaccttgtcttcgactgggcgcgacgggtcggtgagggcacgttcaagctggatattgtggtcaagcgcgctggtgatcgtgaacagttcgttcccgatacgccatgcgtcctcaccgctgtcacgcagcttgggggccagcgagtcacgcgatacgcggtctgcgatacgcgatgcttctcctcgcattggtcacctccctttcttgaaggtttcgatcacttcttgtcgctgtccaagtcggcgatcatctggtcgatcatcgacgactgcacatcgtcattctcgagcttgctacccaggatcttgccggccagtgccgttgccagcacgccgacctcacccttgaggctcaccagagcctgctgctgctgcgattcgatggaacgctgggcggtggcggtgatctgcgccgcatcgttttcggcacgagtgcgcgcgtcagcgatgatatgcgatgcctccgtacgtgcgtcgtcacggatcttggatgcctcgacgcgagctttgctcagctgagcctcatacttcgccttggcttcatcggcatctttctgggcctgttcggccttggcgatgccaccttcgatcttggcagcgcgctcatcgaacacggcctggaacttcggcaggaagaacttgtagaagaacacggcgacgatgatcagaatgaccaacgaccagaaaatgtcgtagcttttcggaaggaacaattccatttcgctagctgcggtcaccatagtgtcttcctcctttcatgttcgtttgcgtcttcggtgttaccttgaatcaagtcttacttgatgaaggcgagcacgaagccgagcagtgccagcacctcgacgaatgccagacccaggaacatgagggtctgcagacggctgccgagctcaggctggcgagcggtgccttcgatggtcttgccgatcaggatgcccagaccgatgccagggccgatggcggcgaggccgtagccaacgacgttcaggttgccggcaacctcagcgagggtaacgatatccatgattgtttcctttctggttattgcttgacaagaagcaacaattaaaaagccggcggtcagtcgatctccggatagctcatattgatgtatgcggtggtcaggatggcgaagatgtaagcctgcaggcaagcgaccagcgcttcgaacaggaacatgaacatgccagccgcgaaggtgacgacgccgaatggcatgaacaccttgttcaccacatcaatgaggaagtactgcgtggccgaaaggcacagcgcaagaatcaagtggcccgaaaccatgttggcgaacagtcggatcgtcaacgagaacggacggataatcagcagctcaagcagctgaatcggggacagcagaatgtagatcggggccggaacgcccttcgggaagatctcatccctcaggaagtggccgaggcccttttcacgaatgcctgcaatccagtattggcagaagcaccacatggcgaataccagcggcagcgtaatggttgcgcttgccgcgatattgaagcctgggatgatgccacacagattgaagaccagcaacgtgcagaacacggtggtgatcatcggcacataacgcttgccgcgcagctcgcccatcacctgatagacgatgttgtcacggacgaattcgatcaaccattcgactgctccctgccaacggctggggatgagctttgcacggcttgccgtaattccgagaaccagcaacatgatgacggtcgcaaggatgcgaacgaggatgatgcggttgatggcgaacggcgtgccctgaaaaacgaacggatcgggaaggaagtcatcgacactgggcatttcgggaccatcagcgatggtcagcatgccctttcccaatgcaccaatcattcacgcctcctgctcttgtgtcagctgttagtttaacccaacaaccgagtcgaatgtgacgttctggttacttaaccaaagcgtacttcgaagtgcgcgtcgacgcgaacggagtcccgtgcgacgcattcgactccgaatggctggataggattattagcccgtgtctagacaacatccacacacttgggcttttccatactcccatttggttttcccggcgtttcgcagcaagctgtactaactagacacagctttgtgaatcgtcggatagccgacgcaaccaatagtttgttttacgaaaacagcatattgataaaacgtttcaccaagtatatcacatataacacaggtgctgcatataaagaaagaggggccgcatacgcaagcccccaccagtaaacagccgtaaagtcacgcgccaatcacggccgcacgtcaatcacatcaatatgcggatcaatccacaaatcaatcgcgaatcacgccataaccgtcacgcacgaacggcgcaaacgcgtcgacacgcggcgaacccggctgatgacgaatcgaacgatccgtgccaagacgcttctgcgcacgaagctgcggaacctcgctcaaatcgtatggcgtggtctgatacacccaattcagccaattgcgccacaggagattggcatgggcgcgccacgcgaacaccggctccaactgcggatcatcatgcgggaaatagttttcggggaacggcacattcgtcatgcccttcttcatatcacgctcatactcctcggccaaggtgtacttgccgtactcccaatggccaagcgcgaacacttccgaaaaatcacgggtggcgatcagcccaggaccggacttcggaccccacgtgagcacctgcaactccggattgcgcgcgatatcaccctcgtccacccccgcaaggcgagaatgcggctgcaggcaaatctcatcgaagccgttcgtcaaaaagcagtattcatcctgcaaatactgcggaaacacgccaaaaatcttctctggcaaattctctttacgcacgttatagcgataattgagcgcacccatcgcgccccagcacaaatacatagtggagaacacatgcgcggaagcccagtcaagaatctgcttgaactcatcccaataatcgacctgttcgaaatcaagatgctcaacaggggcacccgtcaccacgaagccgtcgtaatagttgtcttggaacgcctcaatggtctcatagaacttcaccagatggtcggcgctcacatgcgtaccctcgtgcgtggaggtcttcatgaaatcgatctccacctgcagcggacttttcgagatcaaacgcagcagctgcgtttccgtctcgattttcttcggcatgagatttaagatcaccagcttgagcggacgcacgcgctggcgctccgcttcaggcttttcaagcgcgaaaatacgctcggagtcgagaatgtctctggccggaaggccgctggggatcttgataggcatgcttctattatggtgcgggctcggatatggcgcacttccctgcccccacgatcagccgaaaccgttataggaaaaatgaataacgcgctatttgcaacgcggttttgcatggccggactgatgcgacacgccgatttgacatatttggaagtaatcgtaaagttaatagagctgtcttaaagacaagccgacgcggggtggagcagctcggtagctcgctgggctcataacccagaggtccatggttcaaatccatgccccgctactgatgaaagctaggaattgcaacaattcctagcttttttgttttccgtcaaatctcaccaaaaccaatttccggacaaaatctggacaaaatccgacaaaaaccgggtatatcagccgagttcatcaatcgcatgtgccgaaagtatggagaaaatgcgtcggatccgccaatcgcatgtgccgaaagcgaagattgccgctcaaggctgaaaatccaacgttctccaaggttgcacgcgctacgttgacctcgccaaccacatatcaccagatataaggagaacaaggcaatgcattatatgaatcaagcgaacgcgcacaacgcgacgcaggacaccacaatgcaagacagcgcaacgcacgatacggcaacaaaggaaacgcaggacaccgcgccgctgaaaggcatcaccgtgattgactggacgcaggtgcagtccggcccgtcgtgcacgcagatgctcgcatggatgggcgccgacgtcatcaaggtggagaaggtgcagggcggagatccgacacgtaatgaaatgaacgacgtggatggctcgtactccctgtacttccttcagctcaatgccaacaagaaatccatcacgctgaacatgagagatccggaaggcaagaaaatcctcgccgaactcctgaagaaagccgacgtgttcgtagagaatatcggcccgggagacgtggaaaagcttggtttcggatggaatgacgtacatgcgatcaatccgcgtctgatcatggcgtcgctgaagggcttcaacaagggcagccggttcgagcatgtcaaggcgttcgagccggtcgcgcagtccgcgggcggtgccgcttccaccaccggctggtatgacggcgagcgcaatgtgcccacgcagtccggcgccgcattgggcgattccaacagcggaatgcatctgctgatcgccattctttcggcgctgttgcagcgcgagcataccggtgagggttgctatgtgtaccagtcgatgcagaatgcggtgctgaacttgtgccgtgtcaagctgcgagaccagttgattctcgaccgtttgggcaagctttcctactatgactgctacccgaattatgagtggggcaagcaaggcaaagccattccgcgcgcagcgaatgcggagggtggtttggtgcttggctggtgctaccgcgcgaaaggctgggagcatgacccgaacgcttacgtatatatagtggttcaacagtccaagaagggcttcgagaatttctgccatgcgatgggattcgaggattggctgaccgacccgcgtttcaataccgccaatgcgcgtgacgagcataaaaccgaggtgtaccagcgtgttgaggcgtacaccatgcagttcgacaagtacacgctgaccaaggaattgggtgcgaagggcgtgccggtcggcccggtgttggattggtatgagttggagaacgatcctgatttgaatggggatggcacgattgtgaccattgaccagcaggatgcgcgcggcgatttcaagacgatcggcatgccgtttacgatgagtaatttcgtgccggattaccagcgtgcgccgaagctgggcgagcataaccgtgagattctgcatgcgttgggatatgacgacgatcagatcgcttcgctgcgcgattccggtgtgatcggcggtaacgatggtgtgcaggctgatttgaagtaacgcacgttagcgcgcactggcgcacgaataagggcggatcacaagattcgcccttatttgttatgcgtcacatccattgcagtccacgccccgcacttccgcacacaatcccatgtcttacgtcttacggtttaccgtcacaaaaagcgcatgcagtaacggaacgttggaatttcaacgttctgttactatatgcgcttcgtgagctacagtgaggatactgaatcagcccacgcagaaggggacgagccagatccacagcagacaggtggccgcgaatgccaccgtggcgacggccgtggtcgaggcgccttcttttacataaatgttgtaacggctggaaataatgatgcctgagaacgccggcggcaacgcgaccgccatcaccagcatcgaaatcttgttcatgtcaccgcccatgccacacaacagcgccacgccaaggaacactgcaggcgtcagaatcaggcggaagaacgtgttccagatggtttcccaaccgagcgagaatttcaccgtggaaagcgcgaggcccgcggaaagcacggccacaccggaattcgctttggcgatcagatcgaaggtcggcgccacctggcttggcacatgaatgcccaccaacactaggaaaatggccaataacgacgcccagcagatcggttgcttcagtgcgtcgagcaacgcctgcagattgccgttgcggttctttcccgtattcgacgtgccatgcaccataagttcggcggttttgtcggttgcggcatctcgcgccgggtcaagcgtgatatcgccttttgcattggcctttgcattgaccgcgttttcggcctgcacgctaagcttcgctcggtctttggcctggccgaggttgatcagatacatgccgatcggaatggtcaccacgttgaccacgatggaaataatggctatgacgagattcgtgctgacggtgttgccgtaaatcggatcaagcacagcgaatccaaggaaaccaatcgtcggagatcctgcgatcagagcacagacggccgcctcctgaatgctgcggtggaacagcaaccggcacagataatagctcaccataaacatgacgatgacgccgatgaaactgatggcggtcaatgttgcgtctttcgcaagcattgcacgggtcgatttgatgatggacacaaataacgccgcaggaagcgcgatattcaacacaagtttattaagtccctgccgctgatcgtcatcaaaataactgaattttccacaaatataccctaatgccataatgacaataattggcacgatgtcgtcaacaagtatgtttatcactgtcgttctttctttatattttttctatctgcaatcttctgcaatatttttgattgctgatattgcggatattgcagatacgttgatcggatcattggttttcaggcagaaaaagtgggcgcacgcattccaccgttcgcacgcccacatgtcataccgacagccgatgcgctacatgcgagcgccggtcgcgtagtcgtacatggtgacttcggaatcaacgagggctccgaccaccggcttcggattcaacgctccgatattgccggattccttgcccgcatactgcgcgatctgcacatgcacgaagcttggcttgcctgattcgaccgcctcgccgaccatgcgttcgacttcttccggagtggtggcatagtaacctttacccccgaacgcttcgaggaccttctcgtaatgcgcgttgtaggtaagcgtcagcggcgacggatcaccgtccgctccaaggttttcgaagtcgccgcggtagataccgccgttgttgagcaccacgaaggtgatgggcagctggtagcggcaggccacctccacttccataccatcgaagccgaatgcggaatcgccgccgatgtacagcactttcttgccagtggaaagcgccgcgccaatcgcatagccggtgccgcagcccatcacaccccatgtgccgcagtccaaacgatggcgcggttcgagcatgtcgatgatgttgcggcaatcatcgagcgaattggctccctcattggtgagaatgagatcttcatggtgtttgttgtacacctttttgatggctcccaaggcgttgaaatggctcatgggcagctgatcggattgttcgcgggtttcaaatttcgccacgtttttcgcgctggcttccttcagcatgttcagccaggtttcgtcagctttgaacgggtattcttccagagatccgttgagcagcgtcatggcggaacgaatatcccccacgattggtacgtcgatactgcgcgtgttttcgatttcttccggattgatgtcgatttggatgaatttcacatgttcgttccacgttttgccctggccgaacgacagcatccagttgagtcgcgcgccgaccagcaataccacgtcggcgttgcgtagcgcggtggaacggcagcttgccgtgctgtgtgggtcggtatcgggcactacgcctttggccatggacattggctggaatggaatatccgttttcttgacgaattcgcggatttcctcttcggcgcgggcgattgcggcgcctttgccgatcaccatgagcggacgttcggcctgctgcagcaatgcgagcgccgcgtcgatggattcgcgtgccggcaccatggcgggggccgggtcggttgccgtccacatcaggcggtcggcttcgctttggctcagggtctgtgccacggtgtcatcggggaaatcgatgtacaccgcgcctgggcgtcctgaagaggcgatatgcatggcacgggctaccgcgagcggaatatcttcgatgcggtcgatgcgcagcgaagccttgcagaactgcttggcgtagttcatctggtcgaggccttcgtattcgccttcctcaaggtcgaccacatggcgggttgaggagccgccgatcatgatgaccggatagccgttcaccgtggcttccagcagtgccggtagaccgttgaggaatcccggagcggataccgtcaacgtgacagccggccgaccggtgatgaatccgtcggccgcggccgcgttcacagcgtcctcctcatggcgcatgcccacgaatcgcatacccatgccctgcgcgatgcgcgcgaaatcggtgacgggaatgccgaccacgccatacatgtttcgtatgccgttggccatcagcacccgcgccagataatgcggcgcatcggtgaccttccgatcatcggctccctgccgttcggcatccgcacgcatgctcgcgaccatcgtttcatctgcatgttcttctgtcatcgcaacctccattcgtatcgacgacgccatgattgtagatacgtgaaaatgggagttcgtcagcagaaaaatatgttcgtctgcggcttaatttcaacgttttcagcatgatatagccgtattctcacgcacatgcggaatatattgcagctgaaatatcgcaactctcatcgagaagcatcacctccgcgagacgacatcatcgccgcatatcatcgtcgccgtaccgcatacagcatgaacgccccgcagcacatcacggcagccgtcaaacccaacaccagccccatcggacttcctgtctgcggcatttcctgctcgggggcataaaggttgtcgacattgaacgtcagcaggctatcctcacgttccaccacatcgttcagcaccatcattttctgcgcggtgacggcctcatccaatcccacggactggtatccgaccttgatattgacctcaccggcgcccgttgcatgccaatacacggtggttccctccagttcggcccagccgactgccgtgggctcgtcatcttcgtcgaacacggccggaccttcgatcgtcgccgtgaatacgccctcgatcggctgtccactcgcatccagcaactgcacgaacaggcttccggaccgcaatccctgccgatcatcacgcgtcaccctcgaagaaaccggcagcttgttcgcagcctcctcccaaagctcgttgaccttgctttccagtccgtccatcaccgagaagaggtattgctcatgcctgacccacaccttttggtcgtcatagttgcggtgcaccagcacaccgatcgccgcatacgtgagaaccggttccccgtcatgttgatattcggacagcagccatgcgaggcgccgcgccgcttccgtattttccacggtggtggtttcagtcaccttatagtcggtcatgctttcgatttgccggcaataatagaatttgcccgatctcgattccgcgttcaccccgatcacatacggttttccatcgagaaaatagttgtaatgcttgccgttcgcgcgcagcagctgttcggcggccagcgcggccgggcaggtcattcccacgattatgatgcaggccgccaataccgcggccagaatcgcaagcgtatgtcgtttcatcgcattcatcgcatcgtcctttcgatatgcacatcgttgttgtcgtaattcaacaggcttgcatacttgcgattgccacatggcctttttcaagggttgtggtcggaggacgttctttttgccgtttttgtggacaacttcgcttgtcagcaaacgtaacttatccacaaaaaacgttttaccaatcgtaggtaaacaagttatccacaaagggtggaaatcgctggtcggaagatagttcacccaaatccaccttttctcctctataatcggcggtatggcagaagaagataagagcgcggaaccgcgcaccaccgcaaccaagcaaccagccgtcaagaagacgaccgccaaaagcgcggccgccaaaacggcatcggcaacgtctcagacgcctagcaagcgcaccgccgcagccaaaaagtccacggcatccaccgctcgcaagcgcaccaccaaagcgaaggccgccgcaccgcaaacggtcggcgaagccccagcccccgtcatcgaacgcaccagccccgaacagttcggccgcgtgaacgtgctcgacatcaccccgaacgttgagaacggcctgttcccggcacgcgtggagctcggcgaagcattcaacgtcaccgcccaagtgttcatcgaaggccgcaccaaggcaggagcgaccgtgtccgtgcgtaacgcacgcggccgcgaggttgaacgtttcgccatgacctgcaccaatccgggcctcgaccgctgggaagccatggtcaagatcggcgaacacagcgatctgaagccgtgggatgccgattatgccgccgtcaagcgtcagctgggcgaatggcagatcgtggtcgaaggctgggaagacacctaccagtcctggctgcacgacgccgccatcaaggttaaggtgaatgacgacgtggagaatgcgctggaatccggcgcacagctgctcgcacgttgggctgacgcgaaggattccaagctttccgcagccgacaagaaggtgctgcgcgacgccgccaagaccatggaaaacaagtcgctgagcgccgaagagcgtctcgccgcagtccagagcagcgacatcgagcagctgcacgaaaccaacccgttgcgcgacggcctgtccgagtcgaatccgcagcgtttccgtgtggaacgcccgaagtccagcttcgcctcctggtatcagttcttcccacgttccgaaggagcctactacggtgaagacggcaagatcgttcccggcaacctcaagacgtcgatcgccggcttggaacgcgccgcagccgaaggcttcaacattgtgtatttgccgccgatcttcccgattggcgtgaccaaccgcaagggacgcaacaattccctggtagccggcccgaacgatccgggctccccgttcggcatcggctccgaactgggtggccacgacaccgttgacccgcagcttggcaccatggacgatttcaaagcattctgcgagcgcgcccacgagctgggcttggaaatcgcgcttgatttcgctttgcagtgctcgcctgaccatccgtgggtcaaggcgcatccgaactggttccgcaccaagccggacggcaccatcgcattcgcagagaatccaccgaagaagtatcaggacatttacccgatcgacttcaatgccgacatggaaggcatcgaaaaggaagtcgaacgcattatggatctgtgggtcaaggcgggtgtgacgatcttccgcgttgacaatcctcacaccaagccggtgcgtttctggcaggatgtgattgccgccgttacgaagaagcatccggaagtgctgttccttgccgaggcgttcacccgcccgggcatgatgcgcgcgctgagctatgtgggcttcacgcagtcgcactgctacttcccgtggcgtaacaccaaggaagagctcgaagagtacctcgaagagaccaacggcaatggcggcttctaccagcacaacacgttctggcccaccactccggatattctcaccgcctacgtgcgcgacaacggcattgccggccatgcggtgcgtgcggtgctcgccgctatgggcagcccgagctggggtatttacaacggctacgagctgatcgaaaacaagcagcgtccgggcttcgaagagcagatcgacaacgagaagtacgaagtcaaggtgcgcgattgggacagcaccgaaaagtacggcatcgccgaactgctgacctcgctcaacaagatccgtgacactcacccggcttgccgcagctaccacaacctgcacattctgccgagcgacgacgcgggcgtgatcgcattcctgcgtcagactccggccgaactgaccggtaccggcaaggcagatacgatgatcgtgatcgtgaacctcgacggacacaacgcgcaccagtccattgtgcacatcgagcttggcgacttcggtttcgccaccgacaagccgctcaaggtgcatgatgagctgaccggccgcgacttcgaatggggttacgacaactacgtttcgctcgccccttgggccgacgtggcacacgtgctcaccgtagtcgaagactgattgagtctcaatcgatctgattaatctcggtcagctcgactagaaattcgtttcgattcataccacaataccggttccacttcggtggaaagcggtattgtggttactgataatgcaaactgcccaatctcaaggagaaatgacatggcagaaaccttcaacgtcgtggtggaaattccgcgcggctccaagaacaagtacgaagtggaccacgagaccggccgcgtgttcctggaccgcaccctgttcacttccatgggttacccggatgactatggctacatcgacggcactctgggcgaggatggcgatccgctcgacgcgctcgtcatgatcccgaactccgtgttcccgggctgcgtggtggaatgccgcgccgttggcctgtaccacatggtcgacgaggctggcggagatgacaaggtactgtgcgtgccggctgacgtacgtttcgacggcatcaaggatgtcgaagacgtttccgagtaccacaaggctgaaatcaagcacttcttcgagcagtacaaggctctggagccgggcaaggaagtgctgccgggcgattactggaccggtgccgccaaggccgaggaagaaatcgtggccgcccgcaagcgcctcgaagaatccgagaagtgatttccacgcctttctagatagctttaggtagcaatccaaggaaagcccgttgacgtacgcactcgcacacgtcaacgggcttttgcataccttccaacgtccagattccgccagtcactggaagaatcctcccgcaaaccagcccctcagcgggcaaaaacctccactcactggaacaatcaccccactaacacggcttccagcggacaaattcccccagtcactggaagaaaatgcccgcaaatcaacttctcagcgggcagattcctccaccgattggaggaaaacggacaaaaccataccctccaagtgtccagattcctccagcgagtggaagaaacagcccgcagacgggatacactcatactgcacgcgcatattcgccggggccgctatagtggaacacgtaattcacggcatgcgaacagtattcgcagaattcaaagcccgctggctggcgcggcagttctatgtcggtacccctaggcgtaggcggacgtgagactccgtcgaggcccatcccgtgggaaaccggcgggatgaacctatataccagctatgttgattcaaacattacttattgccgtttccgtatcgatggacacattcgccgtttccatcggcaaaggtctcaccgtcaaaaaactacgcggcctcgacgcgttcaaaaccgccctctggttcggcggatttcaggcgcttttcccactgctcggctatttcgccgcctccacgttcagcaaatacgtgaccgccgtcgaccattggatcattttcggcctgctcgccctcatcggcggcaacatggtgcgtgaagcattcgaagaggatgaagagaacgccaaggaaaccgctgatttcgattggaagcacatgcttccgctcgccgtggcctgcagcatcgacgcattcgccgtcggcgtcagtttcgcattcatgtcgttgaacatttggatttcagtgatcatcatcggcatcaccaccggcctgttctccgcagccggtctgtatatcggtcgcgcgttcggctcgcgctggcagaagcccgcacagatcgcaggtggcgtcgtgcttattctgatcggcgtgaaagtattgctggaacatctcggattcctcgcataataatcgcaaatcagatatacaaataaatatacaaacttacagtaaaagcccgtaatcgcacatgattatgggcttttacattaccgcttaccgcaaatacttgcgattattttcctgcgctttcgcgttttctcgcgattgcaggaatcacactattagaacatgacggtcgcgtacgatgcgataccgaccacaattccggaaatcataaccggcagcagcgcaatgccgatccacggattcttggattgcggatcgggatcggcatcacgattccaccaatacgaacacgcgtcaagcgcgataatcagcagcaacgccacaatcaccgcaacagcccacgccgtcgtcgagccataatcggtggaagccgcgttttcgccggaacgaatcggcagcagcgtcgataggaagcaccagcccgcgctgccaatcatggcaacgccttccacaacattgtgcgacagcgaacgaatcagatgcgtacggttctcacgcgccatctgacgcccgaacgaaaccacaatcagcaggatcagcagaccgccgacgccggcgatccagccttcctgcatccaaaacgtgtcttcgtcacccaaaccggcagggaaaatcgcacgtccgagcatcatcgtcgtggcacacaccacggaaagcaagcccgcaatcacggaaatcgcatgccccgcaacaccatcgcggaacgggttgaacacggcaagcagcgcaatcatcgccacggaagccacaaccgtgaacgacacgattgcgggctcttccgcattcccataggaaatgccgggaatcagagcaagcacaaccagcaccacatatgcggcgatttggacggcaaacaccttgccgaacgaggctttctgagccgacttgacggcaactttttcagaggcggtcatttcgtccccttttcatgattttccataatgtggtcattacgtatgcgataccattaaatgtagccgcaagtgtccacatagttcagataaaattaatgaaacgccgacaacacacaacaagagtacaatcgcggcaacgatacaaaaccagtacaagagacaaagggagctaacgtgacggatctgacgcttatgacgttcgctagcgacccagctaccgtgcttccttctctggcgctgctttcccaccgcgtacgcgtgctaccaatggacgcggcaagtctggtgaaaatgccggaaaacaccattctttttctggatgcgcgagatgatctggccacggcgaaaacattgtgccgcctgattcatgcatccggactgtccacgccgatcgtgctcgtcctcaccgagggtggcttcaccgtggtcaattcgcagtggggcatcgccgacgtggtggtggcgtccgcttccccggccgaagttgaggggcgtcttcgcttggtatccgagcgcggcaactcgccggtcaatgcggtttccggttccggagaatcgggcgtgcagaacgaagacggcatgatccactccggagacctggtggtggacaccaacggctatacggcaagtctgcatgggcatccgatcgacttggcatacaaggagttcgagcttctcaagtacctcgtgcagcatccgggacgcgtgttcacccgcgcgcagctgctgcaggaagtgtggggctacgactattacggcggcacccgcaccgtcgacgtgcatatccgtcgtcttcgcgccaaactgggcggcgaatacgagcatgtgatcggtaccgtgcgcaatgtcggctatcgttttgatcctccggaagaagaggaaggcgaggcggcagccaaggacgccgcagcccacaacgcttcgagcgaaaactgattgtcgcactattcgcattgctggcattgcctgcgatttgcgatgcttgcgattgccacgatacttgcgatctgactgtcggctatctcactttcgtacgcgcgattgcatattcatgcgacggtagactggtgccatgccccgggaatcgaaacaagcgcgactgtcacgcatgcatcaggaatacgccgtattgtgcgaggagattccgcatccgaaatgcgcgctgaatttttcaaacccgtttgagctgctggtggcgaccgtgctaagcgcgcaaaccaccgacaaacgcgtgaatatggtcacaccggaattattcggcgaatatccgggaccggccgcacttgcgagcgccaatcccgaacacgtggaaagcatcattcattccatcggatttcatcatacgaaggcaaagaacatcatcggactttcttacgcattgtgcgaacggttcgacggcgaggtgccgcaaaccatggatgctttgacaagtctgcccggggtcgggcgcaaaaccgcgaacgtggtgcttggcaatgcttttggcgtgccgggattccctgtcgacacgcatgtgatccgtgtgaccgggcggctgcgctggcgttcggactgggcgagcggctcccccgaccccaaagccatcgaacgagagatcaccgcctgcttcccgcccgaagagtggacggatctgtctcacaggctgatattgcatggtcgtgccatatgccatgcgcgcaagcccgactgcctcaactgcccccttaacgacacctgtccgagcgcattcgcagcgtaacgcgcatgcccgctgtagcctgtgccaactagactcagcaccatggaagacaccatggaagaagaaaacgggcgggaagccaagctgaaagccgaaatcacgcgatggctgatctttttcggcgtcgccatcatgctcagcgtcatgacctggctgggctggtcgctgacgaaccgcaaaaatccgattacctccttcaccacgctcgtttccgactcctccgtggccatcggcattcagggcagcgcgccggaatcgctcgacatccgcaccgaacagggcaccgcgctggagcaggcgctgctcgaaaacgtgtacgaaaccctggtgtcacgcagcgaaaccaacaaactgcagccgtcaatcgcgaaatcatggcagatttccgacgacggactgacctacacgttcacactcaacagcaacatgaccttcgccaacggccataaactcgactcgtccgacgtggtctggtcgctgcaaaacgtcatcaacaacaattacgtgggatccgaccaacttggtagtctcaaggaaatcaccaatcccgacgaaaaaacggtggtcatcaccctcaatcagccgaatccgtgccttctgcgcgcgttgagcgggcgtgccggcattgtttacgatgaggaaagcacggcgaattacggcaagaaagccgtgggatcgggaccgttcaccgtggaagcctcgtcgaaaacacagatcgtgctgcagcgcaacgactcgtattggggcaccaaagccgccgcatcgcaaataacgctgtattactacgcttccgaagattcgctggtcagcgccatggaagccaagaaaatcagcatggcattgccgttgagcgcgtctgccgccgatgagctcaaccagcaaagcggcatcaactccgacagcggcatcagcttcgacaaagtgatgctcgccttcaataacggcaccgaaagcccgttctccgacgagcagatccgcaaaatgacgagatacgccatcgacgcgcagaccatcgccaaagacgctccggacgcctattcgccgctcggaggcccgataagcccgctggaagacgggtatgaggatctgagcgaactgttcccctacaatcttgagcagggccagcagatgcgcagctatttcggcgcatactatatcgccgatatcgatctgctggtgcccaaggaatatgagcagatcggcaacaccgtgaaatcggcgatcgaacagctcaatatcggcgtcaatctggaagtgctcgattccgcggcgcaagtcacggaacgcatgaacgcgggcacctacaatatcgcgctcaccaccatgagcggcgaaaacgatgcgagcgtattcaccgacggccagagcgtgttccattatgagaacggcgatgcgcagcaggcatatgcggacgcgatggcggccaccaatgatgacgattatcaggcacgcatgcgcacgtatgcacgcgccgtcagcgaaaacgcggcaagcgactggctgtacacgcgcaagaatttcatggcggtaagcgaccaattgcagggatatccgaaaaatctgaccgaccgtctgctgccgttgagcagagtgaagttgcagtgattttcccgcgattgtcaatcaatcgccgaacactgcggacaatccgtgtgttgcgctgattttcttgcgatttcggcattcggctgcagttccgtaagttgtcacattcgctttctagactagcgtttatgactgaaagccaagataataccatcaacgcgaacctcacgccgctgcccgacaaggtcggcgtggacggtctcgaagacaagtggcgcgaagtctgggacgaaagcgaagtctacaagttccagggcacccgcgaccgcaaggccgtgtattccatcgacaccccgccgcccaccgtttccggccacctgcacgtgggccacgtgttctcgtacacgcataccgatgtgatcgcgcgattcaagcgcatgaacggctacgacgtgttctacccgatgggctgggacgacaacggcctgccaaccgaacgccgtgtgcagaactattacggcgtgcgtgtggacacctccctcaagtacgatcctgatttcgtgccgccgttcgaaggcaccgatggcaagaagatcgacgccaaggatcaggttccgatctcccgtaagaacttcatcgaactgtgcgagaagctcaccgcccaggatgagaagcagttcgaggcgctgtggcgttccctcggcctgtccatcgactggacgcagacctaccacaccatcggcgagcacccgcagcgcgtggcccagaaggcgttcctgcgcaatctggcccgcggcgaagcgtatcagaaagacgctccgggcctgtgggatgtgaccttccagaccgcagtggcccaggccgagctggaatcccgcgaatatccgggcttctaccacaaggtggcgttccgcttcgaagacggcactccgatctacatcgaaaccacccgtccggaactgctggcagcctgcggcgcactgatcgcgcacccggatgacgagcgttacaagccgtatttcggccagtacgtctactccccgctgttccacgtgaaggtgccgattctggcgcacaaggccgcggaaatggacaagggcgcaggtatcgccatgtgctgtacgttcggtgacgtgaccgacgttgagtggtggcgtgatctgaacctgccgctgcgttccatcatccagcgcaacggacgcatcgtgatggacaccccggactggatcgaagacgaggaaggcaagcgcatcttccaggaaaccgccggcaagacgacattctccgcacgcaagatcatcgtcgacgcactgcgcgaatccggcgatcttgacggcgaaccgactccgaccaagcgtatgacgaacttctacgagaagggtgacaagccgctcgaaatcgtcacttcccgccagtggtacctcaagaacggcggcaccgatcagaagctgaacgccgaactgatcgaacgcggtcgcgaactgaacttccatcctgatttcatgcgcgtgcgttacgaaaactgggtgaacggcctgaatggcgattggctgatctcccgtcagcgcttcttcggcgtgccgttcccgctgtggtatccggtgaaggaagatggcaccgccgattacgatcatccgatcgtgccgagcgaggaccgcctgccgatcgatccgaccgacgatgtgccggaaggctacagcgaggaccagcgcgacgtgcccggtggcttcaccgccgaacctgacatcatggatacgtgggcgacctcgtcgctcaccccgcagatcgtgacccgctgggaagagccaggcgaagagaaccaggcgattttcaacgccaccttcccgatggatctgcgtccgcagggtcaggacatcatccgcacctggctgttctccaccgtggatcgcgcgcatctcgagaacaagtgtctgccgtgggccaatgccaccctgtctggatggattcttgatccggatcacaagaagatgtcgaagtccaagggcaacgtagttgtgccagacaagccgatcaagcagttcggcgccgacgcggtgcgttattgggccgctgcggcacgtttgggcctggatgccacctacgacgaaggccagatgaagatcggccgccgtttggccatcaagctgctcaacgccaccaagttcgcactggccatcggccgtgaggatgagaaccaccatgtgggcgctccggcaaccgcaagctggaaccctgccgacgtgaccgagccgctggaccgcgcagccatggccaagatggccctcgtagtgcgcgaagccaccgaaagcctcaacaactacgagcattccaaggctttggaagtcatcgaaaactacttctggcagttctgcgacgattacatcgagctggtcaagaaccgtgcatacggcaccgcagactccaccggccatgtgccgagcgagaaggccgtgaagtccgctcgcaccacgctgggactgggcttggatgccttcgcacgcctgctggcaccgtacctgccgtacgccaccgaagaagtgtggagctggatgcatgagggcgaaggctccgtgcaccacgccgcatggccgaaggctgaaacgtacgatgcggccgcagcagccgtctccccggagctgctcacccatgccggtgaagctctggccgcgctgcgtggcatcaagtcgaaggccaaggtttcgatgaagaccccgatcctttccgtgcagctgggcgtttccgatgaagcgcgcgaatccatcgaaagcgcattgggcgatatcgccgaagccggtcgcgtggtcggacgcatctccttcatgggagcggccgccgcactgaaggccgtcaaggaaaccgccgaagcagccaaggaagccgtcaaggaggccaaggctgatgccgaagccgccatcgacgtgattgtggccgacagcgaacttggagagccgccggctaaaaagccgaagagctaatggcaactgtaggtgaaaccggcagccttcgtggcaaagccgttcacttcacctacagacagtccacaggactgtctgcttaacggctcagccggctaaaaagcctaagaggggatcttccacgattggaaggccccctctttgtgtatctggatcctatgttcatacatttttataaaacgggaactgcaagcagatattgagattgcgcggccttagcaggctgcgattgcacaggcatatccggatacagcttctgcaaagcctgctgcaatatttcggcagcggccgcaatttcaacggtctcgtcaatcaaatcgctattatcaggcacaatcaacgtgcgatttccggaaccagcaatgccgtatgctgcaatcggcaacgcacttgtcatcaacatttcggaagatgcggtttttcctgttgttccagtattttcagatgcggaatctaccgaatcgccatcgctggatttctttgattccactcccccgactttcgcaacgttcttcgacgtggtatcggcagccgcgccaaatgacgatcgcaggccgcccgcgtagctcatcacatcatccatgctgatggcgttcttgtcgtccaccaagctggccgcagtatcgtcggaagcgttctgctgattggccgcatccgcctgcgcgcgttcctctttgcgttgagccttgatacgcgcccgctcggcacggcccgcaagcgacgtctccgaagccgaggcaagtcccatagaccccttcaacgtaacttccgaaccatcgacagtatcgtcggaactggtcgaatcatcacctgcatcaagctgatccgcaaaacgaagcacgatctggtggaacgcactggcctgacccgtgtgctcgctcgcatccgccaacgcctgcatcgcatcgtcaaccttgcttgaagccgacttcaacttctcattgccgtcaatgctgttgcgcacatccgcaatcgcctgagattccaagttttgcgccgaacctgcggaagcctccaattccttaagccgagcggtgtacgcgtcggtgaaatccatggaatacggaatcatcgccgaagaaagctgcgactggccggcactgtaatccttggcgccacgctgctgctcctcgcccgcacgcttgttgagttccgccactaaaccggatgtgccacgctgttcgatggtgcgaatcacctcgttcaccgcgtcggcggcacccgtatgtcggtatgcggcgctcacatcgttgaccgccttggccagatcgaccacggactgcgccaccgcagtatcgccgttcaattcggccgcggtgccgagaatggcggtaagttgcgtggtatcgccaatcgatccggaaagatgcgtcgtatacgagccgacgtacgcgtcgatatacccgttgaacgcctgctcatgttcctgctcacgctgggcgatggtcgtttcggcaagctccttttcatgatcgcgcagttgttcgagctgcgcgatgagctcatggttgcgttgcgatccgacattcgtcaaaccatccaccaatgtggatgcgcgatcggtcaaactggtgagattgccatagcagccagttctttcggaatcgcaggcaacagcggcgacagacagcgaactcatggtgaagtttttcgcagtcacatacgtatgaatcgtaagatcctcacccggcttgcctaccgcagcgaccaatgtcgacgaattgccggcagacacaagcacgccttcgtctgaggtcgcgtcattgccgacgcggttgggaatggtgaacgcgacgatcggcgtcagatcagccgtttcctccggtcgttccgatttcagatcgatgcggatgccgaccacgcccgatgcaccggaaatcttggatgcgctgacggtcggaccgtccaaagtaaaggtcgccgttatatcccacggcagttccacacgctcttgcggcacgcgctgcgaagacgtcgcgccctcatctgcattcatgtccgtatcagttgcagaagcggcgtcactcgtcaaatacaagcggcccagctcatcaacggactcatatgcgctcatcacatcgtgcgaggccaccgccgagacgtactcgccgttccgacgcaccgcatcaaccacattcgaaaccccgaccgcgcatacgggagccgccgaaaccagcgttaccgcaatggacgcagccagcatgtgccgcagatggacactcgccacacgcatatcacgctcaccacgcgtgctatcggcatgatgggcacaagatgcacgaaacgcaacagaacgacgcatgccgagcctctcaatcgcaatcaaaacaacgttccaaagcaatcaatgtagcgcgcggcatgccccggcaagaaacgatttcgcggaaaacagacaggtcaggcgaatacgtcgagcgcacccggatcgacgccgttctcggcgatgcgcttatgcctgcgcttggcttcggtcaccacgaattcgcgatacatttcggcgatgtcgggatccaacccggcatcgacagcaatgcggtgcaaccgttcgatctggtaatcctcacgcttgtaatcggccggcgcgaaacccgcgcgggctttcagcacacccacttgggacgtgtatttgaagcgttccgccagtagggaaacgatggccgtgtcgacattgtcgatcgactggcgcaatgcagcgattttcgccacggcatcggcgacctcgggattgctttgcgcggtgcccgcatcgatgacggtttcgatttcatgctcttcttctggccgaagccagtcatgttcgctatcgctcatgcgtacaagactaccgcgcgcatgtcacttggagaagtaccgttgcagcacaatcgtggtttccgtgctcaccggcaccgtttggtggatgacgttcagcagatcctcaagcttgcttggcgaggctgcgcgcacggtcagcatgtagctgggtgacccagccacggaatcgcacgacatgatgccttcgatatcctgcaatttggcgggaatctcggcttccttggaataatcgatcggcgtgaccgcaatgtaggcacgtacggcgaggccacgcttttcatcgtcgataacggccttgtagccgagaatcacattacgacgttccagtttctgcacgcgcgattgcaccgcggaaatcgacagtcccgtagcgtccgaaagctgagacagcgtagcgcggccgtctttctccagcatgctgagaatggtctcgtcgatatcgtcgaattggcccacgctcgcatgcgtggtgtcgggttcgttgccattgcctgtcatagatacccctttccaacaagcattctgcatcagtccggtaggaccgactcccctatgcagctcacgtttccgtccattaccatacccaccccaacacacaatccgtcaactgcattttcgtaacatttccaacgaatttcgattttcaatcatttttctcctatttttttcatataccccctatatagcaatactattttcgtctttttactttcgatttcgtattttttcgtgcgtcgatttttacataccgtatgtccacaacgtgatcatccacattgccgaatcgtgcggaactttcgaaaaacaatcgaaacgcattcgaaagtagttgaaaactgcaaaacggaaaaacagccaaacagaaagacagccgaacagaaagacagccgaacagaaagacagccgaacgaaacaaaagggccgcatggcgattgtcatacgacccttggatgcgtaaccgcagattgcgattacctgcgattagctgttgccgttattcgcggtattgccgctctgctggatcagcgacgccatgaaatcacggttggtcgcggtcttcttcagacgcggcacaagcgtctggtaagcctgctcaggctccagaccgccaagcagacgacgcagacggtagatgatcggcagctcctgcggatcggtgatgagttcctcgcgacgggtgccggaagcgttcacgtcgatggccgggaacaggcgcttgtctgccagttcgcggctcaggcgcagctccatgttgccggtgcccttgaactcctcgaaaatcacctcgtccatcttggagccggtttccaccagtgcggaggagatgatggtcagagagccgccgttttcgatgttacgagcggcaccgaagaacttcttcggtgggtacagcgcctgggcatccacaccaccggaaagaatacggccggaagccggagcggcgatgttgtaggcacgggccagacgggtcatggaatcaagcagcaccaccacgtcctggccaagctccacgagacgcttcgcgcgttcgatggcgagttcggcgacggtggtgtggtcggaggccggacggtcgaaggtggaggaaatgacctcgccctgcaccgtacgttccatatcggtgacctcttccggacgttcgtccacgagcacgaccatcaggtggacttccggattgttggtggcgatcgcgttggcgatgttctgcagggtgatggtcttgccggccttcggcggagacacgatcaggccacgctggcccttgccgatcggcgccacgatgtcgatgaggcggccggtgagcttgttcggcgcggtttcctgcttcagacgctcctgcggatacagcggagtgagcttgttgaactgcggacggttctgtgcggcctccacggtcatgccgttgatggagtcgatggactgcagcggcacgaacttctgacgctggttgcggcggtcgccctcacgcggggtacggatggaaccgtgcacggcatcacccttgcgcagcccatacttcttgacctggcccatggaaacgtacacgtcgttcggacccggcaaatagccggaggtacgcacgaaagcgtaggaatcgagcacgtcgacgatgcccgcgacaggcacgagatcctctttcggctcctcgtgacgctgttcgcgttcaacattgcgatccgtgcgctcgttgcgctcgacgcgatcgttacgctcgttgcgatcattgttacggtcgccggtacggccacgacgctcgtcacgctcgtcataatcgcggtcacggccacgcaggcgacggccacgacgatccacgcggtcacccctatcgctgacgcgaccgcgaccacgacgcgcgaaatcaccgtcttcagcctcgtcacgacgttcgtcatcatcactgccctgcgaaggcaacgtggcgagaatgtcatcaagatcgcgcacaacgtcctcatccttcggcccttccaccgcacgacggcgacggcgcggctcaacgtcggacgcatcatccttacgatggcgacgacgatcatcctgcttcggcgaagcatcgtccaatcccagttcggccagcagatcggtggcagcgtccgcatcacggcggcgacggcgcttcggagcctcatcgatgctgtccagggcgttcaccgcggccatgacatcggccgcctcctcgctcgtcggagcctcagcctgcttgcgacggtcagcacgctcggtgcgctcggcacgttccgtctgttcggagcgctccgcacgctcagcgctatcagcacgtccggcaagggtcttcctaacggttttggccgtctgcttttcggactgctcagcctcgttggctttgctttcggcagcctcgttggacttgccggattcctcagccgtgttcgccgcgacctcagcgtctgcggtttgggcttcagcaggagccaccggagcggccggcgcagcggacttcggagctcgcacggtcacaccggcaggcgcttcaccgccggaacgagcggcctgaagcgtcgcgataagttccggcttacgcatggtggaggtgccacgaaggcccatctgcttggcgagctccttgagctcaggcagtttcatgtcttcaagattcgggctggttgccactggtttttgcctttcccctagctttcgcaagcacacgcctgcaacagctgtaaaaaagagatacggaaatttccgccactgaaggtccgccgcgaaatatcacggctttcgaacttccctaaccatacaacgtcatccagaccaacgcaacgtaggcgtgccaacgtattcatgccaatcaagcattcaagtcaatgacaaatcgcaaatcacaatgcgaaagacccgccatgcgatcacatgacgggtctttcgctttaccacatgctttacagcaacaggtgcaggtcttgccggaacctacttttcctcgtgatagctcttgtcggtattgacggaccatacgttcttcttggacgtcttgccgttcttgatattgccgacggcctcgattgcggtggccatggaatgatccatgttgttgtaacgatgctggccgttgcggccgacgcaatacagattgccgaaggaatcgaggtattccacgagctcaggcatgcgatcgtaggtgtcgaaatatgccggatacgccttcttcacgcgctcacgatgggagtcgatcacgtcttgcggaccgttgatgatctgcatgcgcgtaagctcctggatggcgaacttcttcgcttcctcgtcagacatgttccagaaggaatcgccttcttcgcagaagtattcaagaccgatccacacggtgttgtcaacgtccttgaccaggtacgggctccagttgttgaagatctgcaaacggccgaccttgtagcccggatcctgcacgtaaatccagcaatcaggcacgatcggcgggttgccgagggtgggaatgtcggtggtgttcgacaggcgcaggtgcttgacgagcagaccaacggtcacgaagtcgcggtacggcaggccgttggcgatttcggtcatgtccttcggcgcgggcttgctggaagcgtccacggcattgatgagatccttgacgggcatggaggagatgaagtcgtccgcggccatttcggtgcggttgccttcggaatcctcatataccacggatgcgatcttgccgtcggcctggcgaatctccaccacgttcgcgtcggtgatgaccttcacgcccgcggcctcgcagttggcctcgacggtttcccacagctggcccggaccatacttcggataccagaattcctcaatcagcgaggtttcaacctcagcattgctgcgcttcttcggcaggagcttctggaacgcgttcttcagcacgcccataatgctcaggcccttgacgcgctgcgcaccccaatcggcggagatctgggacggatggcgaccccacagcttctcggtgtacccctcgaagaacatggaatacagcttgcggccgaaacgattgatgtagaagttctccagattgtcttccggcagcttgtgcaccatggacttcagatagctgaagccggcaacaagcgtaagcttcggacccatggccttcaacgtgttggcgctcagggaaatcgggtagtcaaagaagtggcggttccagtaaatacgagacacgcgatgacgcttaagcatcaccttgtcttcgacttccggatccggtccgcccggttccatatcgtgctcgcgaccgagcttcttgtcatcatagcttggcgcgccctgcagcggcaggacccccttccaccaatccatgatgcgttcgtccttcgagaagaaacgatggccgccaatatccatacggttgccatcatgcttgacggtgcgggagatgccgccgaattcgcgggtcgcttccaacacagtcacgtcgtagttctcggagccaccgtccttgacgagctcccaagcggcagtcaggcctgcagggccaccgccgataatcaccacggattgcttttgcgtcactttgaggtctccttacgaaaacaaaaatccctgatagtttacccgagggtagggaaacgaacaccgcaacttgtgcgaatgcttacaaaatcaagccaagtcagccgaatatacggctatcgcatcacgcaaaacgcaatcatcaaaccggccgatgcacgacccgactgcgcggtcaaagcgcgcaaccacattacgcaatccaactacgcgaccagcaaccgcacaactggcaaccgcgtgaccggcaactgcgcagctagatggaatcaggaatgtcaatatcggttttctgcacttcctcaacattgacatccttgaacgtgacgatacgcacgttcttgacgaaacgactggaacgatagacgtcccacacccaagcatcagtcaggcgcacgtcgaaatacacgtcctggcctgcggaacgcacattgaaatcgactttattcgccaaataaaagcgacgttccgtttcaacaacatacgtaaacagcttgattacgtcgcgatactccttatacagagccagttccgcgtcggtttcgtaattatcgagatcctcggcgctcatcacttaccttccgtatcgcgcttgcgaccacgaccaagcgtgcgccaccaagcttccttcgacgtcttacgctcgcccgccgtgtacggccagctgttttcggcatcggcatcgccagtaacggacttgcgatcatcatgctcgctttgtcgcgcaggttccgcgccttccgcgtccttccgcacagcctcggccacgtcaccagcaccatcggaagaagctttctgcacggattgcgcagctgccgcggcatcgttgacatccgtaccttccgcatcatgcttcgaagcattcttctcattcagtcggatggcaatggaatgctcgcgcgcgctcaacgcttccttgacgcccggattatcttcgatcacatgcatgccgaacgcgtcaagcgaacggatcgggtcgaactcgtcaaccagcgtgtccataacgatcagatcctggtaacggttctgcgaagcgttccacaaggcgtcgcgcgaacgaccggacggcacgaatcccaacgactggtacacggacacggaacgcgtgttctgctcgggcacggcaacccaaatgcgatgcatgccaaggcctgccggttccggcgcaagtccgtacgtcatcacgcgcggcatgatgtcacgcgaatagccacggccgcggtaatccttgccaagcaccacctgaatgcgcgcggaacgagcccaaccgtcaatatcgatcaggaaaatcatgccaatcacattgtcggaattcgcggcatcgatctcgccatcgccatcatggtcggcttcggtgatgatggaccatgcgatcgtgcgacgcgactccggatcccccacaccggattcggtcggcgtttcgccttgggaccatgccacggaacgacgcacccacgcatgcaccgcgccacgctcggcaacccgatccttgccggtgattccggaagcgccgatgtacgccccaatggcgtccatacgttcaagatcttcgatcacggacggacgcagatgcaccatctcgcccttgatagacggaatgacgatgagatccggcaattcacgcgactgctggtccaactgctcctgtgtcgcagcctcaacttgttctggcattattcctgtcccctacatcattgcaggcacgaccgtcgccgcacccataccgagggtattgtacccgactgtatgtcagctgtgaatccgcgcggcggcaatcgctgtacatattcctctaccagcataacctgatgttgaaggacatgtcggcaatcgtaagaaaatgcgcttcgcgattatgcattctctttctttgaaatcccttttccggaataacgaaaagaaaacgcacgtcccaagctttttggaacgtgcgttttcctgcgattcaacaatcggctgtaatcgtcagcaatcgttgtaaacgttacttgatcttgctcatcacgatcttggtgacggcctttgcgtcagcctgaccgcgagtggcacgcatgacggcaccaatgatggcgcccatcggcttcatattgccgctcttgagcttttcaacgatgtcaggattggctgcgagagcctcatccacggccttttcgagagcgccgtcatcagacacgacctggaagccatgcttcttgacgacctcatccggagtgccttcgccagcaagcacaccggcgacggtctgcttggccagcttgtcgttgagcttgccatcggcgatcagcttctcaacctcagcaacatcggccggagcgatcggcagctcttcgaggctcacgcccttgttgttggcttcacggctcagctcgcccagccaccacttcttggcacctgcggcggtggcaccagccttgacggtctcctcaagcagatccagagcgtcggcgttgagcacgtcacgcatctccaaatcgttgaagccccactcgcccttcaggcggttgcggcgctcgcgcggcatttccggcatctgagccttcatctcttcgatgtgctccttggtgatgtgcagcatcaccagatccggatccgggaagtagcggtaatcgtcggcatcggacttcacgcggccgcctgcggtggtctgcgaagcctcatcccagtggcgggtttcctgcagaatctcgccgccttcgctcagaatggccgcctgacggcgaatctcatactgaatggtcttttcaataccgcggaacgagttcacgttcttggtttcggaacgggtgccgaacggatcggacgggctgttgcgcagcgacacgttcacgtcggcacgcatgttgccctgctccatgcgagcgtgggaaatattaagcgcacgcacgatgtcgcggatggcgcgcatgtaggcaccggcgatttccggagcacgatcgcctgcgccaacgatcggcttggtcacgatttcgatcagcggaacgcctgcacggttgtagtcgaccagggagtggtcagcgccttcgatacggccgtcagcgccaccgacgtgggtgttcttgcctgcgtcgtcttcgatgtgggcgcgttcgatcggcacacggaacacggtgccgtcttcaagttccacatcaagatagccgttgccgttggtcggcttgtcatactgcgagatctggtaatcgcgcggcatgtccgggtagaagtagttcttacgcgcgaactggctccactcggcaatttcgcaatgcagggcaagacccagcttgatggcgtaatcgacggcggtcttgttgaccaccggcagagaacccggcagaccaaggctcacaggggtgagctggctgttcggatcgccaccgaacgagacttcggccgggcagaacagcttcgtggtggtgctcagctcaacatgggtttccagaccgatgaccggatcgaacttcttgacggcatcggcgtacttcatcaacttttcagccattttgttttctttcctccgatgcttcctacttgttcaagccgtcgagccacggggtcttcagggactgccagatcggaccgttccagtcttcctcgagagccgcctcaagtgccgcggcaggcttgtacatggcctcgtcacgctgctgcggagcgaggaactggaagccaaccggcaagccgtcgtcgctcagaccagcaggaatgctcatggccggaacgcctgcaaggttggccggaatggtggtgatatcgatggcatacatggccatcggatcctcggtcttctcaccgaacttgaatgcggtgaccgggctggtcgggccaacaagcacgtcgaccttctcgaaagccttcttgaaatcgtcgatgatcagggtgcgcaccttctgtgcggaaccgtaccatgcatcgtaataaccggcggacagggcatacgtgccaaggatgatacgacgcttgacctcgtcgccgaaaccggcttcacgagtgtaggccatcatgttggcggcggtctgcggaacgcctgccggcggcatgacgcgcagaccgtaacgcatgccatcgtaacgagccaggttggagctgacctcggacggcatgatgatgtagtacgcgccaagggagtacggcaggtgcggcagagacacttcagtgacttcagcgcccatctcctcaagcttcttgacaccttcgttgaagcgtgccataacgcccggctggaagccttcgccgccgagctccttgatcagaccgaccttgaggcccttcagatcacgcttcatgccttcgcgggcggccgccaccatcgggcgaggaccttccggaatggacgtggaatcgcgcttgtcgtggcctccgatcacttcctgcagcagggccgcgtcgagcacggtgcgggagcatgggccgatctggtcgagcgaggaagccatggcgattgcgccgaaacgagagacaccgccgtaggtcggcttgacaccgacggtaccggtcagcgagcccggctgacggatggagccaccggtgtcggtacccagggcgagcggggcttcgaacgctgccactgcagctgcggaaccaccgccggaaccgcccggaacacgttcggtatcccacggattgtgtgtggtctggtaggcggaatgctcggtggacgaaccctgagcgaactcatcgaggttggtcttgcccagcagcggcatgcctgcagccttgagcttctcgatgacggtagcgtcgtacggaggcacccagccttcgaggatcttggaggctgcggtggtttcgatgcccttggtgacgatcatgtctttgatggcgatcggcacgccggcaagttccggcagctgtgccttttcctcatcggacttggcatcgaaggcgtcggcctgttcgagagcctgatcgccggacaccttcaggaaagccttgatgctcggctcggcggcctcgatgacttcgagatgcgcttcaaccagttcacggctggaaacttccttggccttgatcttagccgccatctcggcggcggaaagcttgacgagttcgctcatgtcactcctcccccagaatgcgcggtgcaacaaacatgccggcctcggaaaccggggctcctgcggtcgcctcttcctgagtcagcggggtttccggcacatccgggcgcaggtaggcttccagcggaatcgggttcgcggttggttccacatcgtcggtagcgacttcctggaccttgttgatggattctgcgatgacgttcagatcgccctgcagacgggtgatctcctcgtcagtaagtgcaattcgggccaaatcgcccagatgcacgatttcttctttggtgaaagtaggcatgtccctaacattaacgcgtctgtgtgacgagcgcccgcccatttcgccttgcccggcagccccaccacgctcccgccctaccaccccaccaaagtcccaattcccccggcagccccacactgcatgccgcccggcagccccacacgctaaccgcaacagcccgccgcaccaacaccccagctctgtcagcgtcccaaatcccccacccactggaacaaaaggacgccaaacgctgtttcaccgggcaaatccctccagacactggaggattcttcccgccaacaagccatccacagtcccaaaacctccagccacagtcccaaaacctccactcactggaacaatccgggcccaaaccagcctctcatcgtcccgattcgtccacccgctggaagaatcttcccgctgaacgctctgctggagtccggattcctccaaagatggaaggatcctcccgcggaaggtcccactagaggccaaaatcctccagtcattggaacaaaacggacactaaaagcaatacaaccatctaaaaacctccagccactggatgaattctcccactagcgcttcgtcagagcccctattcctccacccaatggaagaattctcccgcaagccagccatccacagtcccaatacctccacccaatggaggaatctggactctgaacggcatcccaatacttaaaaatatccaaccaatagaagaaaacaacaaaaattcacacaaaacaagcggatacaagcacttatctgcaaaacaaccacccagttatccacaaaacccgtaagttatccacagacacgcccgaaacagcatcctctatccacatttgccgatcgcacttccatagcagagccacaacaaggtagcgtcaaatcatgaaagcatatcctcaaatcgatgcgctgctcgatcaaacagaaaatgcgcaacgatgcgcacacagcagtgaccctctcatccagaagggactatatcgcagataccgcgcgggagatttggcgcgcccatacccagggctattcgcccgtgccgaatattggaatcagctgaacgagcccgaacaatcgttgcacgcggcacgaaccctcagcaggctccaccccaactgggttttcgcaggaataacagccgccgcagcccacggattcgaccacccgcgattcctgcaccggcaaggactgaccataacattgcccaatcacggatcataccggccgcacgacaaactcaatatcatctacagcccatatcccagagaaaatgcggtactcgcaaacggaatccatgtcactaatccccctcgtaccttattggactgtggacggacgttagagttcatctattccctgccgattttcgatgatgcagcagcagacggaatcgaagaaaagcagatcttgcaggaatgcgcacgcacgacactcgattgctcgcgcatcttcaaattgttgagatataccgacgcaggaagtgaaaatggcggtgaatcttttgctcgggcagtcatgattgaaaacggttttgcggttcctcaattgcaagtctccttcgccgactcgcttacgggaaaacaatttagggtcgattttttatggcgcacaaccgatggacgtattattgtcggagaacttgacggcacagcaaaatacgttgatccgaaaatgactgatcgtaggagcatccaggagaccgttcaggccgagcgagaacgcgagcaagcgctttttcgcgcaggagttacggaaattgtcagattaacttttgacgatgcagtccagcaaaaaccgctgattgcgaaactgcggcgtgctggggttccttgcgtttcatagggtaatcatctgcgagaagattcctccagtaagtggaggaatcggaacgttgagaagctcgccgccgggaagattcctccagagggtggagaaatctagactctagcagagcactcagcggaaagattgctccagtgggtggaggttttgggtctctggtgaggctttcagagggaagattcctccagcgactggaagaatcaggactctgacaggcttgttagcgggaagattgctccagtaagtggaggaatcttcccgcagaacaccgtactaaagtcccaacctcgccagtcactgaaggactcaccccgccagacgccccacaggagacccaaaacctccacccactggaacaatcatcccgctgacagaactccaatcgtcccgattcttccagtcactggaggattttggacgataggagatggaggttagagctggggagcggcgtgctgggagatccatgcgtgcatggaaacggcggccgcagctccggcattgatggaacgcaccgaaccgaactgggagatgtaaaccacatcgtcggccaactcaagcgctttttcggacaatcccgggccttccgcgccaaacagcatgaggcaacgcttcggaaaacggtacgtttccatcggcaccgcacccggaataatatcaagcgcaataacccgcgccgccttcaactcggcaatacgctgatcaatcgcagccaattgcgccatgcaggtaggctcgaatccattcccaacgccgcttgcatccgaagcatccgtcgaaatgccagatggagcgcatccagcaacacggccttcatccaacaaagcatcgcttacgccggcatcgtttccagcttccacattttttcccgcgctttcatgcatacgaaatgcgatggcgtccgcctgcgattgcgccgccgcgatttctccggcaatgcgcagcttccagcattcgacaagttcggttatggaagggtggttttcgacgtgctggtacagctccgtcatcagcgaccccttacgattccacttgtgcggtccgacgatatgcacacgtttcgcttggaacgcgttcgccgtgcgcaccatggatccgatgttgaaatcgtgtgtccagttttccacggcgacttcgaaatcatggcgaccgcgagcgtcaagatcggctttgatggccgcgaccgcccagtagcgatactggtcaagcacgttgcgacgatcgccctcgtcaagcaaagacgagtcgaatcggcgatcataatttacagattgcggatcatccggacgaggctcacccggatgtgtttcggcccacggccctacacccacctcgcgaaagaccggctcgccagatgctttcgctgcaatatcaatgggatgaggctgatgcacgcgattcctccttacgaacctcgtatcgccaatggctggtcaacaggatacctagtgaagctccgattccttgaacacttcaacgaacggcagctcggattcagacccatccaccggattgatgaccttgatcgtcggctcggtcatgtcaacgccgccgatcagcgaagcgacggcaagcacctcggcgccctcgttcttcaccacggagaaatcaaggctcaactcattgccattgcgcaaggtaaccaaagaggacgtctgcacatacgacttttcagacagccaggaatccagcaacaccacgcgcttacccgcgatcgacggtcccttaatggacggatacacgaaatccatcacaaaaccgttgagattctcaccgcgcgaagcggccgcctgaatcatggcggacaccagcggaaccgcggccgcggtcaacgcgcccacggcgtcgaaatcatccacggaatagccggattcttccaacgcgtccagcagaatatgcccgacaatcgaagcgccacgatgatcgaacaatacagaggaaagctccgagaacggcttgtcggccatctctgcctgcaacagcgacttcagctggtcacgcggctcaagcatggcgaaatcgatgtcgctatgctcaggagcatcggcaggcacagcaaccggattggtcttacggaaagtcttctcttcggtcatattcccagcctaccgtttctactcgtcaaaccttacttatgccgacacgtatttagtcagatatcactgttcactggtttcaggagcggtgagttcgcggacatcggccttttctggcgcgatcatgtttacggcttcgatgattctgctctggtcgacgcgctgcagcttgcgtgcggtgacgagcacgcgcgactccagcgacgatgcgaacgcattgtaggctcccacagttttggtgatggcggacccgagtttggtggcacgatcgcccaacaccgcgaaccgttcatacaattcgcgggacaggtcgaacagcattttcgcgtcatcggtcaggctttgctgctgccacgcgtatgccacggatttcagcaccgcccatagggtgatcggcgaggtcaaagccaccttgcgtgcaaacgcgtcatccatcagcgtcgggtcagtttccaaagccgcctgcagcagggattcgttggggatgaaggcgatcacaaaatcgggggcatcgtcgaacgcgttccaataggccttgtcgcccaaggtcttcacatgttcacgcactgccttggcatgcgcatgcagcagctccgactttcgcgtcagctcctcgggcgtggcggtatcgggaatctcgcacgccttctggtagtcggcatacggcgctttcgcatcgatcggaatggttttgccgcccggcatgtggatgaccatatccggacgctgcgtatgcccatccacgtcggtgacgaccacctgcgtgtcaaaatccacatgttccagcagtcccgcggattccacgatgttcctcagctgcgcctcaccccacgcaccacgcaccttgttgttgcgcaacgcggacgacagggcgttggtttcgcggtcaagacgagcctgctgctcgccaaggcctttgagctgctcgccaagcgcacccatctcccgtttacgcccttcttcgatttgcgagaccttctgctgcaaggcgtcaagattcttctgcacgggcgctagcgcggacaataccttgctctgctcctgcagttttcgctcgttttcggcctgcttgcgttccacttcggccgcggcacgctcacgctcccgctccacacgttcctgttcggcccgctgggcctgcgcgagctgcgatttgagataggtcagctgttgggccaacccttccgcctgcgtgcggtattgggtcaccgccgtggacaattcgctgatttcctgccgatcagcttcgatctgcgctttcgcctcgttaagatcagcggttttcgcatcacgggccatttcctgccctttggaacggcccgcaaaaaagccggccgcggctccaagcgcagccacaaccaccagaagaatcaccacaaacacaggattgtcgaacatatgttctatataacagcatgaccaagacatcttggaagatcaaagttcgcaagacatccatgcccagctgcattatgcttggagccgaaagcatgctcacgaacatgcggcaacgcgagcacgctgaatattcgagaggcattcaagaggcaatccgggggttcggaaacacatgggattcgatttgtttatgacggtggcggcgattgttgcggcggccgtggccacttgggccatcctcaggctattcctaggcgaaaacgatgacatagccccctcccaccaacgcatcaccgatgacaagcccgccaagaatcacaccgaaaatcacaccgaaaatccagacgaggcagccggcgcaacacaccgaagcgacatcgccaagagtctcgccatcgcaaccatactgaccgctcccacattcaccgtaaccatactgacattcggcggcatcacacttccccactggctgaccaatccatggctgcacgccatcatcgccacgccggtcatgttctactgcgccgcgccgatgcacaatcgcggtatcgccgccctgaaaagccacacgcccaacgcggattcgctgctgtcgctcgccatgaccatcgtgtacgtctacagtctgctggcgtgcgtggtgtcatggattttccccgcggggtcacgcaatcagtatttcgctttcgcaagcatggtcgccgtgctatcgcttgcgatttcgctgatcgcgcaacgccccatggcaaagaaagcatcggaaggcgatattccgaccgcacaatcgcaagaaaagcaagaaatacaatctcaagaaacgcaagaaacacagcaaagcatggatacgcttatccaagccagcatcacatatgagattcgcacgcgggtaacgcagattaccgcgaccgtgacgatggtcatcgcggtgtggacgttcgctttgtggctgattttcgggcttcagccgaagcttgcgatcgccgtgttgatcggtgcgacggttttgacggtcgcaggcttggttttgcaggcatatgaccgccaaccgtcacggtaaaacggttttcgcaaaagaaaatcgcgcaatcgcacgaaaaatgggcggacccgcatgtgcgcagtccgcccaccgtcaacggttagaccgttttcgtgactcggccaatcaacagtcagtcgggccaaaccgatcagccgaatgactccgaccgtcacttagcctctgccgaaaaatcgtcgtcaatctgccccggcgcccacgaggagagctccaaatggtcgccgccggtctgatccacaagcacggtgtcgccgtcgtgcacttcgccggccagcagcatgcgcgccaactggtcgccgacttcggtttgtaccaaacgacgcagcgggcgagcgccatacgccgggtcgtaaccggtgttggcgagccaatcgcgcgccgaatcggtaacatccagcttgatgcggcgatccgccaagcgggccgaaacctgcgccacctgaatgtccacgatgccgccgagctcttcgcgcgtaagcgggtggaacataaccagttcatccaagcggttgatgaattccggcttgaactgcatatgcacggcgtccatcacggccttcttcttggcttcgtcatccagttcggtgttcaccaggaactgcgagccaaggttggaggtcatgatcagaatcgtgttcttgaagtccacggtcctgccctgcccgtcggtcaaacggccgtcgtcgagcacctgcaacagcacgtcgaatacttcaggattggccttttcaacctcatcgaacagcaccaccgaatatgggcggcgacgcacggcctcagtcagctgtccaccctcctcatagccgatgtagcctggcgcagcaccgatcagacgagacacggaggccttctccatgtactcgctcatgtcaatgcgcaccatggccttttcatcgtcgaacaggaagtcggcgagcgccttggcgagctcggtcttgcccacgccggtcgggccgaggaacaggaacgagccggttgggcggttcgggtcggaaatgcccgcacgcgaacgacgtaccgcatcggaaaccgcttgaatggcttccttctggccgatcacacgtttgccgagatagtcttccatggtcagcagcttctcgttttcgccttgcatgaggcgtccgacgggaatgcccgtccagtcggacacgatttcggccacggagtcggcgtcaacgcggtccggcaccatcggaatatcgccacccaagccaccgtcagcaccgcctgccgcactgttcttggccgccgcctcgttttgttcggcttgcgcgatctccttctggatggccggaatttcgccatagttgatggcggaggatttcgccagatcgccttcgcgttcataccgttcggcttgggtgcgtagttcgtcgagcttcttgcgcaggtcgccgatgcggttgtgcccgttcttttcggcgtcccagcgtgctttcagaccgttgagtttctcgcttttgtcggcgatttccttgttgaggtcgtcgagacgttccttggcgctttcatcaagctcgttttccgctttctgcgcggcggcatcgtctttcggattgccaagaaggtacgatttttccatcttgagacggtcgacctgacgctgcagttcatcgatttcctcaggcgaggagtcgagttccatgcgcaggtgcgatgcggcctcgtcaaccagatcgatggctttgtccggcagctgacggccggaaatataccggttcgacagcgtcgccgcggccacgagcgcatcgtctccgatggtcaccttgtggtgggcttcgtatttcggtgcgatgccacgcaggatggcgatggtgtcttccacgctcggctctcctacgaacacctgctggaaacggcgttccaatgccggatccttttcgatgttctcacggtattcgtcgagtgtggtggcaccgatcaggcgcagttcgcctcgcgcgagcatgggtttgagcatgttgcctgcgtccatggatccttcggccgcgcccgcgccgacgatggtatggatctcatcgatgaacgtgatgatctgcccgtctgcgttcttgatttcctgcagcacgctcttcaggcgttcctcgaactcgccacggtatttcgaacctgccaccatggagcccagatcaagcgagatgagcttcttgttttgcagggtggtcggcacatcgccggcgacgatacgctgcgcgaggccttccaccacggcggttttgcccacgccaggctcgccgatcagcaccggattgttcttggtgcggcggctcaggatctggatgactcggcggatttcctgatcgcggccgatcacggggtcgagcttgccttctttcgcggctgccgtcaggtcggtcgaatacttttcgagggctttgtaggagccttcggcgtcgggactggtcactttcgcgcctcctcggatcgttggcacggctttgcgtagcgcgtcggcggtcacgccgtattgttccatgatttgcgcgctctgattcggctttgccgccgcgatggcgatgagcagatgttcggtggatacgtattcgtcgcccatctgctgcatttccttgccggcttgcgcaagtactgcggatagttgcctgctgacttgcggttgcgcggtggtcgatccgctggcgcttggcagcgcgtcctgcgcttggtgcacggcggcgctgatgttctgcgcgttgccgcccgcggcttcgatcagaccgcggatcacgccgttttcctggcgcagcagcgcgtcaagcaggtgcagggtttcgacttgcgcgttgcctgctgccgacgcgttctgtacggcgtcggaaatggcttcctgcgccattgtggtgaacttctgttccatatcatcctccatggttcgcgccgatcgtccgtttttcgcacggtcacgtcgacgcatatgtcgttgtctgatatgctcaaccgacttcaccaccattctattcccaaaagttgagcctgcaacactcaacttttgttcactaaacgggaaatcgcgaacaacgcagcacaaaggccgtcacccacgaaaggtgacggccttcatatcttcaatatgtcaatcagcaatcggcaatcagccgcgcaccaccacgttgcgcaggctgccgatgccttcgacgtgcacgatcgcctcgtcgcccggatcaagatggccggaagcgttcggcgtgcccgtcagaatcacgtcgcccggcagcagcgtcgtgaagctggaaatcgccgcgatctgctccggaatgccgtgaatcagattcgccgtggtgccggaagccagctcgacatcctcaccgttcagcgtgaaggagatcttcgcgtccttccaatccaaatcgtcgcgggtcacgatccacgggccgagcgggcaggaggtgtcgaagcctttcgcacgcgtccacatcgggtcaagtccctgcaggtcacgcaatgtcacatcgttcacgcaagtgaagccgagcgcgtaatccatggcctgttcgaccgtcacgttcttggcgatgcgccccatcaccacggccacttccggctcgaaattcatatcgttcgagtacgacgggatcacgatcggatcgtccgggccgatcaccgacgtgctcggcttggagaagatcaccatgtcttccggagcgtgcttgatgtcggaatggtctgcttcatgcatgaactgcgcgtgcgcctcataattcttggccagcccgtataccttcgacgggatcaccggagagagcagacgaacgccatcgccatccaccggaaaacgctcgccggtcggcttcacaccggcaccggccagaggatgcccctcaagcgccacgagatagtccttgccgtcgctttcgtcggtctgcacgaaagcgtattgcggtacatcattatgcgaaaaacgtgcgattctcatgtctgccagtctacccgcaacaatcgtcgaatcgtccatatcatcgacatgcaacgcccgacaatcaaaaacatcgaaaaaaaaaa

SEQ ID NO: 862 - DNA, 8731 bp, Unknown
  gut microbiota DNA sequence
atggtggatccttccgcaaccgcaagttccatgtcgccggtcatgcccatcgacagttcgcggcaggattgcgtgcccggctcgccggattcgagaatatggtcgcgggttttgcgcaggtgctcgaatcccttgcggatggcggtttcgtcgtcgacatgcgcgccgatggtcatcagcccctgcaattcaagtccgtccaatgtaccgattttttgcgcgatgcggatggcatgcgagggatcgcagccggatttcgacgcctcacccgattcgttgacttccagcagcacgcccacggtgatgccgcgcgccacggccctgcgcgagattttctccgccaagtcaagggaatcaaccgattcgatggtgttgacgaccggcagcactttgccgatcttattgctttgcagctggccgatcagatggaacggaatatgctcacccgcaatagtggaagcgccggcatcgtcggcaacgcccaacgcgaatccgcgctccccgcaacgtgccatcaatccttcggccttcgccatcacttcctgcggacgattctcgccgatcatacgcacgccagcgtcgatcgcagccatgatctcacccacgtcgcgcgttttcgtggcggcaagcaggcgtacggaacctgcgtcacgcccggcatgctgctccgccgatgcgatgcggtccagcacacggtgcacgccatcggcgatctgcacggcacgcacaccgtcgatcacctcattggcaagattcttatggtccatatatgcagtcatgttcagcctcttgcgttcaatcccaactacctctaccagagtaagaagaagcccgtacgacggtctgaagtgaagcgataaagcgaccgatatccgtacgggctaataaaacagacggcagtagaagggggaacttcaaagactccgtccgacagcaactatatgcaagatttactaaacacgcgccgaaaaaaactttttttcttcaaaaaaaaattttctcagcgaactcaaattcagccttgcgattcgtctaatttgcgttccaaagcatcaacgcgttccttcaacgcaagcacctgacacgtcagcgatcgaatctgccccaactgcacagtcaccaatcgttccctggtgtcggaagacaaggcgcccgtcgtggaattgcttcttgcggccgccataatatccagatccactttccaacgtgcgatattacgttccacacgcttgcgcccgatgatcgcagggctcaacccagccgacgtgaaaatcgtgctcggccgctcgccatccaaatatcggcgcatgcaactgatctgaaaatcacgcgaatacgtgatccgattttccgtaaccgactcaaccgccggcaacgcacgaagatactcgacctccgtgttactaaactgccttttcgtcatatcgaccccattcatccgacaaaacggaataccattctcgtgctcgtagattaccatcacaaacgaacgcacccgaacggcatatactaccactttaacgtaaggctatgggggctcacgccacctgaatcgccctacgctaaacctagctaaaccccaacgggtacagttgcgtactgccacagtcaacccaccaaaggagcagccatgaccggccgattcgcaccaaccccatcaggacgcatgcacatcggcaacgtttacgccatgctcggagcatggctttccgcccgcaaatcgggtgattccatacggctgcgcatcgaagacatcgacgagccacgagtggttcccggcgccgccgaaaccatgatgcgcgatctcgaatggcttggtctcggttgggatggcgaaccggtattccagtcgtcgcgacacgccctataccaggaagcgcttgagcttctcagcaagctgagctttgacgaaatcagcgatattatcagtactggttccaacgattccaagccctgcagcactacagcaggcaacgaagcagccacctctgaggcaacaccgctcatctacccctgcttctgctcgcgcgccgacatccgcgccgcctctgcaccacaggaaggcgatcgtttcaccgtgtacccaggaacatgccgacgcctcatcgccagcgaaccgcagcgtgcgaaacaacgcctcgccaacaacgaccgccactcgatgcgcatcgccaccgccgacaccaccatcaccttccacgacgaagtattcggcacccagcaatacaacctcgcccacgacatcggcgacatcatcgtgcgccgctcggacggcatctactcctaccagctggccgtcaccgtggacgacctcgacatgggcatcaccgacattgtgcgcggccgtgatctgcttcgctccaacgctttgcaaatctacattcgcaaagcccttatcaacgcgggattcaagccttccgaaccgacacagcccttccatcctgccgacggttccaataaacctgacgatgtgaccatctcatacgcgcatctgcccctcatcgacaacgcagccggccaacgccttgccaaacgcgagcgctcgctcgatctcggcatactcacggcacacggcgccaccgcgcaacagatcatcggctattgcgcatggctgctcggattgcagggagacctgaaacacaccaaaccgcagcctatgagcgccgacgaagcgcttggcgtattcagttgggatgccgttcgcaccaacacgtcagaccgcacgctcgatcaaggcgagttcaacgcatatttcggactgtaggccctattctgcagttttattctgcagttttattctgcagctctattccgcaatcacgttcagccaatccataattccgaatcaagcggatattcgttgatcgcacagccatccaaaaatatggactgctcctgcataagcggtgccgcttggccagcccccgcgcacgtcatctcattgtcgatatgccccaaccggtgcccgacctcatgattgatcaccatcgtgcgatatcgcgccgagtcgccgcctcccgacatccacacgtccgtgccggaattccaacgatcgtcgttgataatcacattgttgcccacacggcagctgtattgctccgaacataccgacgagaacgtcggcaaggtcgacgcttgggcgagcacgatatcgaaatcgcaattgccgtccgtagaaggttcgaaaatcgcgcctgcgcgcccatccatgttcgctgttcagaatacgaaacacggcattcgaaaaatcttcgactgatccgacttcaccattggtgaccacacagtaatgatattgcaccatgccatatccgctgttttgcgccgtttgctgcgctttcgcaagtatttcgcttttctgatcgtccatcagcgcggccgactgctcgcgaagcgctttggtgacggcgtcttcctgcggttccgccgtttcctccgctgaggcctttgcgtctttcgtttccgacgattcctgggttttcttctctgattgctgcgatttcttttcggatttcgcggattgatccgttttttctgaacgtgttccggaattgccgatctgcgccgttttcgcatgtccgttcagtaccgcgttgaccagcacggcatgcacgctgcacgacgtacatgacacgatgacgcataatgcaagaatccaagccacgacgcttctgcggatgcggaacgcttccgtccgttcccggcggctcatggtggcggccgctttcggatcgagcgcacgcagaatggtacgaattcgcttcaatccggcctccttataaccctgccgtcacgcaggtggcagcatatctcttccgcggcaacactaccagccaacagtaggcatgcaaaaagcccgcttcccccgtaccggaaattttccgaggaaaacaggctttatgcaacagttctcatatatcaaacgcaacttatgcgacggtcaggcaaacaagtcacgaatgattgaatgcgatcaggcgaacaacttgaacacgaacgcacccacaatagcgcccagaatcggggcgacgaccggaatccaagcctcgtcccagcgggaggagcccttggatggaatcggcaggatggcgtgcagcagtcgcggcatgagatcgcgggccgggttcaggccaggaccggtcggaccacccatggaggtcacgaggccccacacgatgaaaccaaccgcgatggatgcggcagcatggtcttcctcaccccacggcagggacaggcagcacagtgcgccgaccacgagcacgagggtgccgaagaactcgttgacgaagtagttcacgcgatcgttgtgagcgtcggtggtgcagaaagtgccgaggatggcgtcggcgtcttcggtgtccttatagtgcggatagtaggtgatatataccacgagctgaccgactgcggcgccgagcagctgagcgatgatgtacggcagcaccagattccagtcgaacaggccgttcactgcctgggcgatggtcatggccgggttgatgtgcgcgccggaaacgccaccgaacatgagcaccgggaacatcacgccgaagccatagcccatggcgatgttcagccagcctgcatggtggcccttggtgttcttcagttcaacgttcgcgacagcgccgttgccgaagatcatcagaatggcggtaccgaagaattcggccgcaagtttgacaaaagtcgagtattccactgctgtttcctctattgcttcttctctgtaagaatcagattgatgtcaattccgctctcggcggacaacagcgtccaacactactccccacactggaagtcgagcacaaaaaggcttgacaggccgtcggcttgccggacagtcatacagaaatcggaaaacaaaaaagccttggaaccgaagttccaaggctttatctgtgccccctcagggattcgaaccctggacacgctgattaagagtcagctgctctaaccaactgagctaaaggggcgttggtcttgcgaggttttgttctcgctgagcacgagaagtaaatatactcagaatcgagaagaatgcaactttcggcgtgtcgcggttgtaaaaccgctatttttcaacgatttcgacagattacgaaaatcgcagaaaacgcgattcaaccatcatatttcctacctaaagagcacaatcaaggcaggaaatcacaatttcttcacaaattcagttccttgcaatccagttgccccaaacgctcccgctaattcatttgcacagccatgcatgaaaactgacggtaaatcgctcttcttgagtgaatcagcatgcttcacgcaacacccacttagggattgagcttaggttgcttccaagcaccgtttccgcacgagagaaggaaagtaacgaccatgacgtgcccaagttgcgacaaaccaactaatgacggtggctacaactgatcaaatatgaaaatccccctgcatagctgttttcagctggtgcagggggattttccatgcttaagctcagacgtatctcagtctgaagtcattcgccgtaaccgcaatgaatgcagccatagcgaatggggccgaatcactcagcgacaaccttcacggtgaaggaagcggagatttccgggtgcagagcgacggttgcagcgaactcgccggtggtcttgatcggatccacggtgatgttcttcgggttgacggcagccttggaagacagcgcgatggcgatcttgtcggcggagatgccaccgaacagcttgccggactcggagaccttggcggcgatttcgacgacggaaccctcgatgagttccttggcggcaacagcctcttcgcgggtggcaacggccttggccagacgagcgcgcttcatggcctcgatctgggcggcagcgttcttggaccatgcgaagcccagaccctgcggaatcaggtagttgcgagcgtagccggccttgacggacacgacgtcgcccgggtgacccaggtgattgacggacttggtgagaataaccttagtttcagccatttttcaaacctctctaagatcagcgaccggaagtggcgtacggcagcagagccatctcgcgggcgttcttgatagccttggcgagctcgcgctgttcctgcacggaaacaccggtgatacgacgggaacgaatcttgccgcgatcggagatgaacttgcgcagcagggcaacgtccttgtaatcgatctcggtgaccttagcggccttcagtggattcggcttcttcttaaacggcttgaccggcggctgcggcctcttgcgtgacatcttgatgttctccttacaatctggaaattgcttttcttttaagctgcgatccgggtcggatcagaattccggttcgtcgctgcttccgccaaattcggaggagccaaaggaaccgaacgatgaggaaccggaattatccgaattgccccacggatccgatgccggagcaggctgcacggcgggcgcggcattggctggagcggcagccccaccctgatagccagcgccaccggaatatccggcaccgccctgatagccaccggcattgccggcgaagccaccattgttgaatccgccattgccgccagcgaaattgttgccgccgcgattgccggcaaaattaccaccgttggcactggaggttcgggtgacctgggcggtcgcatagcgcagggacgggccgatctcatcgacctgaagctcgacgaccgtgcgctgggaaccatcgttcgcctggtaggaacgctgctgcaaacggccttgcgcgatcacacgcatgcccttgctcaggctctgcgcgcaatgttcggccatgtcgcgccacgcggagcagcgcatgaacaaagcctgaccatcttcaaactggcccgtattacggttccaggtgcgcggagtggaggcaatcgtgaagctggccacggacgagccgttgccaaccgtacggatttcgggatcagccgtgaggttacccaccacagtgataatcgtttcgcctgccatcgttacctacttactttgcagcttattgttttgcagcttgaaaagcttggaattacttacttgcgaagaatcttcgtacggatgacggattcgttcaggttcagcagacgatcgagttcgtcgctggtggccggctcagcggagtagttgaccacaacgtaattgccttcggtcttgccggcgatctcgtaggcaagcttgcggcggccccagatgtcgatgttctcgacagcaccgccttccttggtgacagtttccagatactgctcggtcagcttcttcagaccgcgctcatccagctcaggatcggcaatgaacatcagttcgtacttatgcgcagacatcacccacctccttcggactatcggccatggaccttccatggcaggagtgtgtatgcgtactgccttcacgcatctatatatgaaaggtataaagatacagttcagacaacctgttcagcatagcccttctgctggacgagcggcaattgcgcacgttctgtggtgcaggcgcgtcatgggcacccgcattgttatattgaatacggctatttttgtacggttggtaccgtatttacgcgactctagatttgtggaaggcgaagcatgtcggcgattctcgaaggcaccccggataagaaattggctttggtgacgggtcgtgcgtaccctgagcaagcccatgaaaccgcgaaatacctgggaatcgacgtacttgagaccacggcttacgatttcgccaacggcgagatgtatgtgcgttacaccgagccggtgcgtggcgccgatgcgttcgtgatgcaggcgcacaccgagccgatcaacaagtggattatggagcagctcatcatggttgacgccatgaagcgcgcttccgcccgttccattaccgtggtcgcgccgttccttggctattcgcgccaggataagaagcatcagggccgcgagcccatcaccgcccgactgattttcgacctgttccgcgcagccggcgccgaccgtattatgacggtcgatctgcatgccgcccaggagcagggtttcttcgatggaccggtcgaccatctcaccgccactccggtgctgcttgactacgtgcgcaacaacatgccgcttgagaacaccaccatcgtgtctccggatgccggccgcatcaaggtttccgaacagtgggccgcgaagctgggcaatctgccgctcgcgttcattcacaagacccgtgacaccacccgcccgaaccatgccgaagcgcatggcattatcggcgaggtcgaaggtcgcgactgcgtggtggtcgacgacatgatcgacaccgcgggcaccatctgcgaggctgtgcgcacactgaacaacgctggtgcgaagtccgtgacgctggttgccacgcatggcctgctgtccggcccggccgtggaacgcctgagaaattgcggtgccaaggaaatcgtgctcaccgacaccgtgcccgttccggaagagaagcgcttgccgaacatgaccgtgctgtccgtggctccgctgttggccgctggcatccgttccgtgttcgaatccggatccgtttccacgctgctcaacggtctgcccgaagacatgcgtccccgcaatatctacgcctgattcgcgcaatcttttcaacgtaacaaaaactcgcccccatccggtcggcgagtttttttaatgtcagatcttcccaaaaacggggtgccgcatcctacgtcggtaggatgcggc

SEQ ID NO: 863 - DNA, 7532 bp, Unknown
  gut microbiota DNA sequence
tttgcgcggcattgccgtaggaggcctgcgcaccataccctgtggcggcgtatgccgaaacatacgaggcaagctcggccgcttcggaaagcgccatgcccgaggcaagaccggccagcaccgtgcccatgaaggagtcgccgcagccggtggtgtccaccgcgttcacacgcacgggggcaatgcgctggatcggcgttgccgaagtggaatccaataccacggaaccatcgccgccgagcgtcacgatcgcctgttcgaaaccgaatccacgcattgcttccagcgcatgattccaatcgaaaccgtcccaatcgtcgttttccggctcgtcaatgccgagcagctgcaccatctcatgctcgttgacgagcagaatatcggatgcttccaccagttcggccggcagcgacggggtgaacggcgaatcgttgagcagcactttcacgcccgcttcatggcacatgcgcgcggcggccgtcaccgtttcgatcgggctttccaagcacaggccaagtacggaagaccgtgccagcgcatcgcgcacggattccacataatccacggtgacctgcgcgttggatcccggcgagtacacgatggtgttttcgccggctgcgtccacggtaatcacggttgtgccggatggtccgagcacgcggcgaacatgcgtggtgttcacgcctgcctcgcccagagcgccaagcaggaagtcggcgttggaatcggagccgaccgcgccgaacatctgcacggttgcgccgatgcgcgctgcggcggccgcctggttgccggattttccgcccggcagcagctgcagcggaccgccggtgatggtctcccccggccctggcagacgctgtgcggtgacggtgtagtccgcgttcatcgagccgattacggacactgtgccgtggatacggtccaatgcggagagaacttcagtcgcgctcatctttaccttccttacatcaaaagaagatttatgaaaatggagatttgcgaaatagtgttgttcagtaatcgcaattatcgcaaatccccatttttattatattgaggatgtgatgtgcgattactttgccgattcctcggtttccagcgcatggttgccttcgtagatcttcttcttgaagacaaagaacacgatcaggccaagcagcgcggtaccggcggcaatcagcaacaggttggcatagttggcggtagtgccggttgcgccggtgatggagccgcctgcgagggcgttggatccgagcaggctgccgatgatggcgatgccgatggacggggaaacgttcatggccagatcgttcatgccgacgccacggccggattcgtccttttcaatggtgcccagcacggtggagaccaccggggagtacatgaggccgcagcctgcgtagaacacacatgcgcacagggtcagcaccacgaaaccggagttcacgcagaatgccgcaccggtccagccgaggaacatgagggtgcctgcggtcacgatgccggccttgattccgatcttgcggatgatcatgccggagcaggtgcccaccacggcggcgaccacgaaggcccacacaatgtgcagggagacctgggtggtggtcatgccgtagatgttggtgccgatggcgttgaagatcgggctcagtgcgtagttcacgaagtagaacacgaggatcaggcagatggcgcgcagccagcgggtgttcttgaagaacgccggggtgatgaacgggttggaggccttgttgatgtagaaggcgaatgccacgaacagcagcagggagaccacgagcatccaccatgccatgtacgagaagaacagggtgaggaatgcggtggcgaagccgaagatcacgaagccgaatgcatcgaccttctggccgttgccgctcttggacggcagggtcttgagcaggatcggcaggaacaggatggtgacggacgggatcaggaacaggaactgccatgcgatggagctgagtatgccggctgcgaacacgccgatggatgcggaaagctggtatgcggcggtgaacagaccgaagaagatgaccttcaaatcgttacgcaggtacttggtggccaccaccaggaaggcggaacctgccacctgttcgcctgcggtctgcagcacgcgtgcgatgatcacggtccacaggtttgcggcaaagaagtagtttgccacgaaaccgaagatggagccgacgaacagcgtcacgagaccgacggtcacaagcttacgcagggagacgaaatcgcccagggaaccgtagatgaagcacacgatgccgagcacgatgctcggaaatgcggtgatcagggacgcctggttcggcgcgccgacgtcggcgccgacctgctggaacaccaggttgaagccctgcaggcacagggtgccgagcacgaaggtgatcagcagcgggatcagggcgcggatggccatcttgttgctggtcaccggatcatcgaacggatcggcggatgcggtgccggtcacagcggttgtgttgttagacataataaaaatccttgattctctcgaattgcgcgatatgcgatacgcaatatgcgatacgcgattgcttggccggttacgcttattcagccttggctgcgaggccggagatgcgggtcatgaattcgttcaggaagcgcggcacgtcgacgccgacggcaaccttcatggtcttggccgggtcattcaggcgggtttcgtcgccgatggtgcgtccgcgggtcgggccttccacgtcgaccttcatattgatgtcgagggtggtgacgagggtcgggtccactgccacgccaacggcgagcggatcgtgcaggccgcagccgcccagatgcggggacgtggtttcgtaagccttgatgtagaagtcggtcatgtcggccaggaacttgccggccttggtgccgaggtcgcgccactgctgggtttccttgtaggtgagcagggtctgcagggtcacgtcgagaccgatcatggtggtcggcgccccggaacggaacaggtagtcggcggcttccggatcctgcgaaatgttggcttccatgcaggcgttgcagttaccgggcacggtcagtgcgccacccatgagcacgatctggccgatttcatccttgatttccggtgctttcttcagtgcggcttcgatgttggtcatcgggccggtcggcacgtagacgagatccttgccataagtcttcactgcgtcgatgatgaagtcgaccgcagattcggtttcgacggaacggctggaatcggggatttccacgtcgccgatgccgttgtcgccgtggatgaacgcggagattggcagtacttcgaaatggtcggtggtgctggagtgcggcaaaccctgatacaccttgacttccgggtggccgagcaggtcggtcacggccagtgcgttgcgcacaccctgctcgacaagcacgttgccgtaggtgccggtgatgccgatcagttcaatctccgggcttcccagagcatacgaaatggcaagcgcgtcatcaacgccggtatcaagatcaagaatcatctttttcatgtgtgtgcctttcctctttgacggcctgacgacggtccgccaccatacgggtgcgtcgtcagttatacatcgagcgcattctcgattgtgttgtgttgacaagatttatgataaagcgttttatcaagaacgcaaattcttcacctatacacggcgtgttgcctgtattcccaacgattacagcatattggagatgcttacgtcaccacataccgagattgatctgcaccacccgtttcgcaccagtctgcagcatctaaaaatggcggtttacgcgcaggccgcctgcaccagtttcggcgtaagcacttcaacctgcggatcggaaagccacggacgggcatcccctgattccgtaccggacttggcacgaaccgcaacatcaatccgcttacgcaacatgccccaacaagcggcggccaaatcagtcacgctctgctcaacggtggtcatacgccaaccaagaccgaatcgtttgagaatattgtcgtaaccaatcacctgcatatcctcagtaacatgcaacccacgctccgccatacgctgacggaagccaagcgccatcacatcgttgcagcagaacacggccgtcgccccgccatcgatgatctgattcgcggcacgatagccgctatcgaaacggtaatcaccctcaacacacagcgaagaatcaaaatgcttccccgactgctcgatggcatccacaaaaccacgacgacgctccgcggcactcgactccgcaatatcgccggtgacaatgccaatacgagtatgaccaccttccaacagatactgggcagccaaacgaccaccaagatagttgtcaaaaccgacggcatcgcaccagccgcactgcgtcaaacggtcgatcagcaccaccgggcacgacacaagcgccacatcctcacacagctgctcaacagcactcccaacacacgactcacgcgccgggatcaacatcaccccatccaccccacgggcaggaagacgctgcaacaactcatgctccgcagcacgcgaatcatcggaattggccacaatcagcgaatacccctgcgcggcgcactcatcctccacacacttggcaagcgccgcgaaaaacaggttctcaatatcaggcacgatcagcgcaaccagctgggactgcttggttaccaagctacgcgcgctctgattcggcacataattcagcttcttcgccgcgtcggcaatggccttacgcttctcatcagacacgcgagccggccgattattcaacaccagcgaaaccgtcgtcacagacacccccgcagcagcggccacatccttcaacgtcgcacgatacgccattcaaaccccttaaaacgtttctccttccagcataaatgccacgcactcctgacgcgcccagcacccccatccacaaacaaattcctttcatagcaaaataatccacattatttccagtggtaaatcgtttctcagaaatgtttttgtatactcgcaacgttttgcttaatacgaaagccacagagaagagaggaaccccaatgcaaccaacagcacagaaaaacaatgcgaaacagcgcaagaccatcgccatcgtcgccgtgatagcagtggttgccattgcgctcgcagccgttgccatcatcgcagtcgccaataagcgcgaaatgacgcaagccgccagcgacacctgcacgttgaacgcgaaggcgctcgccacgcatcagcaaaacttcgaagaggctcagaaagaagccgaagatgcggcaaaactcaccgtggacgacgtggccgacggcaccacgctggaaaccctgaaggatgcgatcacgctggccgaagccgtggaaaacgcgccaacatgccccgcaagcggcaatgccagcgacttcaccaaagcgacggacgacattcgcaaatacgccgacaacctgcgcaacatcaccaacgaactcgacgcggccgccaagtcggtggtcgccagccaggaactcaaactcgagtccgccaagtaagtcaagtaagccgccccgacggttagcgccgacgtcagcgccaaaccctacgtttaacggggccaaagtcatccaagtctgcaacttcacccccattacaagcgctttcgcaccacatcgggcttatatatggcagattcggaaggtcgcccggagacatttcgcttatatatggcaggtcattccggaaagaccgcagttagagggtacacaattaccccctaactagcttgtttcaaaaacagactgccatacataggcgagatgcctccgtacaaaccccaaaatctgccatacataagcgagataccatctgccgactttcctttattttgcattatgcgtgcatttgacatagaatacacattaattgcacgcaagattagggcaggtggttcagatgggcaatattaccattcgcatgaacgacgatctgaaagctcgggtcaaccagacactcgacgccataggcatgaatttcaacacttacgtgaccatggcgagcatccagctcgtgaaccagcagcgcctgcctttcgacacttccgcgcgcgccgcggaaccaaacgagcagaccaagcgcgccatgctcgaagccgaagccaaggaacgcggtatcctcccagacgacgcggccaccttcaacagcgcgcaagacgccatcgcctggctgcacaacaatcacggctgaacaggcaaagcgccatgattaccattaaattcgaccaacaatttcagaccgacttcaaacgcatctcacgacggatacctcaaatcgtaacggaactcgaatatgtaatcgaagctattgaggagtacggacacgttccggaatcatataatcctcacatgcttgatcacccacgaggaatctactcgggatatgcggaattccatcttgccgaagggaaaatggatgtgttggtgatctactcggagcggccggaagcgtcgacaatccgattcattcgcatgggatcccacgacgaactgtttgacggtccgttgctttagatgagtccatcgtaggacccaacgagattcagccatcgatttccgcccaataaaactttttcccaccatatcgggcttatatatggcagattcgacagtccgaccggaggcatttcctgacgaaatcggctacttgcagcacgttattttccaatagccacttaccaaacccaattgccaggctgcgccgcatccaccatgacgcaccgtcacaaacgttcccatccgacgcgctttactggccttgggcgcggtagcgggcttcggtggcggctttggcgggctcccaccaggcgcggttgtccgtataccaagcgatggtcgcttgcaaaccggcttcgaaatcagtgtgcacgggccgccagccgagttcggtacgcagcttattggaatcgatcgcgtaacgtcgatcatgcccaggacggtcacgcacccagtcgaatgcgtcccccgcacaccccataagccgcagaatcatacgcattacggcaatgttgctcatttcgccgtccgcgccgatcaggtacgtttcgccgatccgcccgcgtgtaagaatcttccacaccgcagaagagtggtcttccgtatggatccagtcgcgcacgttctcgcctgtgccatatagtttcggccgcacgccctccatgatggaagtgatctggcgtggaatgaatttttccacatgctggtacggcccgtaattgttggaacagttggaaatcgtggcgcgaagcccgtacgtgcgcacccacgcgcgcaccagctggtcggacgccgcttttgacgcgctgtatgggcttgacggcttatacggcgtgctttcggtgaatttgcatggatcgtcgagcgcaaggtcgccgtacacttcgtcggtgctgatgtgatggaatcgcacgtcatgcttgcgcgccgcttcaagcaggtggaacgtaccctccacattcgttgtgat

SEQ ID NO: 864 - DNA, 6160 bp, Unknown
  gut microbiota DNA sequence
gattgcgcttctagatggggcggccggtgggtgacctgcatacggttggtgacggggccagcgcgctgaggttcaatttcggtcccggctaccgtgtttgctccgcgcagaagagcgactcgctcatgttgctgctttatcggtggccgagcttgacgattcggcgttgcggcaggccgtaatcggcgatatgaccaaagcgaagggtatggggcagatcacgaaggaggcgggtgtgggacgtgaaagcctttacaagagcctcgacaggaatgtcaacccgagcttccataccattatgaagggatcgtgcacgctctcggcggcaggctgacaatccaacccgcataagcttgactttacgaccatcatgcagtggccgcccgagcattggaaaagggcgatcgctgaccatattgttgcgacatatgtggagagatgttcgtggtgagcttgacgtacataacatcgtaaaacttcggtcgtctggtttgttctgcggctcatcagtgagggaaaatgcttaattatgccgcctatctcgcctatatatggcagattttgaggttcgtacggaggcttctcgcttatatatggcaggtgtacgtgcgaaaagcgccaaaaacatgccccctaagtggcttttctcgaagggcatgtgccatatataagcgagaaacttccggtcaagatgccaaatctgccatatataagccagatatcgcggttcagttcagatgaactgggtatatgtccataaatttcgacgattagggtgtatcaagagttccgagttggtttcaatgacaatccgagggggtgaaaacgagtttatgggcacgcgtgcggagtctcagatgcgcagaactcctcacgcagcgcatatcacaatcccagccaggcgcgtaggtcacgaatttcctgatcgcagatgccgtggcccattcccggatattcgaaatacgtgagattgccggtttgcgcaagtttgttgtgcgcgcactgttggtcggctaaaggaattgtgcggtcttcgctgccgtagcagagtgcgaatcgcgtgcgtccggtcgcgggcaaaggctcagcggtttcgcctttgaatgatgggctcatcagaatcgccatgtcgaacgcatcgggatgttctgcaaccatgcgatacgacaggtatccgccctgcgaaaacccgatcagtaccttgcggaaatgcgcgtatgcgggcgaatccagcaatcgtacgacggcgtcgcctacggcactgcactcacgtcgacgctcttctacggaacatccatctggataccagtagtagcttccgatgtaaggacgttcgtacgtgcctcggaacgacagataattcggatgctgggcaggagcaatggagttgtccgttgaagatgcgtcttgcttcggaacatcataaatcgcatcaataatgcggatcatctcattttcatcattgctgaatccatgaaatcccaagaacagcagatcatcgccggctatttcgcaggcggccgtctcaatgctggtactcacgttcaaacgcatgtcatcctcccatcgcatgtcgatagtatgcagatttccaacggcaccataacggtggacagcgaagtggggaagggcatgacgttcaccgttatgctgccgttggttgaggaaaacactgaatatgtggcgaagtttacagcaatccatccgcatgcaacgcgccatacatgcggtccaggcattcgaccagcagcggatacggcattgctatgttcacgcgcacgcatccggcaccggtctcgccgcatgaacgcccgtcggtcaacgccacttgcgccttctcaaggaagtatgcggccggatcgtcgatgccaagcggcgagaaatcaagccatgcgatatatgtgccctgcggtttgatatagccgacgccggcgaacctttcacgcatctgctcgtcgaacaacgccaaattcctgcgcacataggcaaacgcatcctggaaccacaggtcgccttcgttatatgcggtggtggtggcgattgcgccgatggtggcggtctgatgttcgctccactccgccttgaccgcccacatgtcacgatccgcaggattggtaagcagcacctgcgcgcacttcgtgcccggaatattgaacgatttcgacgcgctggtagcggtcatcgactgtaatgcggcctgctcgctgatggtggggaacggaatgtgcttgccctcaaacacgaacggcgcatgaatctcatcattgaaaatacgcacgtcatactgtgccgcaagatcgctcagacgcagctcctcctccaaggtgagcactttgccgatcgggttgtgcgggttgcagagcacgaacgcatggcatccggccgcaaacgcgcgttcgatggcgtcgaagtcgaacacccattgcgcctctccggtttcggcgtcgccgctttgcagcatttcgatttcgatcacgtcaacgtcgtacagtttcggaacgctcaaaaacggcatgtaggcaggcgtcggcacgatcacgctgttgcccgcaccgaccagttcacgcaggaaaagctcataagcttcgagtacgtcgggaaccacgcgaataatgctcggatcgacatcccatccgtaatgcgagcgttgccatcctgcgcatgctgctgccacgcgctgtttccagggttcgggaatgtagccgagtttgcaatggtcgcaggcgttgtcgatggcttcttggatgcagggagccaggccgtagtccatttcggcgatgaacgcgccgatgcagccggggtagcgtgtccacttgtcggagccgactgcggcaagatcggctgcggtggtgtggtcgatggcgtcggcgtcaaagccggaaccggtacgatgcttcatttccatgatttcttccatggttccagcatgacgtaccgatgcttgcacgaacagtgtgttcttgtactgaaagcaaagactgttatgaagttttcttatatcagatgcttttgctattcaattattaatctgattatgacgatatagcaaaatactggaaacaattgtttgctgcagtattccgcgattgcgaataagcacggatatcaaacgatgaatcagatgttttccaaatactggtgtgacgccctttcgatttcgtctttgacgcgggccactgccggtcggtcgtccacttttcttgtgacgaaacagactgtgcggaatgcgttgttgtcggcgattggcagtgcggccaaatcgggttggattccagcggttgtggctaagcgagatacgatcgagacgcccatgccgacttccaccagattctgcgtggcccaaaaatcgtcggtcgaatgtgtgatttccggtgtgaagccggcggcacgcgccaacgacaccagattcgcctggcaggtttcgcagccggcgatccactgttcgctgcgtgccgaaaccaattggaccggcaggtgcgagctttcgtactggcgcgcgatcgcattgttcgcgccgatcagcagcatcagcggatcgacaccgaaaggagcgacttccaaatcgtccggtccggccaaagcggggagtgaattgtattggaagatgatcgcgcaatcggcaagcccctgttccaacgcctccatggcctcaggcggctccatctgcatgaggctcacgcgaatgtcggacgttttgctgatatgcacgagcacgcgtgccacgaacgacgaacataccgatgggggagcgaccaaacgaatatgcgtcgatccgttgcgctggtactcttccacatctttgacggcttgggtgacgcgattgtcgataagctgcccgtgacgtgccagaatacggccgatcggagtcaattccacgccatgcgacgtgcgctgcacgagttttgcgtcaagttcacgttcgatcttgcggatctgctggctgatggccggttgcgaccatccggtttcacgcgcgaccgcggagaacgagcccaaacgctccacgttccacaaggtcaccagaatctgcgggttcagtgttttcgtgctgaatcccgtggcattcgcggtgatgctgatgtcggtgttcgtgttggcgttttcacgcgtgttgctatcggctggagtgttcatatgagggtagtgctcagctttttaggaatgcggggatggcctcggccgccgcatagcccgcgcggtacatgcgttccaaaccttcgaacgacttgctcaacgtgttcaggccgtacaggctttccggcgcgaggatgagcacgcggccgtcctgctcgtattccttggccagcgccacttcgtcgttgtacgtctggtagcggttgagcagtttttccgcggcttgtggatgcgtgcgcctcaaaatcctggcggggccgatgtccctcttctgttcgcgtacggtgtctttcggacgggtgagtatcaccacgatgcggtcgtggccgtcatcgatggccttctgcaccggaatcggatcggcgatgccgccatcgtaatagggaatgccatcgatcgcatacggttcgcaagctaccggcaccgctgatgacgccttcaggatgtcgaaattgtcgtagcccacgtcggatttgccgaaatacttcgtggagccgtcttcggcgttgcacgcaaccacggtgaaaccggtcgggttggcttcgaaagccgcgtagtcaaccggattttcgccatcatgattgctgagcgtgctatacacgtaatcgaggttggcgaaattatggttcttgacatagctgtcgaagctcgcgtattccttgcggaacgcgtactgcgtgtagaacgtgtggttgcgcccatgctgcttcgcgatgaacgaaaccatgttggcgctgccggcggaaacaccatagcagtggtcgacgctgatgccgtcctcaagcatgcggtccatcacgcccgcaccgtaaatcgcacggaaaccgccgccgacgtcgatcattgccgtcctgtgagccatatgcgtcccgtcctttcgccgttcgtcccttttgcgggtttcaatcgactttacgcggtctaattgacgtatttttgcgtgttcggtcatttcttatcgaaggacgacgtaagatatctgcgaataatcaacaaaaatggagtggagaagatatcaatgaacgaagctgcactgcctcagtcgacggtccacatcgcccaagctgatccggacgggattctgctggtgattcacgcgggtgccggcaatcgtggcaaaaaggatacgccggaacgtcgtgcccaggtggagcaggatttgaacagggctcttgaagctggctatgcgttgctggagcagggggctccggcggaggatgccgtgtgcgcggctatccgtgtcatggaggatgctccggagttcaacgctggtcgtggcgctgcattgacgagcgaaggcatcgtatccatggattcctgcctgatgaccggtgtcgatggcgaggttggttccgcgtgcggtctgaccacgtctaagaatccgatcaacgtagcgcgtgccatcaaggaaaagaccaagcatgtcatgtttgccaagcccggtaatgatttgcttaaggagtggggaatcgaactgtgcgacagtgattatttcatcactccggcacgtcaggaatccttgcgcgaggcgcaatccaacggcgatgagtgggagaagcatggcaccatcggcgctgtcgcccgtgactcgtccggcaacatcgctgccggcacctccaccggtggcattaccaaccagatgccgggacgcgtcggcgattcgcctctgccgggctgtggcacctatgccaacaacgattccgtcgcgatctcctgcaccggcatcggtgaggcgttcgtcaaggaagtcgctgcgcatcaggtttccgatcgtgttctgtacgccaaggaggagccggtcgaggctgcgaaggcggcgctggatggtgtcgcccgtcatcatggagatggcggtatgatcgtcgttccggctcatggtgaaggcgcaatggtgttcaatagcgagatgatgaactgcggttggaagtctccgaagggcagctacgtgcagagttgatgctgtagtggcaaaccggcaaaacaagccacaaaagtacggtggggttcgaatccatgaaggattcga

SEQ ID NO: 865 - DNA, 12245 bp, Unknown
  gut microbiota DNA sequence
tggtgtaatcgaacgacacgttcttcacgttcgtcgcggacgcggcggcgacgttgtcgttccacagcggaatcaccggaagatccttggccagcacttcctgcgccttggtgaagtcctcggtccgcttctttacgtcggtctgggcaagtgcggcattcaggagctcgtcgaattccgcactcttgtaatcaccatcgttcgaaccatgaccgtcagcggagctggaggcgtatagcggattgagataatcctcagcggatgggtaatccagcatccagccggcacggaacgcggttttgatggtgcggttggtcacctggttacgcacgtcgctgaacgtggcgtacggctcgccagcggcgtcgatgtcgagcgtgttcttgatctgattgcacacggcatcgacccattccttatggccgccatcggcgttataggcgattcggaagttgccggaccacggcttgatggcattggctttcttccagagttccttggccttggaagcgttgtatttcaggttgctgccgttctgttccagtttcttcacatattcggggacgagcggtgaagtgaaatcggtggccggggtcttcgtgttgttgtaaaccttcttgacgatctggtcgcggtcgatggccatggaaatggcctgacgacgcaactggccttcttcgtcgttgccgaaatgctcaagacgttccggaatgacgaaggactggaacgaggatcctgcctggctgtaggcgatcacgctggaatcctggcggaaggtcttcaccgcggactgtggaatctgatccatcacgtcgaggttgccggacagcacgtcggagtaagcggaatcctcattcgtatagacgcggtattcgatgcctttgttggacaccttgcggctgcccttataatccctgtttggtacgacgatgatgttcttgtcgtgggaccaggacttgaacttgtacggaccattgccaatcggagcctggccgaacttcttgatgtccttaaatgccacgcttggcagcgggaacatggattggtgcgcgagcttggtcgggaatacggaatcaggcttgttcagctcgacgaccagcgtgtagtcgtccggggtggaaagaccggaaagtgtggccttcggatcgacgttcggatcctgcagttcgtcatagcccttgatggtggagaatcggcttgcggtcttctgcgcgttcttcacgttggcggcgaaactccaggtgtcggcgaaggaatgggcggttaccgcctcgccgttggtgaacttccagcctttcttcaacttgattgtgtacttggtggcatcctcgttcggggtgatactctcggcgacttcgagatgttgcttgccctttgcgtcgaagctcaccagaccttcgaacaggtatcgaataactctgccgccgcccatttcgttggtgtcgcttggaattagaccgttctgcggttcgctgttgttcactgaaatcagcgaggtgctatcggagccgttggaggctgtgtcatcgttggaagacgatccgcatgcggcgatcgacgtcagcatggcacccgccgcggccatggccagcagacgccggaacgtgttgttcttcatttcattctcctttaatgtcgacttttccgccgattatgtcgacgaaaaaacaataggacataatatgggagttttataaaattttcgtgtcatgtctcaatttgaaaacgaaccgctggcaggcgttggatatggacgttatcttcagctttctaggaatgcggggatggcctcggccgccgcatagcccgcgcggtacatgcgttccaaaccttcgaacgacttgctcaacgtgttcaggccgtacaggctttccggcgcgaggatgagcacgcggccgtcctgctcgtattccttggccagtgccacttcgtcgttgtacgtctgataacggttgagcagtttttgcgggtttcaatcgactttacgcggtctatcggaacattcgcgctcagcgatcaagcagcgattgcgctaattgcgcgatttgtgtggaagtgtcggaattggccagctcgataccaccgtccgcgtcttccggagagagtttgcccaacgattcgagcactacgccaagatggcgcacggtaccttcgttgccgtcgatgattgccgctgtgtcgggcagcagttcgcggaaatagtcgcggtaaaacacgaaatgcgtgcagccaagcactaccgaatcgatcgtcgacaaatcatactggtcgaaatactggtgcagcgtgtgcatcacaacatcgtgatcgtcgagttgtccgtgctcaacgatctccaccaaaccggggcagggttccggaaagatcgtatggtctgttttgaaacgatccatcagcacggcgaacttgcgttcccgcaacgtcaggggagtagctgcgacgatgacacgctgacgattgccatggcctcgatcgcacgccaccttcagcgctggttccatgccaatgatcggaatgtcgtatttgtcgcgcaactcgttggctgcggcggaagtggcggtattgcaagcgatgacaaccgctttcactccctgctccacgaaacgtttcacaatggcgtcggacagcttgcgtacctgttcaggtgatttggttccgtacggagcgttcgcggaatcgccaaaatacagcacgcgttcgttcggcatatcgcggcggatttcgcgcgccacggaaatcccgcccaaaccggaatcgaaaacgccgattggtgccgttgaagtcatacgtcctcccttgttccgcacgcaaacatactgcaacataatgcacacgtgttgcgtccaacttcttcaatagcctaccgcgtgtagagtgaatcggtatgagcattccaagcattgtttacaaagcacacgccaccggcaacgatttcgtggtgtatctggacgccgaaggcacgtacgagcctaccgccgatgaagtgcgattcctgtgcgaccgtcatttcggtatcggtggcgatggcttgatccgccttactcatccgcaggcggtgtccgatttgaacgacaagcagattgccgtttgtgctgccgacaatgcggattggttcatggactaccgcaacgcggatggttcgttggctgagatgtgcggcaacggcacgcgtgcgatcactctgttcgcgcaacggcagggtattgccggtcagccgggcggtgaaccgttccgtctcggcacccgtgccggtgtgaaggttctgacttcacttggcgatgtgccgactcttggcaaggacgtgttccaggttgagatgggttcatggaagcgtggcgatcttgatggatacgaagtgacgattcccggcacggccggttccgcacgcggcacgttcgtggacatgggcaatccgcatgtggtggccgtcatcgaagacgcgttctccagcctgccgacggtggaacagcttgatttggtgaccaagccggtggtcgcgccccgaatcgaaagcgaccagaatgttgagttcgtgcgcatcgacgagcaaagcgaaggcgacaacgagggcaacgccaccatgcgcgtcaacgaacgcggctgcggcgaaaccctgtcgtgcggaaccggcctgtgcgccaccgccatcacgttgcgtgccaaaaccggcatcgaccattggacgatcaccgtgcgtggcggcaccctgcgcgtcgacgtgaccgataacgacgtgaaactcaccggatcggccaccatcgtcggcaaaatcgaactgctgtaaggttttgcgcataacactgaaatttgcggatacgcaaaagaaagaagccggctgtttccagtcggcttctcttgtaggcgagtgaatccctactgctgattggacgttacttgacgtcaactgaacagcagggggccgtcttcgacgagaatgatcacaatcaatgtcacgatccataaggcatcgaccatcagatcgtaattaagacggtagtaggtgcgtacgccctcgcgcttggccggaatctcctgaaccaccgccgtggcatgagacaacgccatgaactgcacggtggtggagaacatcaggcacagacaccacgggcatagcgcgttgatcacaaacaacgactgcgaggtcagccaatacgaataagccagcgcggccaatccacccagccatgtgcacaacgcaaaccagcggggcacggcgaccttcgtcaaaccgatcaccgcgatcgttacgaacactgattccgcggcgatgccgaagaacgcattcgggaaactcaaaccggcgaacttcacaacctcagcctgccacgattccgcaaccgtggaacacgacatcacggcattcacatcacagctgagcttctgaccgggattgcgcgccaatttcagtgtctcggcggaaagcacgaacgatacgaccagcgctaccgccgaggcgatcagcatgactagatacgtccatgtcgcggtatgccgccaaccgcgcggcttcgtataatcatcgtcgagagtggcttcggcaacctgttcgccggaaaaatcgctcatcgtgcatccttgaatcaaaatacaaacgttgtcatcgcctagtttacgcggtattgtgccgagtcgcgccaaaaacagcttacgatggatacatgattcgcgtaggcactgcggcaccgcccgctgaaggttgggacattcactgccataccgttttttccgacggtacggaaacgccgcgtgcgttgttgcaggaagcgagagcattgcgattgcatggtgttgcgattgccgatcatgacacgacctccggttggcaggatgcgttggctgcttcgcgggaggtcagattgccgttgttacgcggtacggaaatcactgccgtcgatgagagcgtatccgtgcacatgctcgcattccaatatgatccgctgaacgccgatatcagcgagatgttcgcgtccacccgcgaggcgcgactgcgtagaaccaagcgcatggtcgaactgatggcgcaggattttccgattacgtgggatgatgtgctcgcgcaggtgcgtgaaggcaaacgcaccacgataggccggccccatatcgccgacgcattggtggctgccggcgtatatgaaacacgatccgacgctttcgccgatgcggtgagcgcaacgtcgaaatattacattcccacgccgtcgccgaccacgcacgacgtggtggccgcggtcaagggtgcgggcggggtggtggtgatcgcccacgccggagacccccggcgcaatcggacattactgaccgaccggcaaatcgaatctctcatcaccgaaggcttggacggtttggaagtgtggcatcgcggcaatccatcagaacagcgtgaacgtctgctcaccattgcgcgccggcacgacctgctggtgactggcggatccgattggcatggtaaaggcaagccgaacgcgctgggggagaacctcaccagcgacgaaacagttcaggaaatcatcaatcgaggcgtcctcttgagcaaagaatcgtcgaaggcgaaaataaaaaaccgaaacgcaatcatcgacgcgtaattgagatatgaaaccagaaacgagttgatcgcccaaaatggaaaagccaggcgcgaacgtctagcttttcttgttacgtcgaaaacgtgtgtttcagttcgaagctgaaatctggtgatgcgaacgggtcagaggttgccgaaaccgacggcgtgcttggtttcggaaccgatgatggcgtagccgagcgagcctgccggcaccacgatgcgacgacccttgtcgtccgtcagattgatggtcttgccgttctccacggcgtcggcgatggccgcgttgacctcatcggcgctctgttcggtgctgaaggtgacggtgcgggccacattctgaatgccgagttcaatatccatggatgctccttcgtgataatgcgcaatgcatgcgcacgtgtatgtacgggttatgtgcgcctattctacgcgtagcttctcatcggtggcgtcttccgcctcccactgattgatctgcgcctgcgctttctgcatggtcgcctcatctcgctccaacagtggaatgagtactgtcgcggcctcgctgtgcgatgcgggaatcgattcctcgttcgtatcgtcgttgtcgtcggccgtttccagcctgctgattaccatggtggaacttgacggcatggattcgtgccgttcttttgcggaatgttccggaatgaaagtgctgaccgaggtcgcctcatgttcattcgtattgccggacggtgcctgtgatggctgggttccggccggtgcgaacgcttccgtcgcgtcgttgacgattcccttcgtcttgcggaccggctgggagccggtcacgtcgaaatcgccggtcgcgtcgaaatcgccagtggaatcatccatatccacagcgtcaacatgacgttcgccggtcgtgtcggaatcattctgctgtgcggccgcgttacggcgacgctccgattcgttcagcaacgtgcctacggtgattgtgctcggcgggcgctgggggcgatccttggactcctgcttcgtttcagtttgcacgcgattcttcgctgtggcgacacccaactggtgggccaggcgttccacctgcgccttgaattgcataatcttggcgttgtctgccttgttcaaagcggaaataaaatcgccgacctgctccatctgcagccacagattggcccgcagcataatcagatcatccaaacgattgcccaacatgcgaccgtatgcggaaagcaaggcattgcggtggttctcgtcaagcttggcgaaaatccaagccaaatcgcgggcaggatcgttgacctgcatatcctgccaattcgtgaccgcggtgatggacgaaccggaaaaaagcacatcgccgtcacgcaacccgccatgcaccgggcaagtggagaacgaccacaggccgtcggtctcaagaatattcgcccaactagtggtgatctcctgcggaacatgaccagcctgacgcaggcgcttgatccaagcggtcagctgagcgcgaatctggccggtgacaaacgtcggatagcccgcttcctgcaggaagtcgggacgaaggcgatgaatcgcgcccaaagcggtgcctacgctggaacaatcatccaaagtcagcagctccaacggccgcgcctgacccacatggtgggtggccaccagcacggacgtatctccagtggcggaatgcttcaaatcgccgtttgaaaaagctactatgctatcgacggcaaaacccaatccgcctaattcgcgggcttgcgagagcgtctgcgcagcgcgcacgcgaccggcaagacgcttacggccttcaggcgtgttggatgcgaacacgtcatacagcttgcccgctgcatcctgaaccacggcatggtcgacgccgtacccctcgtcggtcgggttggtctgttcgctggcacgcgcgcccgcaatggcggcgttcggcatcgccgcactcgtcagggcagccatcataaatttgcttcgttcggtcacaattccaaccttaatacacaataggggcgaagcgttgccgacttgccagtaaaactgcaggtgaaccgcgggcaaatcgtcacatggcgatggcaatctgccacaatggaacgtatgagtgcaacagcggaagagattcttgacggattggatgaggcgcaaagggcggccgcaacggccgtggacggtccagtgcgcatcatcgcgggcgcgggcgcgggcaagacgcgaaccgttacccgcagaatcgcctatgcgtgcgccaccaaagcgtggaatccacgaagcacgatcgcagtcacattctccgtcaaagcggcggcggaaatgcgtagccgcctatcgaaactcgatgtcgcagccgacgtcaaagcagccaccttccactccgcggccctccatcagctacgccaagtgtggccggacgtatgcgaggggccgatgccgttcatttccagaaatccacgtgaactggtggagcgctcgctgcgccgcgtcaccaccttccaagtggatgacgacaccatacgtaacttgcaagcggaaatcaactggtgcaaaatctcactgatcgcaccggaagattacgcgcgggtttgcgcggcaacgcatcgacagccgccatcaggcctcgaaccaagccaattcgtagacgtatacaaagcgtatgaggcagaaaaaaccaaccgcaacgaaatcgatttcgacgatattctgctgatcgtttgtcatctgatggaaagcgacgaggaagtggcctcagctatccgctccaacatcagatggcttaccgtcgacgagtaccaggacgtttcgccattgcagcaccgtctgctcacccgatggctcggctcaaaccgcaatatttgcgtggtgggcgatccggcgcagaccatctactcgttcgcgggcgcaagtagctacagtctgctcaacttcgattcggaattcggtccgctcaccgctgacatcaatctgaacaacgactaccgttccacgccgcagatcgtcaactatgccaatcgtgtgcttgcggcatcgccgcagcgggccgattatctgaagctcagctctgaaaggagcaaaggacggagggtcgtggaaaccatatatggcagcgattgggaggaagcgcaaggtgtggcggcgcgcatccgcaaactggtggatgcgggggagtcgccggccgattgcgcgattctcaccagagtcaacgcgcagcagaaaatcctgtgcaaggcattggccgaacagcatttgagatatcgcgtgcgcagggatagcggatggcagaattccgcactttccgacgacacgcagaccagactggccatgttggaggcattgggcgtcggcgcggatctgagcggcgtgaccatttccactatccacgcgtccaaaggtttggaattcaagcacgtgttccttatcggctgctcggaaggactcataccgtatgggttgccgcaggatgacgacgtgcttgaggaggaacgccggctcatgtatgtggccgtgacgcgcgccgaagacacgcttgacgtctcatatgcgcgtacccgtgaaggcaatgagggtgaaagggcacgacgggtgtcgcgcttcttccgctgatactgcgaacggaagaagcgcgattactcggcgtcggtatcgttgttgctgccggattctgcggaatcgtcagagtcgctgccattggtatcggattcgccgcccttgtgctcttcctcgtcaagcagcttgctgagttcggcatcccaatcgatggtcatgccatcggcgtcgccaaggggctgcgacgccatatcggtggcattggaagcggcgaacgtcgtattttccgtgttttccgacgatccgttgttctgcgactgtgaggtgtcgtcatcgtcatcattcggcagttgcggcagtagatcgggatgtgaccatttcgcgtctcgtgcctgcgcgccttccgtagcgcagatgttatcccacaatgcggccgcttcacgcatgcgcttcgggcgtaattgcaagccgatcaggctttcgaaggtgcgttccgcgggacctccgatggcgcgctcgcggcggagcatctcacgaagctgttcgatatgcggaatatgagccatgccggcgcgccacactacggtgtctacccaaccctctaccaaggcgagcagattctccagcgatttcatggcctgctgttgttcaggcgtgtcagggaacgccaccttggtgatgttcaccgcgtcggccatggaatccggatcgacggactgcgcatcgcggatctgctcctccatggcgtccaaatcgatgctggtgccacgggcatacttgcccaacagcgcctcgaagcgtggcatcagccacggcacggaagcgtacaggcgcgaatgggcgagctcttgcagtgcaagatagctcattacttcgttcacgtcgatttccaaggatttcgcatattcgacgacattctgcacgatcaggcctccagccggattcttcagcaacgaaatgctttggtcgaaactgccgcgcacctcatgcgacaaatcgccggcggcacgtcccagctgcatggcgaacgacgtattgccgacgaaacgcatgagttttgccggatctttcatatcatcgggaatcggaatctgcaccggaccggcgaaaatgccggaaatttccgtatggaattcggaatcgccgaaacgctgtgacaaaatcgaagccagagcgtcgctcatcgactcggcaatcggggatgcaaactgcgcccaggaatcgatgcatccttccacccagcctgcgcgggtaagcacctgcgtttcgccttgcgcggggttgaattcgcaagcggtgtcaagccacagattcgcctcgctgatggctcgccgggccatctcgccgtactccgcgctcacactggtttccgatccttcgccattggcctgctgcaatgccaatgatttcgccagtttgacgttgattggaccttcctcggtgatgtgctggatgtctccgaaagtgttgagcccgcccgcagtgaacgcctgcatcatcgacctgacctcggccggcttgggaagcttgctcacatcctgactcatcaactggtcgcgcaactcttccggcatgttggaaaactggttccatgccatctcgccttgaattggtccgaaacaatcgataaaccattggcggatcgcgttctcgtccatgccggccctgccttttcctaagcgttttttcaagtttggttggttccatactatgttatgggaggtatgcccaagatgaaggaaacacgacgaattcacggcaaaaacacacgtagcggcgctccgggacgtgtcaaacgatggctgataggcgcggaaggttggctgtccgcgcgttcatggcgttatcttgcaggaccgttggtagcggtactgtgcgtattggtgttgattatgcccagcgcgtatgtggtgcaggtgcccggcccgacacagaatgtgctcggggaggtttccggcaagcaggtcatcgccgtttccggtgcgaaaacgtataaggattcaggccaactgctgttggtcacggtcaatgcttcaggcgtgccagggtacccggtgtcgaacgcgcaggcattggtggcgtgggccgattcgaaatccacggtgatgcctcaggaagcggtggttcctgttgggcagaccgcagaggaatacaagcagtccagcgacaaggagatgacgtcatcgcaggattccgccaccgcagcggcgaaaaagttcctggaagagcatggttatgacgtgtccggcatgaaggtgtccatgcatgtggacgacatcggcgggccgtcggcgggcatgatgtacacgcttggtctgatcgacaaggtgaccggtgaaaaactttctgggggtaagatcatcgcgggaacgggcacgatgaacgacaaaggtgaagtcggtgaaatcggaggcatccgtttgaagatgctcggagcgaaacgcgacggagcaacttggttccttgccccggaatccaattgttccagcgttgtggatcatattccggaaggtttgaacgtggtgaaggtgtccactttgcaggaggcgtacgatgcgctggttgccgtccgagacggcaagggtgcatccctgccgcaatgctccgcgggagagtgacgcattccgagatataagaaaaaacaatctcgcaaagtgagcaattccacggttcgtaacgtatatgttcgagcagtgttggtatattgacgaacgtgaatcaaacggcatctgataacgctgaagaattcggtttccacgccggcgacctggtacaggaatggctgtgggacgatgatgtggacgactcgatccgcgccaagatcgaggagctgaccggtgaagagctggtcgacgaggactatgattccgccgttgatggcgtgattatctggtggcgcgacggcgatgacgaagacgaactgtctgacaccatcgtcgatgcgtatgcggtcctcggcgacgatggtccattgtgggtgctcaccccgaagccggggcgcccgggcgcggcaagttcaagcaccgtgcagtccgccgcgaagaccgccggcatgaatgcagccacgccgctgaccgtcagcggtgactggaacggcatccgtctgcgcgcattcggcaaaggccgctga

SEQ ID NO: 866 - DNA, 18109 bp, Unknown
  gut microbiota DNA sequence
caatcgctgttgcagtatcttttaatatcattcgatattgctgacattgcaacaagaaatctcaatagaagattgcaaaaaagattggctatcatgcgatatgtgatagccaatctttttgcatttttgggggaatatcaatcgccatatatcgacaatatattgcgataatccaagaatatttgatgattagtcggtgatgtcggctttgtagaagttcacgtaggaacggctcggcgtcggaccgcgctgaccctgataatgcgagccggtgccttgcgaaccgtacggatgttcggcgggggagctgagctggaaaaagcacatctggccgatcttcatgcccggccacaacttcaccggcaatgtcgacacattcgacaattccaacgtgatatgaccctcgaaaccagggtcgatgaagcctgcggtggaatgtgtgagaatacccaagcggcccagtgagctcttgccttccaggcgggcggcaatcgtcggatcaagcttcacgtactcccacgtggaacccaatgcgaactcacccggatgcagaatccacggttcgcccggagccacctcgaactgctcggtcagctcgccctgattctcagccggatcgacatacgtgtacgcatgattgttgaacagacggaagaaacggtccaaacgcacgtcaatggaagcgggctgcaccatttccggggtccatggatcgagtgaaatatgaccttcggcctgcgcggcgagaatgtcgcgatcggacagcagcatcgaaactccttattgccaggcacgcgaatgtgccggtatggcgctcgccaacattcgaacgttcgcatggttgagcgtgcgaatgccggcaattgcgaaatgattattagctggctctagtctaacgcggtatcgctatatcgtggcttatatcgggttgtaacgattgccgtgtgcttggtacgcaaaatccgttgcatcggatttttctgcaggatttttctacgggattcttccgcaggatttcttacaggattcccggcgcgatatcgtgcgcggcaagccagtcgcgcaaatcgctgaactcgttgagactgaccgcatgatcgagtccacggtagcttttcgacgtgaggaacgtatgctcgtccagccaagcggcggttgcgaaaagctccggcatcggaatcacggtatcgttcttgccatagccgtagaacacaggaatattcaattccgcgacatgactgtcggccggcgcgctaccggcgacgattcccggcgcaaggaagccggaaagcgagatcgacgcggtgtaccgttccggatggacgcgcagcagatgaatcgccagcaaaccgccctgcgaaaaaccgatcggcactacagcgcgatcttcgggaacattgcgcgcaacccaatcgtcaatggcttgagcggcagcataagcgtctcgatccaggtcttcgccggacggcacgcaatcatggaaccacgaatacgcgccctgaccgaaaccgaattcaccggaaccagcctcctgcagcacgagcggcgcgcgcaatgaagcaaaatcgttataaggagccacgtaacgcatcatgtcggccaaatcggcctcattggagccccaaccgtgcaggcagaggaacagcgggcgtcgtggagccgcattgccgtccccgcgcgaatactgtacgtgcgtgacctgcagcggctcgccgaacctccctggaaccacctgcgattcacgcccgatcagaccggtcggggtgtttgggttgctggagtcgtgggaatcactggtctcgtgctcgcgtatttcactcatgcctccaatatacccgttccagcggggcaatcctcccagtcactggaaggattgggacgttgggcggcttgccagcggggtgattgttccagtgagtggcggtttctggactttgagtgagctgccagcgggcggattctcccactggctggaggaatccacccgttgagggcaaaaagaaaccccggtggagagaaaaccaccggggagagaaaggagagagaagaagaaagggttcaattgtcgggaactgctgtgggttcctggtcggctcttttgctgacatctcctatataaacagacgatgctgagtacatgtctggtgttttctgggaaatatctgagaatttcaattccctcatgttttagattgtggaatggcctccagtttgccgccttccacgccgtgttccgttcctacagttgtctcgtcccccacgtttccacagttcgtccgcagacaaactcgctgcggatcaccggctcacgccagcttgctgatcccatcagatcagttggatgctagatctgcgcgtcggcgtccacgctcatcacatacacgttgcgtcgcagctgcttggattgcgcgcgcgtaatgtcacccgcctcgtacatgtcttggatcacacccagctcgataccgtaactttcgcgcttcacctcttccgcctgcgcctgcgcctccgcgctcgtgcccacattcgggcgcgacctcagcgtagcctcgcctcgtcggtaatccagcagcagtgccgagcaatgttccgtattgtacgtgtcgcggcccatctcctcatacaggcggtcgatcacatgttcgatggcatccacctgcaccgcgcgggtgtgcgcgaacagctcgtcgtcgctgaacagcggggtagtgcggcgaatgcggctgttcacacgcttcaccaccgtgcccaaacgcctctgcaacgccctgaagcggcctttgactcgccagatggtgcgtccggaattatgttccgtttcgatatggcgcagagagctcatgatctggtcgagcaggcgctcgcatgcttcgatttccagatcgtgcgctgccttgtcgtcgttcgtcgtcgccttgactttcgccagtcgcgccttgacgtattccttctcccagttgagcgcgtcgatctgcagttgcatatacccttgcggatcgatttctccgatgcgctgcttcagtcgtgtgatacgtttcgtatacgagtcgatgatcatcagcaccgcacgacgattgtcgggtgtgactcgtcccgtcagttcctccacggtccgtcgcagcacttcgatggtgatttcggtcatttccacggaagtgtctttattgcgattcggcgccagcagcggcagcaggaagttggcgagcagcaaggttacgacgatcacgccacctgcgatgaagatcagttcgtcacgcatggggaaccacgcgcctcccgtaatggtgtacgggatcgtgaacatcaatgacagggtgatggtgcctttcggcccgccgaacgtcatgaccgcggccgaacgccaacgttgcgccgtcatcttgcgtcgcttgccggtgacggtatctcgcgcgagacgtagcatcaatgaaatccacaggaatcgcatgatgattaccactgcggaaaccgtaagaatcgcaaccagtagcagccaattgctgacttgcggatcgtcccagcttgcgctcatcgcattcggcagcaacatgccaagcagaatgaacaccgtgccgttgagcgtgaacgagaataccccccatacgcttgacgaaacaatgttggtgcgagccacattcgggccgatgccggtgcgatcgaaacggatgatcaaaccggccgtcaccaccgaaagaatgccggaaacatgcaccgcttccgcacccaaatacagaatgaacggcaggaacaattccatcaaaatacggcttgtggtcgtctcccagccgaaagatcgcaacgattcaaataacaggtcggcgaccatgcctactgccaagccgaaaatggcgccgccgaagaatgagaacacgaactgtgcggccgaatcgcccactgtaaacacgccactgacggccgccgcgatcgcgaactggaagccgacgatgccggacgcgtcgttgaatagcgattcgcctttaagcacgctggtttgacgttgcgtaagcgcggcttccttgccgagcgacgatacggcgaccgcgtcggtcggtccaagcgcggcgccgagcgccagtgccgcggcaaggggaattgcgggccatacggcatgcagtgcgaaaccaacggccaccatggttgcgatcgctagtccaattgccaatgaaagcgacaatgtaacggatttcagcagctcgcttttatcgatttcatgcgcttccaaatacagcagcggcgcgatgaacagcaccatgaacagttccggatcgagcgtgacgttcgggaaaaacggcaattgcgacgccagcgcacccaacgcgatctgcacgagcggtgtggaaaccttgggaatgaaacggctgaggaatgaagatagtacgacggcggcgataatacatacaatcaactcgaatgccgccaacgtgcctcctttgcgcgcattttccaaacccttccagcctaccaagaggtatttatgggcgtgtttcgtcttttgcttcacgcgagcaaccgtatagtggcgggtatgcagtggagtgacgacatggagctggcgattgaattggcccgcgaggccgccgcggaaggcgaggtaccggtcggtgccgtcgtgcttgacgctgggggagcggtgatcggcagcggccgtaatctgcgcgaggcgcacgccgatccgttggcgcacgccgaggtcaaggccatgacgcaggccgctcggtcgcttggtacgtggaatcttgccgattgcacgttgattgttaccttggagccgtgcccgatgtgcgccggcgcgtgcctgcaaacgcatgtcggacgaatcgtgttcggcgcgtgggatgccaagttgggtgcatgcggttcgatttgggacattcctcgcgacccgcatgtcggtcatgttccggaagttatcggcggcgttcgtgaatcggaatgcgcacgattgatgactgattttttcgctggaaaacgataattgcgattttgtagtcgcaaaaacgtaagaaatattgaaatgccaagtaaatcttggtaaagatgattgcgatttcaacggtaatgtttacgtaataatatttcttgcgattctatggtcgcaagaaatactttccgacagaaagaaacacgctcggcgacgtcaacaaatgaagcttgtcataccatcgaaggtgacaatacaaggcaatcgcaatatgtaaaggatgctgcaatgacgctcattcagaccttccatggcaacgctaccaacggtaccgaactcactgcggtctacgccgaacagccagccgcaaacgtggcgttcgcactcgtattccccggcaatgatctgccgcgactcgtgcattggggtcgcccgctcgcagccccggcaaccgtgatcgacatgttcgacgcgcaaatgccacagcgtgtttctggcgcactcgactacacctcatggccgagcgtgctgcccacgcaatccgaatcctggatcggcgcaacccgctttgatgtgcgtcgcgacggcgtggaactgttctgcaagttcgcagtcagcaacatcaccgccgaaaccgtggcggctggcaaaacctacgtcatgggcgaaaaagacggatacccgaactggagcgtggccgacgaacccaagcaaaccccaaccgtcaccgtcaccgccgaagacgaggaacagcatgtgaaactcatctggacctgcgaactcgacgaaaccggcctcatccgccagaacgccgaagtcgtgaacaccggcgaagaccagctcgaagtcggcaagatcgaactcgcattcaccgtgccggccgacgccaacgaaatcctcaccaccaccggccaccatctgcgcgaacgctccccgcagcgccaggacttcaccctcggccgcttcgccaaagcatccatggccggacgcccagacttcgatgccaccctgctgctcagcgtcggcgaaaaaggcttcggcttcacgcacggcaacgtctactccgcacacgtggcatggagcggtaacagcgtgctctccgcggaacgcctgccatacaccagcggcgtgatcggcggcggcgaagtactgttcggcggcgaaatcagcctcgccaatggagagtcctacaccactccatggctcatcggctcctatggcgaaggcctcaacgaagtcgcagcccgcttccacagctacattcgccgagtgcaccgtgactggcttgctgaacacaacatcgcgcccaagccgcgcccggtcattctcaacacatgggaagccgtctacttcaaccacgattatgacaccctcaccgcactcgccgacaaggccgtggaaagtggtgtggaacgcttcgtcgtggacgatggctggttcggctcccgccgcgacgacacctccggcctcggagattggcagatttcgcaggacgtgtggcccgacggcgacaagtcgctcaaggcgcttgccgattacgtgcacggcaagggactcgaattcggtctgtggttcgaaccggaaatggtcaaccctgattccgacctgttccgcgcacaccccgactgggtgttgaagcccaccgaaggccgtctgcccatgcaaggacgtacccagcaggtcgtggacctgaccaatccggacgcctacgactacatttacggcgcaatggacaagctcgtcggcgaactcggcatcgactacatcaagtgggatcacaacaaactcgtcaccgaagctgtctccccacgcaccggacgcccggcagtgcaccagcagacgctcgccgtatatcgcattttcactgatctgaaggccgcgcatccaggacttgaaatcgaaagctgctcttccggcggtggccgcgtggacctcggcatcctcgaagtggccgaccgcatttggggatccgactgcgtcgacccggtggaacgcgccgacatccagcgctacacctcgttgctcgtgccgccggaaatgatcggcgaacatgtgggcgcatccccggcgcactccacgcaccgcgccaccacgcaggaactgcgtatggccatggccttcttcggacacatgggcatcgaatggaacctgctcaaggaaccgcaggaagatatcgacaagctcgccgaatgggtcgccgaattcaagaagcatcgcgaatggttcgctgtcgacacagtcgtgcattccgacgcagccgatccggcagtgcgcttggacggtgtggtcatgcctaaccaagcggccgccatctaccgtttcacccagctcaccacctcgcagacctacccggccgcgccggtacgcctgcccggactcgaccctgacaaggtgtatgaggtgtcgccgcttgacgtgagcctcgacctcgccaagcaagacatcgccaacggacagagcccgctcggctggtggaaggccggaggcgtgaggatgaccggacgcgcgctcgccacgtacggcatccgcccgccggcactgcacccggcgcaagcagtccttttcaaggccgtgcttgcgcccgtcgagagcgccgaataagccgtaatcgcataacaaaaatcctccctgaaacaaaggggaggattttttgtattgcaagacaatcaatcgcaatcaatcgcaatcaatcagccaacatattgccgaattgcctgtgatgcggcagccttggcccacaaagcccaatcgtggtcgggaatttcaaaatccactggcgcggcctggctatgccgatacatgttgatgccgttacgcaagtcgtcaatgccgaatttcgcgatgaacgacgattctccggcgatcatgattttgtctggcatggcaagattggcgatggtcgccaccagggtgccgagacggaagcaggtgcggttcaccagattcgtcgcttgcggtttgttcgcgcgtgcgtcacgtgcgaaatcgtcgaatgatgcgggatgtccgatgatttgcgaatattccgccgcgatcgagttgtcggacaggcattgcgcgcatcccttgtgtccggaaacacaacgcggcccatccggatcgaccagaatatgcccgaccaaaccgtaacttttatccggacagcttaccagctcgccgttgaacgtcaacgaatagccgacgcccgcgccgaacgtcagcaccgcgaagctatccaatccaacgcccggtccaaacaggcaggcgtcaaccaccaacgaatcgatatcgttgtaaattccggtaggcaatccggtcgcctcacgaaccatgacggaaagttccacgggctgcgaccagtgcatgaacggtgcgaacgtcaccacggtaccgtcgacaatatgcccgccaagcgagattcccacagcgcacggtttcggccagcccgccatctccgcctcgtcggaacagtcggtcgtcagttgtttgatcagcgcgaccacggtctgcggggaagcgtcttcgatttccagatcatggcatccggtgatgatctgcccgattgcgttgaccgcaactgccgaaatatgcgtcgcgttgattttcatgccaacgaaagatcgcgcattcgcaatcacctgcaatccggtttgcgggcggccgcgacgttccgtattttctttctgcacgaaacctttcggcagtttgccggccttgccggacggcatcggcgtctcctcaatcacgcccgcataaatcagatcgctggtaattcgggaaacagcaccctgcgaaagtcctaaaatctgcgccaacgtaatgcgtgaaatcggaccatatttcatgatgcaagccgcgactttatgggtatattccgagccttcaaaccactgtggcagaggtgaaaccgccatctgaaccatccttcgtgctcccgttcgcgcacatcgtgcgtcaaattactttctcagagtaacaaaatctcgtcgtttttgttttccgccccgcacaggcgcgctgagttgggaatgaaaaccgcccccctctataattctcagtaacggtggtgtggtaaggaagccgctccaccgtaatagagaaaaaatacaaaggagtcgagaatgaaacctgattccaccactagtgtaggtaaattcaggaggattgtataccgcgctctcacggccacatgcgcaatcgcgttgacggccggccttgcaggttgcggcaacagcaccgctggaaccgtcactttggatttcttccaattcaaagccgaagcagcggactggttcaccgcaaaagcaaaggaatttgagaaaacccatcccaacatcaaagtcaacgtcaacaattcgtccgacgcaaccactgatttgcgtacgcgactcgtgaaaaatcgtgaacccgacgtcatcaccatcaatggcgacattaatttcggcatgctcgccgaagcgggtgttttccacgatttcactgacgatgacatcgtcgacgaactcaatccaggcatggtgaacatcgccaagagccttgtgcaaaccaacgacgaatccaagaagcgcctgtacggcctgccgtatgcgggcaacgcgtccggctacatcatcaacgccgacgtgtgggaggaagcgggcgaggatcccgacaacccgccgcagacatggagcgaattcatcgacctgctgcaacgctttaagagcaagggcattgtaccgatcgaagcgagcaccgccgatccgtggacactccaggcgccgctggcgtcactcaactccacgctggtaccggaatccgaatatctttccctcaaagacggatcgaagaaattctccgacctgtggggcactgtcagcgatcagctggtcgagatctaccagaactacacgcagaagaatccggccgtcacttaccagcaggccacgcaggatctggccgcaggcaaagccgcgattctgccactcggcacctacgcgattccgcagatccgactcatcaacagcgacgccaacctgcgtttcgcgcaaatgccggcaactgatgatgccaaagaacagcagctcaccgcaggcgatgacgtgatcctgaccatgggtgcgcataccaagcatgagaaggaagcgcgcgaattcatcgacttcctgatgaacgacgaaaacatcaaggactactccaagcagcagtccgcatttaccccctacaaagacacgtatgtgggcgatgaagcgctgaacggtgtgcttgacttctaccaggcgggcaaactggccgacttctgcgaccattacgtgccagccagcatcaacctcgcaggcttcctgcagacgctggttcagtcgggcaacaccgaaaaattcctgaacagcgtgcaatccgaatatgacaagatcgaagccagaaacttcaggtgagaggaggaacggacatgactaccgcacatactgcaaatactgcgaagaactcggcagaaaattccaagaataaggtttcgaaatattccaagcgcaaggtcgatccggcattttattggatgaccgttccggctgtgattctggtgtccatcttcctgtattggccgttcctgcagggcgcggcatactcgttcaccaattcgcagggttatggtgatttcaaattcatcggattgaagaattatattgcgatgttccaggattctcgcgtcggtcacgcgtacctgttcactattctcatcgcaattttgattacgatcggcacgaattttcttggcatgttccttgcggtgctgctgaattcgaaaatcgcgttcaaaaacggattccgtgcgatcttcttcattccgtacaccttgtcggtgttggtgatcggctatgtgttcaagtacattttcatgacgccgctgccggcgctcggtcaggcgctgcatattgattggctgtcgacgtcaatgatttccaatccggatttggcatggttcccgattgtgttcctgtcgatctggcagggcgtggcctactccacgctgctgtatttggctggactacagaccatcgacaacgagatttatgaggcggctgcgatcgatggcgtgagcgcttggcagaacttctggcagatcaccttcccgttgatcggcccgttcttcaccatcaacatggtgttgagcctcaagaattcgctcggcgcgttcgaccagatcatggcattgaccaagggcggcccggattccaagaccgaaaccgtctcgtatctgatcttccagaacggccttggcaatggcgaatactcctaccagatggcgaacgcggtcacgttcttcatcgtgctggcaatcctggccttcgtgcagctgaagttcttcagcggcaaggagaaggtctgagcaagggtctgaaagtctgaaggtaaagaggaaatatcatgactagcgcaactgttgcaaagactgcagccaagactactcaatcgcaggcaaagccggagaaaatccgcagggatcataaggtcaactggtggctgaccgcggctgtggccgtgttgagccttaccgtgctcgtgccgttgtatttcgctgtggtcaccgcgttgaagactccgagcgaggctggtacgttcagcttgccgaccacatgggaatggcataatttcgccgatgcgtggaataaggtgaactatccgaaggccgcgcttaattccgcaatcatcaccgtgtgcgcggtggtgttgacgctgctgacgaacacgttcgtcgcgtatgctgtggcacgaaatatggataagcgattcttccgcttcttgtattacttcttccttgcgatgatgttcgtgccgttcacggtgatcatgctgccgatcgcgaaggaaatgggttcgctgcatcttgataatcagcttggtctgattattctgtacacgattcttggcatcggcaccaacctgtttattgcgattggttttattcgttcgattccgatttcgttggaagaggcggctcgtatcgacggtgcttccacctggcgtattttctggacaatcattttcccgctgatgggtccgattaatgccacgattgcgattttgaccgcactgtgggcttggaacgacttcctgctgccgttgatcacgctgactgatcagagcaatcagacgattccgctcgcacagtacgtgttccaaagccagttcacgtcgaactatccgatggccttcgcgtcctatctgatggccatggctccggtcctcatcgtctacatcttcgcccagaagtgggtcgtcggtggagtgatgaggggagccgttaagtgaacagcccagtggtctgttcataggctctccctgagcgatccgataggcgagtgaaggcagggacaacgcggccgtaggccgtccgttcaggaagtaacacttcaccgctctgagcgggactggcctatcccactccccagcgcgggacgttccatttccctttctggaacgtcccgcgtttttatttttgcggattggtttttcgcgtccgtaagaagcgtattcttttcttgctttgcacaactcgccgcgggaaagaaagaaaaacagggttgcataccataggggagtaggcaaaatcgatcttctgcatgaagctgacatgagctggaaacgggcagagtcagtcacgaaagatcgaacgaaaatccaacaaacgtcaagcaaaggagctccacgacatgacgaatttcaatcgttccacccttcccgacaccgtgcgttccaacggcgcgaccccgaacccgtggtgggccaacgcggtggtgtatcaggtgtatcctcgttccttccaagacacgaacggcgacggcatcggcgatctgaagggcatcaccagccgtcttgactatctggccgatcttggcgtggacgtgctgtggctctccccggtgtacaagtccccgcaggacgacaacggctacgacatctccgactaccaggacatcgacccgctgttcggcacgctcgaggacatggacgagctgctcgccgaggctcacaagcgcggcctgaagatcgtgatggacctcgtcgtgaaccacacctccgacgagcacgcctggttccaggcctcccgtgacaagaacgatccgcacgccgactggtattggtggcgtcccgccaggccgggccacgagccgggcactccgggcgccgagccgaaccagtggggctcctacttcggcggctccgcatgggagtacgacccgaagcgcggcgaatacttcttccaccagtactccaagaagcagccggatttgaattgggagaatccggaagtgcgcaaggccgtctacaagatgatgaattggtggatggatcgcggcattgacggcttccgtatggatgtgatcacgcaggtttcgaagactgttgataagaacggcaagctgccgggagaagacggctgcgagattgaggattatccggttggtgaggaaggctattccagcccgttcccatggtgctccgacggtccgcgcatcgacgagttccttgccgaaatgcgccgcgaagtgttcgaaggccgcgaaggctacatgaacgtcggcgaagcgccgggcatcactccggcacgcaacgagcatgtcaccgatccgaagaacggcgaacttgacatgctgttcctcttcgaccacgtgggcatcgaccaggaaggttccaagtggaacaccgtgccgttcgaagtcaagaatctgcgcgcccgcctcgccgaccagcaggaggctgtgaagaacgccggctgggccagcctgttcttctgcaaccatgatcagccgcgcgtcgtctcccgttggggcaatgacacggaccgtgagtcgcgcgagctgagcgccaaggcgttcggcatgctgctgcacatgcaccgcggcaccccgtacatttacgagggcgaggaactgggcatgaccaacgcacacttcaccacgctcgagcagtatcgcgatctggaatccatcaacgcctaccgccagcgcgtggaagaagcaaaatgccagtccgcagaatcgatgatggcggcgctcgcgctcatcggacgcgacaacgcacgcacgccgatgcagtgggatgcttccaggtatgcaggtttcaccgcgccggacgcggcgacggaaccgtggatcggtgtcaatccgaatcatgtcgagatcaacgcagccgaggaattcgacgatcccggatccgtgtacacgttctacaagaagctcatcgccatgcgccacaacaacgcgaccatcgcgacgggcgaatggaatctggtcgcggcagacagcgagcaggtgtattccttcacccgtaccagcggcgacgacacgattctcgtcatcgtcaatctcactgataggacggcgcaggtgcctgctgaggtcgcgcaactgcttgaggatggcgtgggcgagtcgcaggtactgctcagcacctatgatgccgtgcatagcgtgaagtcggtcgctcgcggcgagcttgctcgctgggagggggtcgtgatccagctctgatcgatctttcctataaactctctgcaaaaagcgttcgtgcgattcatcacgggatcgtacgaacgctttttctttatttgtattgtgatttatcagattatgtattgcgattattcctgattgcttgtgattacttttcgcaagcaatctcacttttcatcgcgaaagccgcatgataaggcagtttcggcagacgtacgcttacaataacgctcatggaacaaaacgaggttctcaaagcattgcagcgcgatcacgcagctgaactgaaactagccgccgaacgactcaagggcactgcgcgccacacggaaatcattccgtccaaggtgctgtccgacatgaccggacatgagattctgctcaagcctgagaatctccaggtcaccggatcgttcaagattcgcggcgcctacaacaagatcgcatccctgagtgatgagcagctggctcgcggcattgtcaccgcttccgcgggcaaccatgcgcagggcgtggcctatgcggctcgcgaacgtggtgcgaaggcaacgatctgcatgccgcagatcactccgccgctgaaggttgacgccaccaaggcgtacggcgcagacgtggtgctgtacggcgaggtgttcgacgaatccgcagcccgcgcccaggaattgagcgacaccgaaggcatgatctacgtgccgccattcgacgattacgaggtgctgtgcggtcagggcaccatcggccttgaaatcctcgaagacgtgccgaacgtcaccgacgtggtcgtgccgctgggcggtggcggtcttggtgccggtgtggcgctcgccatcaagacgttcaagccggaagtgcgcgtgatcggcgcgattccggagggtagcccagcatggaagaattcgctggccgcaggtcatgtggttgccgccgaccaggtgcgcacgtccgccgagggtgtcgccgtgaagcgtccgggcgatctcacgttcgcgctgctcaacgaattccttgacgacatcgtcaccgtgaccgagcgtgacatcaacgagatgatcctgctcatgctcgaaaagcacaagctggtggttgaggctgccggcgctgtgtctctggctgcgctcgagcacctcaacctgcgctcgcgcaagttcgccgaggcgaagggtccgcatgtggtggtgccgatcatgtctggcggtaatgaagacactgtgtccattggcgctgtgattcagaagggtatgatcacgcgtggccgcatcatgcatttcgaggtcgagctgcccgataccccgggacagctggtgaaggtcgccacattgctggccgagcagcgtgcgaacgttatcgcgctggatcacgaccagttcaaggcgtccagccattacgcgaatgccgtggctttgggcgtgacggttgaaacgaatggtcccgaccacattgatcgtgtgctcgaggcattgcgggaagccggtttccagccgaagcgcatttactgatttcagtaccgtttttcagtatttgataaccaataagggtcttggaaagccttgcgatgatttctgattgtcgcaaagcaatccaagacccttttgttgtttatattgcttgactagccgttacgtcattcggatttttgtcgttgaaaaattcggattttggtaacgaccaaccaaaaccggtgtaattccaacgatttgtgccggtactgcaagacgtacgagaaaacgtatttactgtgcggcttactgctcggcggtgatggtttcgtcgacgagctgcggcagggcgacggcgatatcgtcgtggataagccggtcggccaaccgatcgtattgcgtgcgtcccatgttcataatggtgatcggcacgcccgcctctgcggctatgggcacgatgcttgccgcgggcatgacttccagcgtggatccgatgacccacagttcgtcggcctgcgttgcgagtcgatatgatttttcgagcgcgccgtccggcagcgcctcgccgaagtagaccacgtcggttttgatgagtccgttgcatggcatgttgccgctgtagggcagtctgcgatggcagtgcggatcgggttcgttgtcgagattcgccatgatgtcggcggtgtcatattttgcatggcacttcatgcagtgcgaggtaccgatggtgccatgcagattgacgatgacgtcgctgctattgccggctttttcgtgcagcgcgtcgaaattctgtgtggcgagcagtgttagcagtccagcctgttccagtttgacgagcgctttatgtgcggtgcccggctgtgcggtccacacgggtgattccttctgccaacgccaggaatacttgcgatcttcctcgtggcaaaggaatgcttcgatgtcatacactttcgtttgttcagggtgcttagtccagacgccgtccggtccacggaagtcgggaatacctgcggacgtggaaatccccgcccccgtcaatactgcgatctttttgctcatatcttaggtatagccgcacgacgtaacttctgatgtttcacgtgaaacagggaacatcgggcaatcaaattcgagaaaagcaatcttaataatcatgcatggaaaggaatgagaggtgcattatgactactgatattgcacaaaacattgcagatgatggcgctgatgcggccgagactgccgaaacgaccgagacggttacggcgatcggggcaatcgatatcgaatcgatggtggcgccgccgtcgccgacacagcttgccccgattccgacgccgcgagcagactaagttcttcccgcacactgatgagtttccggaaggctgccaagtgatttccgacttggaccaggatgatttcggatatcccgtgaatatcgagcaggttacatacgtgacccgtcagctggctgatggcagcagtgttgatttgccgatgtgggtgttcacgcctggcgttgacaatatgcccgagggcgcaatgccggaaggtggttggccggtgattgtgtttgtgcgcggttcggcattccacgagcagaatgtgaccgattactcgaattatttcgtgcgtattgccgagcaggggtatgtggtggctgcgctgaagtatcgtcacagcgatattgcgccgttccccgcgcagatgcaggattgcaagactgcggtgcgtttcatgcgcaagaatgccgaacgcttccattgcaacaaggatcgtattgcgctgtggggcgattcttcgggcggtcatacggtgttgatggctgggttcactggcaatcgcgcgcctgatacggatgcctatgccgaggaaagcgccgaagtgaacgcgatcgtggattggcatggccctactgatttcgcgaagatgaacttttatccgagttcgcagaaccacagtgatccgcagtgcccggaaggtgtggtgattggtggcggtgacgtgcttgaacatccggatttgagcgcccaggcttcgcctatgacttatctgagtgccgatatgcccactccgtcaacgctgatcatgcatggtggccgcgatcagttggtgccgttcaatcagagttgtcgcctgtatgccacgttgaaagcgcttggcaaggatgtgacgttctacaagctcgataacgcctgccatgcctgttacggattccgtagcgctcgcgcgttgcgtttggtgttcgattggctttccgatcgtctgtgacttgctgtgat

SEQ ID NO: 867 - DNA, 21882 bp, Unknown
  gut microbiota DNA sequence
tgcgatgctcgtcaagcacaaacacgtacagcagtggcgcggtcgcgatatatggctgcccgccgatttcggcaagacgcttctttgcggccggatcggtgatgcggattgccgaccagtcgttcaggaattggctgcttgcggcatgctgggccacggtttcgagagtttcgacgatatcgtcgctcagcggcttcggcttgaatttgcggatggaacgacgctccagcagagtgtcgacagttgcattatgcagaatattactcatgttgactatttatatcccatccgcgtaattgcgcaagtattttcgcccgcaagcgcattccttccaatcgcagtttcgtgcagtttcgtgcggttccaaccgcagcttcaattgcagatctgaatcgcacgcttcgaaatatggaagttggagtgggattgtttgcggatctggcgaaatttgcgcttatcggcaaatctagcggattccacggtttcagcggattcggcgcgattgacgggagtggcggcgatcgaccagcgcctgcgatccgcggtcggatagttgcgataccagcgcgccgagtcctgcggaagccacgccgaacacgagattcagcgccagttccttgcgtttgtcggtggtgccgtccggcaacacggctttgcggccgaccgacttgcgccatgccagttcgaacagtttgccgaacacgagtccggccagcgtgggggcggccaccttgaacatcttgtcgcaaagatcgtcgggatcgttgattcgctgttcgcgcagggcattcactttctcgtcgacgttatgcagcgacgctacgatgcggtctgcgctggattccgggtcaggcatttcactcatgatttccagtgtagaccgtgccgtcggatttcggttggatttcgccggcgcatgcgtgcgttgcgaagcgcttaagacacgtggtggaagattgctggtgaaacgcttttcgtcggctagagtaggagtatgacagatactcaagtcggaagcaaggatgcttcttcaaccgcgcccggccgcctggtactgctgcgccatggccagactgtgtggagcgaatcgggccagcataccggccgaaccaatattccgttgaccgataccggttgcgagcaggctcgtgcggcgggcgagcgtcttcgtgaggcgttccccaatggtttcgaccaaggctgcatgttcgcaagccccctgcgtcgcgcccagcagaccgcgcaactggctggttatggcgatttcaaagtgcttgacgagattgcggaatgggattacggccgtgccgaagggcgtacacgccaggaggtgagcgaggctggaggcttccagtgggatgtatggcgcgacggtccgcgttcccttcccgaatcgttggagggcgactgggttgagacgttgccaagcggcgagcaggttccggtgcacaatggccctggcgagacggttgaggaggccgccgcgcgcacccgcgatgcgatcgacgcggtgatgccgctgctcaatgccggtcatgacgtgctgttggtggcgcacgcgcatgtgttgcgcatcctcacctcgcagtggctggacgtcgatccgcatttcgcgcgtttgctgcgcctcgacaccgcgcattattgcgtgctgagccaatataagggagacaacgttatcgagcattggaattgctaggtgcgttgcgctgggctgaacgtcggtagtttgacatcgtttacacaccgccgacgtttttttgttgccgtacggcgtcaggttcgcgattcactgcgattgttgccgtgtgatatggagggtgtgtcgcaaacggtttcataaagacagtgtgatgaaaaccgttgaaaataaagtattttgagaaaaacctgcgatcgtaaaatcactctaaaaatggtttttcttgcttacgtttgcaaaaacgggagaaatgcggcacaatagtgcatgtcaggaatcgtgaggaagcgatttcacaggatgttgaccagcggggtgctgggaaacaggaatggaagagaaaggttcgatgatgaatcgtactatcaaggcagcagttggaatggtcgccatcgcggcgatgtccgtaggcacgttgggcgcttgcggatcgagctccagctccgacgacggcaagggcaaggtctattacctgaacttcaagccggaatccaacgacgaatggcagaagctggccaaggattacaccaaggaaaccggtgtcgaggtcaaggtccagactgctgcttccggcacctacgagcagaccctgaagtccgagatcgccaagtccgaagccccgaccctgttccaggtcaatggtccggtcggctatcagaactggaagtcctacactgatgacatgacggacaccgagccgtacaagcagctcatcaacaaggacgtcgccctcaaggatgggagcaaggtcgttggcgttccgtacgctatggaaacctatggtctgatttacaacaaggatctgctggccaagtacatcgccaccgatggcgccaagatcaaggacgtcaaggatatcgacaatttcgataccctgaaggccgtggctgatgacatccaggccaagaaggaccagctcggagtcaagggcgcattcacttccgccggtttcgattccagctccgattggcgttttaagacccatctggccaacctgccgctgtactacgagttcaaggatgataacatcaccaagcagccggagaccgtcaagggtacctatctgccggagtataagaacatcttcgacctgtacctgcaggattccaccaccgagccgacccagctgagctccaagaccggtgatgacgccacctccgagttctccctcggcgaggccgtgttctatcagaacggcacttgggcatggaccgatctgcagaagaacggcatgaaggccgagtccatcggcatgctcccgatctacacgggcgtcaagggcgaggagaaccagggtctggccactggctccgagaactactggtgcattaactccaaggcttccgacgccgataagcaggccaccaaggacttcctgaagtgggtcgtcaccagcaagaccggcatcgagtccctgtccagcgccatgggcttcaccactccgttcaagtccttcagcgatgtcaagtccgacaatccgctggtgcaggccgctgttgaagatcagaactccggcaagaccgcagtctcctggaacttcaccatgatgccgtccgaagagtggaagaaccagctcggttccgccctcctcgagtatgcgcagggcaccggcgactggaatgccgtcaagaccgcatttgtggacggttggaagaccgaatacgacgcggctcactgatcgcatcggaaaactaatcaaaatcgcgcatgacgaatcggtccgcgcatcgcgtagcgcggaccgctggaaataccatcagcgcgcgatcgatcgaataatcgaataactgcataactgaataattgaacaagcaacgagctgcaatcggaagtcttcctttcctctcctgattgcagttcgtttttttatgcggcgacgtacggttgtaggacacgccgtgcgtcggagggattgcgttgcagtaatgaaagcgctatcattgttaataacaagcagaaaagatgttgatttaaaaatgttcttatctgtagtttgaagaaatgtaaccgctatcattttgcaacgatgcgaacgaaagtgaaaacatatggtgcaacaagaaattgatactaccgatccggcgttgtggtggaagcaggccgtggtctaccaggtgtacccgcgttccttcaaggactcccgcggttcgggcctgggcagcatcgcaggcgtcaccgagaagatcgactacctcgccgaactcggcgtggatgccatctggctgagcccgttctacccgtcccagcttgccgacggcggctacgacgtggacgactaccgcaacgtcgacccgaagctcggcaccatggacgatttcgacgagctcgccaaggccgcccacgagcacggcatcaaggtcgtggtcgacatcgtgccgaaccacagctccaacctgcacgaatggttcaaggccgccctcgcggccgccccaggctccccggaacgcgaccgttacatcttccgcgacggcaagggcccgaacggcgaccagccgccgactgattggatcgcaagcttcggcggtccggcgtggacgcgcgttcctgacggccagtggtatctgcacatgttcaccaaggagcagccggactggaactggaagaaccccgaggtgcgcgccgacttcatcaagacgctgcgcttctggctcgaccatggtgcggacggcttccgcgtggacgtggcgcacggcctcgccaaggatcttgaccgcgacgacctcgaaagctacaaggtctgcgagcatgtgcttccttcggacgggtcgcacccgttgtatgaccgtgatgaggtgcatgacatctaccgcgagtggcgcaaggtgttcaacgagtacaatccgccggcattcgccgtggccgaagcctgggtcaatccggatcgccagcatctgtacgcttcgaccgaagagctcggacaggtgttcaacttcgagttcgccaagaaggactggattcgcgacgacatgcacctggccatcgaggaaggcttggaaagcgcggaacgttccggctcctccgcgacttgggtgatgagcaaccacgacgtgcctcgtcacgccagccgttatggattgccgcaggttccagcctcgtcgcatcatcagctggccaaggattggctgctgcgcgacggtaccacctatgaggagaaccgcgaattgggcgccaagcgcgcccgtgccgcgattcttatggaacttgccttgcctggatccacctacatttatcagggtgaggaactgggactgccggaagtcgcggatattccttgggatgagctggaagatcccaccgcgttcaacagcgtgcgcgagcaaatcgaaaaaggccgtgacggctgccgtgtgccgctgccctgggtcgccgcagacgcaccgaagctcgatgatcccgatgacgaattcggccacgacggttctttcggtttctctcccgcgggcgccgagcatgatccacacctaccacagccgaagtggtacaaggatttcgccgtcgatgtggaggacgccgacccgaattccatgctgaacctgtatcgcaaggcgctgtcgttgaggcataacctgatgccgcaggacaccgaactgcagtggctggacgaggatcgtccctccgacgtgcgggacggcgcggatggacaatgcggcggagtcatcgcctacagtcgttccaacggttgggcgagcatcaccaatttcagcgaacgtccggccgaactaccgcaaggcgatgtcatccttgcgtcgggtgaactcaccgaggatggccgattgccgcaggacaccaccgtctggctccagctataacgcggcggccggaagcaatgccggcgcacgtacaaatagctaccacgaaaatcagcaagtccaacgaataacaacaaatccaacgaaggagataagcaatgaagcagggaatcatcaccaaaacgtgcgcggtcgccgcggcgttggccatgggcgtatcgttggcggcttgcggcggcggcagcagcgccgattccgacaagggccatgtgtatttcatgaacaacaagtcggaagtcgtggaccaatacaagcagctcgccgaaatgtataccgaaaaaaccggtgtgcaggtggacgtgcagaccggtgcgtccggcacatacgatgcgaccatgagctcggagctggccaagtccaacgcgccgaccatgttcaacatctccggtttcgaccagttcgcaaaatatcagaagtattgcgagccattgcaggacaccgaagcgtacaaactgctcaccgatgacggcaaggcctactcctacaccattgatggcgattcgttcacgctgccatacgcggctgaatggtacggcatcatctacaacaagaagatcatcaacgattacgccagcaaggattacgcggtgatcaagagcgccgacgacatcaaggattacaagacgctcaaggccgtggccgagtccatcaacgagcacaaggacgatctcggcgtcgacggcgcgttcgcgacgccaggtctggatgcctccgacacataccgtttctccgcgcatatggggcgcatcccgctgtactacgagtacaaggacatgaacaccacgttctccaagaccatcaagggcacctacttggataactacaaggatctgttcgatctcgagctggagaccagcccgactgatccgagcctggtcagctcgaagacgtacgacgatgtcacttccgaattcgcgctcggccaggtggcgttctatccgaacggtgtctgggcctacacgcagatcaagggtaacgaagtagcggacgacgatcttggcatgctgccgtattacatgggcatcaagggcgaggaggagagcggtcccgcaggcgtgtatgacgccagctgggcggtgaacaagaacgcttccgacaaagacaagcaggccacgctcgacttcatcaagtggatggtcaccgatgacgaggccaagaagatcctctcccaggatatgggcttctccgtaccgttcaccacattcgatggcgatgagttccagccggataatccgctgaccaagatcgctcgctcctacgctgccgacggcaagaccgaggtgcgcagcttcaccgttccggatcagcagtggcaggacgacgtcgccgcggcgcttatcgaatacgcgcagggcaccggcgattggagcaaggtgaagagcgcctacgtcgacggctgggccaccgaatggaacaacaacgaggaatcgttgggatccgttcctcaagcgcagaaattcgatcagcaggggtgagatcgcaccgctgattgaagccctgcaaggcttgcgatgaaaagagcggcctgtgtgcatgatttggttcatgcatacaggccgctttcgcgttttggcggctttacgtttttccgctgcctctcgatttattcagctgccgtcgatttatgacgccgatttattccgccgtcgccgccccgctgtcaatgcggcttgtggtgttgcgcaacaccagcaaaggatcctgcagttcatgcggatgttcaagaggttcgttacgtaggagctgcagcacttttctaccggctatgcgccctagctcgattggctcctggcgaatggtggaaagatccgctgcctgtgcgatttcggcgtcgtcaaaaccgagcactgaaatgtcttccggcacattcagctgctgcttgcgtagttccttgaccagtgcgatggcgacttggtcggtttccacgcagacggcggtggggcgttccggaagtgacagcagtttcgcggtcagttgcgaggcgaggtcggatttgctcagcggcgcatcgtgcgcgtcggccgtaagcaggctgaatgtgattccatcggtggcgttggcctgtgcggcatccgcgaacgcctgggtgcgttggctggtgttgtagaccatgtcggccggaatgtagtcgctgcagaacgcgatgttggtatgccccagagagcgcagcaatcgtacggccatggtcatcgcactggagttgtcgatgctgacggaggcgtcgaaataacccgattccgtaggaacgttgacgcccacggtcggcaggtctatggcttggagctggtcgcgcatggcgggcatgagctggaatgaggaaatgatgatggcgtccgcgttgcggctttttggcagctgggagaaaaaccggtccagttcgctgcggtcggtgatgaaggccggtgtgacgtcatagccgaccggcgcgagctcctcgtagaccccttggagcactccggaattgaaccactcgttgagtttgcccgagaccaggaggatgacgcgcatggtttttccggatgctagggcggaagcgctttttgagagtgtgaagttgagttgatccgctgcccgctgaactttgatgcgggtctcttctgtgacgttggtcgcgccacgaagtgctcgggaaacggtggcttgcgacactcctgccaattcggctacgttggcgatggtcggtttggccatgtgtctcctttgatgaaaatgattaacgcttccatgatactaaaagccctgattttagacgaaaacacgctgtagattggtgaatttgtacaacagaaatgaaagcgctatcatttacggtagtcgaaagacgaatataaagattcgattacaagatagcgtaaggcaacggtagcctgtaaacgctgtcacgaagtggtgaaattcaacatggcagcaaaaacagacgctatgcgaacggtgctcgttcggatcgtttagcgatgcagacgagccgtagtggaacgcacgatcagctgcgccgggaacgttttgaacggttcgtcaagcgggcgctcctcaatgagatcgagcgtcatgcgggccgcctcctgcgccatttcgacaggcgtctggcgcacggtggtcaggccgaggtcgcgcgcgtaaatgctgtcgtcgtagccgatgatggaaatatcgttcggcacggtgaatccgttgcgttccagctggaacagcagcggcaccgcgatgccgtcttcctggcaggcgatcgcggtcggcatatggtcgaggctgagcagctgcgtcacgactttgctgatgttgttcttgctctcgtcggtgacgagcacgcgcggttcgacgccgttggcttggcagcacaccatgaacgattcgaaacgtccctgcacgctgaagtggagcgtcacttcgcggttggtgcgaatgtaggcgatgtcacggtggccgagcgtcataagatggcgtgcggcaagctcggatccctgcttgtcgtcgatgcgcacggccgcgctgaaaccgcgctcttccggcagactcgagttgatgccgatgattggcacattgacggacttgagctgatcgatctcgttggcgtcgatatcgaaggaaatgacgattaccgcgtcgacgttgcggcgcaccggcagcatgtcgaagaattcacgacgttcctcgatgctcgacatctggtagatggaaatgtcgtatccctcgtcgtggaagatctggttgaggccttcgatgatggatgagctgaaccacaggttgagccgtccggaaaccaggaccgcgatgcgtagcgcgcgaccggttttcaacgcggctgcggaacgtgaaatggagaagttcagctcgtccgcggctttcatcaccttgtctcgggtggctttcgacacgagatccgggcgtgtgaaggaacgcgaaaccgttgaaatggatacgtgcgcaagctgcgctacatcttgaatactgcttttcatgtttttccttgtgactgcttacgttctaacatactgtattgcgacatctttgcaatacgtgcattacaaacgttttcattatagcagaagaggcttaaaatgcttgatattgcaacgagtttttataatcaaaaacatggcaacgttggtaaatttgcgtctcaagacatgtaaaaatgacaacgtttgacatttcgtgtcatgccgtttatcatgacgagtgtaaataccggaaaggtggagaacagagcagtgatccgctgactcggccaacaattgcaggaattccgcaccgcggtgccgcggtgctcggaatggagaaggaagaaagcaggcaagctatgatcagcatggctggcaaggcgatacgcaaatggtgggcgctgtttgcgctgccaacgttcgccgcattcattattggattcgtcgttccattcatcatgggcgtctacctgagcttttgcaagttcactacggttaccgacgccgagttcgtagggcttaagaactacacccgcgcactgcaggataaggaattcctacatgcgctgggcttctctacgttgctgactatcgttaccacgatcgtgatcaacgtggtcgcgttctccatcgcctacatgctcaccaaggcgatcaagggatcgaacattttccgttcggtgttcttcatgccgaacctgattggtggcatcattctgggctacatctggatgctgctgctcaacggcattctcgcgcactgggcgcgctcgctgacctatagcgcaacgtacggcttctggggtctggtcgtgctggtgtgctggcagcagatcggctacatgatgatcatctacatcgccggcatgcagtcgctgccgaccgacgtgctcgaagcggcttccgtggatggcgcaaatggcacgcagaccatgttcaagatcatcattccgctgatgatgccgtcgatcaccgtgtgctcgttcctgtgcgttaccaacggcttcaagctctatgaccagaacctcgcattgacgaacggcgctccgtcgaacatgtctgaaggcctggcgatgaacatcacccgcaccttctatggccgcgtcggctgggaaggcgttggacaggccaaggcagtgctgttcttcgtgcttgtcgcgattgttgcgctgattcagaataagctgacgacttccaaggaggtggaagcatgatttccggagaaaaggtcaagcacggcggattgtggaccgtactgttttccttggtatcgctggcatgggtcttcccgatcgtgctggtgatcatcaactccttcaagcagaaggcgtacatttcgcgtaacgcgttctccattccgaccggcaaggcgttcgttggattggaaaactatacccgtggcattgaaaccacgaatttcttcgccagcttcggctggaccctgctgatcacggtcggctcggtgattctgatcctggtgtgcacttcgatgtgcgcatggtggatcgtgcgtgtgaacaactgggctgcgaagctgctgtacacgctgttcctgttcaacatgatcgtgccgttccagatggtgatgttcacgctttcgaagctcgccgatatgctgaagctcaacactccgtggggcttgtgcattgtgtacttgggattcggcgcaggcctggccgtgttcatcttcaccggtgtggtcaagggcattccgcagtcgttggaagagtccgcaatgattgacggcgcttccgtgccccgcattttcttccagatcgtggtgccgatcatgaagccgtcgatcgtgtctgttgcgattctgcaggcaatgtggatttggaacgactacctgctgccgtacctgacgctcgatttgggcaagtacaagacgatttccgtggctattcagtaccttaagggcggctatggttccgtcgatatgggcgctatgatggcctgcctggtgatggccatcatcccgatcatcgtcttctacctcatctgccagaagcacatcgtcaagggtgtaatggctggtgcagtcaagggatgatcgaagatcatcccttgtgggacagtgcagtgcgctgtcccatgcaccagcctgagcgaggccgacaggcctcgctcaggtagcattgagcccggccgcaaggccgggctctttcatatccgaatccgaaaactacttcacatatttgcggaacacgtgctcgaaaatcggcacgtgaatcataatcatggtgccgtagcccaaaacgagaagcaggaacaggccttgcggcatgtaaaaccagctgcctaccaaaagcgcgatgtaaatcgcgtcgatggcggccatgccgagcgtgtgcccgatattgctgacgccgaagacgaaggcgttgccgagcgtgcgccagaacgagttttcgaaacgtgactgcaaagcccagatccattcgaatccgatcacccacacaatgctcagcgcgaattttggaatcagcagtggcgtgatctgcagcacgatccatgagtacacgctgatggcgcctgcaatgccgaaaatcagccaatatccggttgcttttgcgaagtttgatcggaatgcggcgaagtaattgcgggtgaccgtgccttcgccggcgagcgagcgtcgtgccgcgtcgtggccggcggtcagtgccgcgccgatggtgatgatcggaatgctggtgaccaacatgaggatgttgatccaaatcgcgtcgacggcgtcgctgaggccgcgcataaagccggaatcgggtgataggaacttcatgcgtaccagtctactcggcggtgcggcaatcgtttgcatgcgtacatcgagtagcggtctgctgttccttgcgtagctttcttagtatcgttgtcattgaatgtgcataaaaaagtcccgtcacatatagacgggtgtccgtaaaacagttaatcctccgtatggcttagaccatgcggaggatttgtttatgtctaatcttcaaacttgctggcggcaaacggtttgtcaaaaccgtttgcggacggcaagtccacaggggatagccgctttagcggcgcaagggggtgtagccaccttgacggaacgaagtgacgaaacattctcggtcgtgcagttttcttctgctgaccgggaatgaagctccgcaggacgcactactctcgatagagagtatagaagtgcgccctttagttcctaaagggtttttatcagttcgacaaacttgaattcaattttaatgttttattagtctttacaaatcacctttgaaccttcatcattgactataattgcctggtggttgttaataacacagatattcaaatccgaaaactcagccatgattctctcggtaattttcttaaagggtgccgtgagataatggggaagaacatagaaatcaatcaaatccagcccctcattatcttcttgagagtaatcctctggcttttcatccatttgttcaatatattgaatggtcggagcgcatataattgcgcctgccgactcaccgatcatcagttttccgtttgccaattctttcttcaacagctcgtccgtttccgttttacgtagctggtccataaggaagaaagaatttccgccggtaaaatatatcacatccgcatcttcaaaaacagcctgtatcgttgaataagcctccgttgagatatcaatttcggttacagatgctcccagttttttgaatagttttcgagccgaaccaacataaccggtgtaaccttcatgcagcgaagctgttggaataaatgcgactttcttgttatcaatttcttcttttatcaaacttcctacgcttgaaaagtgcgaacataaaaacagtttcatctaaattttcctttatgacttctgatttattgctcaatttcgtgttcaaattataccataaaacttgtgaacaattctaccgcaactttggaatatatgagaaaagtccgaacagttttctgcccggactttctcgctcaatcataaatcaattccgctttcacaacttcctctgcctgtgccttgcaagcgttcatctgccgtacccattccatttggttttcagctttcagctgttcggccacgtcgtactgctttgccagctctggcatgatcagctccatgcggtttcgtgccgcttcgtcaatcttagcgcaatactgtcttacgtacacccagctatggtgcgtgacgggactttatggagttatatgaggacgcttacttttcgccgttcatgatggcggaaagcgacttcacgcgaggcaggtcgaacacttcgtcggtgtgcaccgccttgtggtcgggacctgccagtggcacgcgccagttgcagtattcgctggacgtgcccggctggttctgcgaacgggtttcgccgacgccgtccaccagcgccgcctgcagaagcacggatggcgagcggagcagcatcttgtgcatcgcctcgacgatctcttgaatatggtcgtcgacgtccgcggcgatttccggcgtgatcagttcgctttcgaccagtcggtcaagcatggcctgacgttccgcggttgcggacgcctggaattcctcgaccggaccggtgagcaggttcagttcttcgcgcagcttgacatgctcgaactgcaggtagcctgcggtcggcggcagatcgtgcgtggtgacggatgccaacgcatactcgcggtaatcggccggatcggcatacggatcgccggcgttgggggagtcgtccacacgggcgaaccattccaccgtgcagccgagcagaccgtgctcggcaagcacggtgcgcacgtaatccggcacggtgccgaggtcttcgccgaccactaggccgttcacgcgggaagcctcgatcgtgaggatcgcgatcatcgcctcatagtcgtaggtgacgtatgcgccgccgcgtgcgccttcgccctgcggaatccaccacaggcggaacaggccgagcacatggtcgatgcgcaccgcgcccgcgtgcgagaacatgttgtgcaccatttcgcggtacacgccataaccggttttggcgagatagttcggattgaacggcggctggccccagtcctggccctgctggttgtagaagtccggcgggcagccaacggtgacgctgccgacggcgaagcgttccggattccaccacacgtcggcgcccagcgagtgcacgcccacggccatgtcttgcatgaggcccaaggccatgccgctttcgcgtgcggcggtctgcgcggcggtcacctgttcgtcggcgatccactgcagccagcattcgaattcgaccatgtcggcatgatcgcgcatgagttcggccacttccggcgaattacggttcgtctccgcgaaccatgtgccctcccatggggcgccccacatctggaatgccaccgaccacgcggcgaatgcgcgcagatccgggccggccgcctccttgaacgcttcgaatgcggcctgacgctcggcggaacgcggcaccttgaacacgagctgcagcgcctggcgcttgtgccaccacgcggagttgatgtcgagttcgtcggcattgtcgttggcgggagcgacttcggcgtgcaagcgctcgacttcggccaacgcggcctcgtcaagccccgcatattcctcgatatcctgcgggcgaatgtaggtgacgttcatgaatcggcgcgattccggcaggtacggcgacggttcgagcggctcgaccggcgcggttgcgtggatcgggttgatgagcatgaaatcggcatgcgacttttcggcggcgtcggtgagcagcagcttcagatcgccgtagtcgcccacgccccacgattcggcggagcggatggaatacatttgcgccatccaaccccaacgctgcttttcggcaaccgcaggcggcagcggtacgcgtgccggggcgcagatcagtcgcgcctcgccgtgcagcgggcccgcgttgacgcgcagcgtgtggtagccggcgggaatgtcgtccggcagggtgagcgtgagcgagccgtcggtctgcggggccaaatacatgcacaggttgccctcataccgcgtgccgtcctcaagcaacaggcgtagcgtcacgtcgtggcccttcgcgcggatcggcgtggtcgcttccttgccgatgaacttcacgatggtcggttccacaagggtgtctgcgatgcgctgcttggtgagttcgtacgatgccgcgatcgcttcatcgctggatgcgtccacgccgagcgccgcaagtacggagacaagcacttcgtcgcggatttccacgtaggtgccgagctggtcgatatacgacgttgagatgccgttgagtttggcgagctgaataagcggtcgtgcgatgcgttccgcgctttcggtttgctgggttgccgtcataggttccttctttccggggtcgttgctggccgatgatgctgcattgccacgcgattggcgcgcttcggtgcgtataccaaccgttctgctatgtactgtagcatatgatgacatcgttttcaataggcgtgttattgggtgtaaacgttgaagtattgcgatttcttaactactttatagacgttagatagtgataatgctttttctgtttgcctatcgtttgcaaggtgtttgaaagtggatatgactgctgtcctaccgtcgttgccaccgctgtttccgaagtgcgatggcgttgccgatccatgggcgcacgcggctggcgtgaacggccgtcgaagcatggtcgtcgacttgcctcgcaccgatcccgaaggttgggatgccgatcgcatgccggaagtgccaattgcgcaaacggttgtttgggaaacgcatgtcggcgatttcagcaacgatcccgcgggaggattccccgaatcccatcgtggaaaatatcttgcgttcaccgacctgggaacgacgttgggcggtcatcctgattttccgacgggattgtcgtatctcaaaaagcttggcattaccgcggtgcagctgatgccgatctacgatttcggttccgtcgacgaaacgatctgcagccgatacaactggggttacgatcccgtcaattacaacgttcctgaaggatcgtactccacgaatccgtatgacgggtccgtgcgcatccgcgaggtcaagcagatggtgcaggcgttgcataatgccggcatcaaagtgattatggacgtggtctacaatcacatgttctcgcccgacaactggttcgagcgcatcgtgcccgaatacttcctgcgccgcaagccgaacggggcgttgtcgaacggctccggatgcggatgcgatatggccacggaacgtgcgatgttccgccgttttgtggtggaatccgtggcgtattgggcgagggaataccatcttgacggcttccgattcgacctgatgggcctgatcgacgtcgacaccatgaacgccgtgcgcgccgctttggacgaaatccccgaccgtgggccgagcattcttatgtatggcgaaccgtggtcggccggcgctaccgcggctttgccgggcaccgtgcttgccgacaaggccggattgccgcagcttgataatcgcatcgggcatttttgcgacaccacgcgagacgccatcaaggggcatgtgttcttctcggaccgtcccggatacgttaacgggggtatgcatgagaatgcggcctccgtgcgcgacgcggtgaacgcctggcgtgccagcaaacagccggaaggtgttgcgggtcaagtgatccagtatgtttccgcgcatgacgatctgaccttgtgggacaagctttgcgcaagtcttgccgcgaaatcgctgggcagcgccgttagtgaaggcgacaacgagaattccgtggacgtgccgaaggcgttgtatgacgccgatctttcggaagctgggctcgcctcggccggttccgcgattgccggggccatggccacggtgatggatgcgaatcgtatggcggcgggcattgtgctcacttccgcgggcattccgttcatgctgtctggcgaggagttcgcgcgtacgaaatacggcaattccgattcgtacgattcggcgcgcgagctgaattggcttgattggactcgtgcctggcgcatgcgcgatctggtggagtattacacgaaactgatcgccttgcgtaagagctcggcggaatggtttgacggcgatcgtgtgatcgtcagcgtggaaggcgacgaactggtgttccgggtcggcgactacttggtggcggtgaatccgggacgtcatattggtgcgattgacgttgcctcgactgcggttgcgccggtttcggagtcgtctcgcgtgtggtgcggcatgggttcgtccacaaacgcatccgtggcgtgcatcagtgcgggagatggcgattatttgatcgtgccaccgcatacgtttgcaatctggcggttgcggtaacctcgtgtataacgcatgtaacgcattggtttgcaagggcggcggctgcaaagtggcaatcgccgccgccggtaaagcggcgacgatgccgatgaaaggacctgctatggaaaacgtgacgcatacccctaaatatgaggttgtgttcttcgatctgtatggaacgcttattgacatacgtaccgacgaacagtgcgacgcggcctggcaggccttgtatgacaccgcttgcgagcttggagcgcaatacgattcggttgaggcactgcgtgaacgtttcgaaaaacttgaggcgcgcgaaatgctgcatcagtcgaatcatgccatcgttcgcaatgggtgggacgagttcgacgtgctgccggtgtaccgctcgctgctcatgaatcgcaacgacgaggcggaacggttgctggcgttgccgcaggccgctcaaaaggccgcgtgggcgttccgtcagggtagcaccagcatgatccgcctgtatccgggtgcgctggaaatgattgaaaaactgcaggaagccggcattgtcgtggcgctgctcagcaacgcgcaatcctgctatacccgtgccgagttggaaatgacgggactcgccagcgtgcttgacgacgtgatcatctccagcgaggaaaagattcgcaagcccgcgcgcgatttgtatatgctggcgctcgaccgtgaattcgttaccgccaagcatgcgctgatggtgggcaatgacgagaagaacgatattatcggtgcgcgttcggcgggcatcgacggcgtgtatttccgcacggagatttcgccggccgacgatccggatgcgtcgagttatgcggtgcgttcgtttaagggtgccgattatgaaggattgctggattacgtgctgaacgcctgatctttcgcattgcgcgcgtactgctcgtgtattgcggggcgtgcgttgcgttgcgcgtattgcgcggcgtgcgccacgtttacgggggtcacctttcgtaaagcgtgtaaggtatggtgcatacatttgcagcatacgttcgcaggatttttgcaacaatggcaagatgatgcgagtaaagctacgtgaaagcacgaaagacatagtgtgaaacaatcgcgtgaaacatgtcgcacaggggttacgtgaaaaacatattgcgcggaatgctgtgcaagcgcgtgagacgcgaagttccgcatatggcagcgatgccgcaacgcgataccgcggcgtaatgtcgtggcgtggcacagtgcgcgcagacgattacgtgcgcgcatgattgcttgcgcgatggaatcgaggaaaactcgaggaggacttatggaaggctacaccgaaaacggcgccggaaccgacgtcaccgaccagatcggctttgcgggcatgcgccgcaagaaaaagcagcgccgcggattgagcgtattccagctcaaggtaatcggcgcggtggcgctggtgctttccgccggcagtaccacgctggtgccactgattttcggatccgacacgagcaacatgacgtcgcttacggccatggtgctatgcgaagtggtgtcgtggttcgccgcgccgatctacgcgtggctgctggtgcaaggcttccagcagacgcgcaatcgcgtggcatacggcgtgcagctgctgttgctggcactaatcgccgaagtgccgtacgatctcgccacttcgggcaagccgttcgatttcggctcgcagaatccggtgttcggcctgttcatcgccttcgccatgctcgcagcaatgaaatgggtggcgcagcgctaccaaggtgccatgctcgtgatctccgacattgtgctggtagtggttgccgtattgtgggatctgctgttgcgtgtcggactgcgccagcatctgatgagcctgggtgcggtgacgcttggtttcgtgctgattttctggctgatgcgctcgcgtgaaaacaccatgatgttcacggccggtctgttcggtgcggtgatgatgattgcgcctggcgtcggtgttgcattcgtgcactactacaatggcaaactcggatacaaacattcatggactaagtggatgttctatgccttctatccggtaattttgctgatttgcgcggctgtcgcatgaaatttgatcatattgcgagagttttgacaacgttcgcactataatgaaaacagattgagagagcgtcgtcgctccaaataccacccgttccactgttggcaggggtgcgatgatgctgtgagctgcaaaggggctgacatggacaaggctggcattcgtgaggtggccaaggccgcaggagtgtcgatttcgacggtttcgcgcgcgttcacgcgtccggagctcgtttccgagcgtaccaggcgcaaggtgctcgacaccgcggaccggttggattttaatatctcccgttccgcgacggcactgaagtcagggcaaacgtaccgtgtcgccatgctgatgaatgaggaaatcaccagctggttcaatatggaagtattcgctggaatcaattccgtcatgcatgatgccggatacgacatctctctgttccagcatgtcgataccggtgagaacaggcgtgacttctttacgaatcttccggtgcgacgcaacgtcgacgccgtgttcgtaacgtcgttcggcgtcgaaccggaggaaatccagcagctgcagcgtattcatgtgccgatcatcggcatcaacacgccatcgcaggaaggcttcgacgcaacgatctccatcgacgatgaagacggcatgttctcgtccgcgcagcatctaatcaatcttgggcacaaaaacattgtgtacgtgtgctccgatgcagtcgattcgatcaattcgtcgatcgacgcgcgcgggcagggcttcattcgcgcatgcaagaccatggagggcacgcacgatttcaagtggcgcgtgctttccgtgccgcgcggcaaaacgttcgccgattcggcgttgaccgcgctgcttgcgttggatgagttccccgacggcatttgctgccagaccgatatgatggcgattccgctcgtgctgcgccttgaccggtatgggcatcgcacgccgcgcgactattcgatcatcggcttcgacgattccgcatatgccgacaccgtgaacctgacgaccatgcgtcaggatccgttcgccatgggtcgtgccgcagcgcggaaggccgtgaagctgattgcgggggagactctcgaaaatccgtatgaggtggtgcgtgcccagcttgtgctccgcggcaccgactccgtctacggcggagatcgctgatttttccgccactcttcttcatgcctccgtacttgccgttttgattcacgccgacaatacgggggtattttgcatatactgccagctgccgccgtctgcgcaacgctgctggtggtgtctgcacaagttccgttgcgtgtcttgggcgtcgtagacgacggtgactcgctttttgccgaccgcgtcgaggtgcgatccggagtggattttccggtttcgctcgggtacttgccgtcttcgtaggatgcggggcttgcaaccgtcatcatagttcatttcgcaaccttggttgtcacggctcgatcccttacgcgcccttgtctcatatgtagctgttggagagtgtgcgagccctgaaaatttatccctgtggtcggaggttttgccgcctgttgcgaggttatgagatttccatggttgatttgtgattgttgattgtaacgagtgtggatgggcggcgggggcggggaaattggggtatggtacacgggtgtactagggggtattttcatgaaaatttctgcaatgaatgaaacggtttgcaatcatttgtttcgcgacacgccgtggagggtatcggttagattaacaaagactgatcgcaggggtaacctcggcgtttttgcgaacgatttcaaactccagttggcagaacggattagacgcttcggtactggaaaacaaaggttttaccacctttatatcggggggggggg

SEQ ID NO: 868 - DNA, 10840 bp, Unknown
  gut microbiota DNA sequence
tcctgtagatggcatattgcaaaggatgtcgtgttagagtcggaatgtctgagggggggtctgattcgtgcagttaggggacatgatgaagagattgctcagaggcggagcgaggagctcggcgccacagcattactcgggagcgcgagtggtatctgcccgcgccttctctcatgcccgctccctgaccgccgccgcagtcgcagttgccatgatggccaccgtagccgtcaccgccttcatccccacctacagcgccaatgccgaaggtgcggcaggagacaatggcggtatctgcaccccgcaatccataaccttgggcactgatacgggtcacagtacggaagataccggcgtcgccacatatgtgggcggcgacatgtacgttggcaagaagaccggcggaaacatgctagatgttaacggtccaagcgggtcgtatgctgtggaagccgaaggcctaaccgcggtcaaaggaaagcttttgatgcacccgcttaaaggtgcgtgggccacgtatttcaccgatgcggacggtgctaagaacggctatgtaaaggattaccggggtttccgcttcggtgtcgtgggctttggcggtcagtatcgtcctaaagatggttctgttgtgctggacgttaaaggtgacagcaacgattcgagcattggctgggttaagggcactcaagcttggggaaatgctggctgggttggcaagaacaagaacactgagccgtcctactccgcaaatatcgcgggcgatagcaccacggtatatggtggttcttcgaatcagattttgggaaatggatcaaagaacaccgacaccaatcggtacgactccaggaactccgtctatgtgccaggcggcatggagggtactgtcagctggaaacagactgatgagacgatcggctcgactaatgaaaagttctcggactttgacacatatatcaagaagttgtcaaacgacttgtcttccctgaaggggttcggaagcgtatatgttaccactgcgacatattcttcggacagctataacaatttgaagcgtacgaaatatgacgtcaatgagtacgacaacggtagctatacttttacgattaacaacgtcaatgagaaggtaattaagtttcagggtgacgggaaagcctctatgcaggtgttcaaccttcccgcaagctttctcaatgattcttcgagctatacgggtgtcagtttcgacttttccggtattcccgatagcgcttccgtggtcattaatgtgaccggaaagaacgtggatttccataacggttggcgtttctggtggactgatgaaagcggtaccaagcgtgagcttggtggttcttatgcggactcggagtatgctaagcgtgcgcagcagatcatgtggaattttgctgacgctacaaatgtggttatccatggtggccaaggtagtggcactacgacgcgtagggacgcaaactccaatctggaaaaagctgatggcgtatgggataagtcgtttgccatggagactaaggatgatcctgccgctggcatgctcggcagcatcctcgtgccgaatggcagcttcgaatctcacgtgagcaccaacggtcgtgtatgggttggcggggatttctccatgtacaatccggatgcggttggcaatactaataacggtactttctacaagttcctcaactacgagcgcagctactcggcttccgcgcttgatatggatcaggaacgccacaacctgccgtggaacggctcgtactctacccagtgcgcggtcattcagatcaacaaggtagacaacaacgacaatgccttggctggcaccacgtggggtgtgtacaagacttacgcagatgccgcgaacggtggcgaggcgattacgacggttactgacggtaatgcgctgtctgacaaagacggtgttgataacggcaccattcaggtcggcaatctcaagaccaacagcaactactacctgaaggaacttggagcgccaaaaggctatcagatttccagcaaggtgtaccgcatcactgcgggcgaccaaggctctctcgtacaagatgtttacgagagcgcagacggaaccaattggactccggtttctgacaacaagattgtgaactatccgcagtccgcgtcgatttcctggacgaagaatggtgaagatgataaaccgttggcagattccagttgggaaatcactgctaacgatggcagaacttacatcgttgaagacaatatggtgcaggtttccagcgtcacccttctgaaggatggcgttgatgctggtgattcgctgagtattactcagaatagttcggctactttgaccgcgcaggtgcagcctgcgaatgcggcacaggatgcgaagtgggagtcaagcaattccgctgtcgcaaccgttagcgatggaacggtgaccggcattgccccaggtactgccgtgattacggtcaagcctgttggcgacgattcaatcagcgattccataacggtcaccgttactgcggttcaggtgacatctctgacggtgaaaaccggtgatatggatgtggcgaacaatgcatcgctcagcttgtcaaagggaaactatcagcggttcactgccactgttgatcccgctaatgcggcggtttcatggacgtcgagcgctgagagcgttgcgacggtggacaacgacggcaaagttaccgccgttgcttcaggtacggcgacgattaccgcaaaagcaggaagcctttccgtttcgttcactgttactgtgcctaaggatacgcattatacggtcatttactttaataatcctggcaaatggagcaccccatacctgtggtacagccttgacggcacgaatggctcttggcgcgaggcggcaatgaccagggactatagcagcaataattgcggcgactggagttatgtcaagatccagaatgatgaccggaagcagatcactttcaagttcaagagcggttctgataacggaactgcgtcttgggatgggccgagtggtggtggaaactatgtcgcggactacagtgcggtgattaccgtacagaagtcgagcggcctgaatacctccgcgaatgtgtatgccacagctccgagtggttgcgcggcaaacgtttctgcaaagaacgttgaagccaaggtgtctgccgctgtgtattacgagcagggcgctgctgacgtagtgctcgcaaacgagactgttgcacgtacgactgcctgcacgaagtctgagccgaacggcgaccagcttggcgtaatgtgcgatatcaacgctgacgcgggcaagttcgaggtcaaggatctggcggacggcacgtacaagctgaaagagcatgaagcgccaaccggatacaccaagacagacgtttggtacacattcgtaattagcgacggtcaagtcacaaccgtgacgaggcatgagaacgcggatgatgctacgggcacaactgttggcgccattgagattgtgttcacggatactcgcaccaaggtgacgtggaataagatcgatggcaccgacagggcgaaaattgcaggatcgtcttggacgattgctgccggcaaggtaggcgatggttcgttcacggcgaatggcggaacgccgatcacagtgaccgattgcacatccggttcatcatgcgctaacggttcgaatgatgaaaacggcgatccgggtgcgttcactgtttccggtctgccggtcaataagagcgatgaaatctaccagcttcaggaagtcggcaacccggctgctcacacaggcaagcctacgtactatttcaaattgacggactcgaacgaaaacgtcgccttgtataaggacgttggtcttaccgatccggtcaacaatgtcattgcgaaccctcgtgtgctcggtgaagtgagctggtcgaaggttagctcggaaaatgattccttgctgcttgccggatcggaatggaaagtcacccagaccagtgagttcaagtacggaaacgatggcgtaaccggcacgtttgaaaagctcaccacttctaaagagtacttcgtgactgactgcatggatgcgtgctcgagcgaaggctttgcggacgaagattccagtgccggtaagttcaaactgacgggtttgccttggggcgaatacacgttggaagagaacaaggctcccgacgggtacaacctcggcggtgttgtctacaagttcaccatcggtccaagttcgtataacggctccgcatggagcgttgcgctcactgtcgacggcgcaaccggtcccgctgacaacaagattgagaatcagccgggggtggtgttgccggggacgggcggcgacggaaatatgaagactttggctacgggattgcttgtggccatggcatccgttgcgacggccggactggccctgaaagtcaggaggcgtcggcaatgaacacgtctagaagaggaggggatggtccgtaaaacaaacgaccactgccttctgggcaataactcaataactgaaaaataattgaaaacgttggaaaacaacgaagatttcaacaagtttatggaaaaaggaaagaaagggagaacaatgaataaggttctcaaaggcctcgtcgctgtggcagcatccgcagccatggccgtcgccggagtcgccggcgcctccaccgccatggcggaggaaaatacgactgccaccaccaatccgacaattacgttccctacggataccaagtatcaggatcacacctacgaggtgtatcagatcttcaccggtgatttgtccgacggcgtgctctccaacgtcaagtacggcgagaacggcgccaagaccaagggcactgaggtgaccgccgccgagctgaagcagctcaccgatgtgaacgtcgaaggcaagaccgatcaggacaagctcgacgtcatcaagacgttcgccaagctcgacagcaccccgattaccacactgaccaagaccagcacgacctactccgctgctccgggctactacctcattaaggacaaggacggctccgtgagcggcaacgacgccaacaccctgtacatcaccaaggtcgtcggcgacgtgaccatcagcccgaagagcgatgtcccctccttccagaagaaggtcaaggacaccaacgacaccaccggcgacaccaccggatggcaggactccgccgactacgacatcggcgacaaggtcccgttccagctgaaggcgaccctgccgagcaactacgccgactacaagacctactacctcgccttccacgatatggaggagacgggcctgtccttcaacgctgattccgtcaaggtctacgtcgacagcgctcctgttgattctgacaagtacacggtcaagaccaccggtcttaccgacggctgcaccttcgaggttgtgttcaccgatttgaagaccgccgtggccgccgccaagaagggctccgtgatcaccgtcgactacacctccacgctcaccgagcaggccgtgctcggcaaccagggcaacaagaacgaggccaagctccagttctccaacaacccgaacttcgagcagggcggcgagagcactccgaccggcgagaccccgtgggacaacgtcatcgtcttcacctataaggtcgtcgtgaacaaggtcaacgagaacaaggaagctctgaagggcgccgcgttcaagctcgaaaagaagattaaggacgccgacaaccagctcgtcaaggagttcaccgcgggcaaggacacctccttcaccttctccggtctcgatgacggcgactacatcctgaccgagaccacgaccccggcgggctacaacaccatcaagccgatcaccttcaccgtgaccgccgatcacaaggtcgagtggaccaccgaagagcgtacggatgtcctgaccagcctgaacggcaatgcggcctccggcgagatcaccttcgccgctgacgagagtgccggctctctgaccgccgacgtcgtcaacgtcaagggctccaacctgccatccaccggtggcatgggtacggtgatgctgtatgtggctggcgtggcagtgttcgtgctcgctggcgcaaccctggtcatggcgctgcgtcgccgcaacgcctgattcaacggatcacagtcaacataactgaaaatcaaaaaccataactgaaaataactacacatgaaaccgctgttgccatgcacttacctccgcatggcaacagcggaatcatcacaatcatcataatttaaaaataattgaacaataactgaacccacatatgtcaggctggattgcctcaaatcccttgtaaactgcctaaactaacgagaattcagcctgactccctaatttttccaagtcgcaagttgggggcgacttgatatttctagctttcacagaaagaaccacagaagaggggctggcaatgaaggaacacacgatcgcaagccgcatcgtcgcaacatgctgcgcagctgccgtcgcatgtgccaccgcaatctgtgcactcaccactcgcgatgcggttgcggcgccaacagactctgccagcggcagcatcgccattacgtatcaacacaaaagcaatgacggggctgactctaatgcgggaggcgcttccgattctggaaccgctggaacgggcgagttcgccattccgggagcaaccttccgcctatacaaagtcgggcaagtctcgtccggcgcaaacttcgaacccgtcgcaccattcaccgactccaccgcatacccgatcgactggtcgaaagtaaccggatatgacgcgcaagtgtaccgcgacgtggccaacacgctcgccggactcatcgcggcgaacggggcaagcgaatccgcagccgtggactcgggcgaaaccgacaaagccgggcgactcacgttcgccggcgtggaagacgggctgtatctggtcgtgtccgatagcgtgaaagtcgaaggcgctgctggcgcggctgctgttggcggaacggccgacgaagactcctactggcagtgcgcttccgccaacatgctcgtcgccatgccgcaagacggcgtctccaacggatcacgcgaactcgccatcgagccaaaaaccgaatgctccacccaactcaagccgaccctggaacgcaccgtgcgcaaagtgtggaacgatcgcaacgactccgacggcaagcgtcccgaagccatcaccgtgaaattattgcgtgacggcgtggtattcgaagaagtgaaactcaacgattccaacaagtgggcacattcgtggacgggactttcctccgcgcaccagtgggcggtggtcgaagcttccgtacccagcgggtacaccaccctctctgacgtggaaggcgacaccaccaccatcaccaacacgcacacgccacccgaaaccccgcccgcgcacaccggctcggcggtgcagagcgtggcctggatggcagccaccatctgcgccgcagcattggtactcttaggcgtagtgaggatcgcgagaaagcgggaaggcaagcagtagcgtgaaacggcggtataacggaagcgaatcgggagaaccgaacgctgaagcgcgccgaaatgccggtgatacctctgcagagttttttgaatcttttgaaatttcggaagtttctgaatctgcgggaactgctgaatcttcagaatcatctgaatctttgaaaacttcaaaatcttcaaaaactgcagaacaatcgaagaaaccgaagaaaaagtcgaacgcgctgctcgacgtattaatcgcaatatccgcaatattcatgatcggcgcgatctgcctcatcgcatacccaacattcagcgactggtggaaccgcatgcaccagtcgtacgccgtggcaagctacgtggaacaaaccgaagatctctccggcgaagaaaaacagcaaatgctcgacgcggcgcacgcctacaacgaggcgctcgcggcgaacggcgaccgctggcaccttaccgacgaacagcggcaaacatacgaaaacacgctcgacataaccggtaccggcatcatgggatacgtgaccataccgcgcatcaaagtgaagctgcccgtctaccatggcaccagcgaaggcgtgctgcaaatcgcggcagggcatttggcgggaacgtcactgcccgtaggcggcgaaaccacgcatgcggtgatttccgggcataccggactgcccagcgcgaaactgctcaccggtctcgacgaactgcaaaaaggcgacacgttcgcattccacgtgctcgaccaaacgtacacgtacaaagtggaccagatctcagtggtgctgccaagcgacatcagcaaactcaacatcgaatccggcaaagactacgcgacgctgatcacgtgcacgccgtacggtgtcaactcacacaggctgctcgtgcgcgggcaccggattccgaaccccaaagtgccggacgcgaccacgtacgacgagccggggtatatgacggctgtggcggctcttgtgattgggctgctcgtgtcgatcattggattcgcgtgcgtatggctggcacggctgtggcggcgcgggcgcatcgtgaaagccgatcgcgtggctgccgggcgccactcgtccggcagacgggcgtagtttctcttcttccttctcgtattctgccggtcttgcgacgctgcgatgtgcgggaatgtactatcgcaactatcgcaattatcgcaagaaggaagaaatgcgatggtaggggagagatgaagaaatcggatatttccaatatttcgaatgctgaaagtgttgaacgcgctgaagaaagtgtgcgatcgagtgtgcaaccgagcgggaaattcggcgggaaagcggatcgactgtttggcgcagatcctgcgggactcgacgaatccgcgcgaggcgttgcggtgctggtgatcgtcggcgtggcagtaggactgctgtcaggcatgttcggcatcggcggcggcaccgtgatcgtgcccgcgctggtatggctcggactgacacaacgcaatgcggcggcgacgtcaatgcttgcgatcgtaccgacctcgatttccggcgtcatttcttacgcgacttgcggaaacgtggactggctcgccgcgctgctgctgttttgcggcatgtttgtgggcgggcagattggcagctggctgctttcgcgcttgccggaacttgtgctgcgatggattttcgtagtgtttctcgtgtttgtggtggtgaaccagataagttttgtgccgtcgcgcgaccagcacattgcgatgagtgcgctgaccggagtttgcctggcgctgctgggcgtggtgattggcatattggcgggactgctggggattggcggcggggcgctcgccgtgcccgcgctatcgatgctgttcggcgcttccgatctgattgcgcgaggcacgtcgctgctggccatgttcccgaactcgatcacgacgagcgtggcaaacctgaaacgaaggctggtacatgtgaaggccgcgctgattattggcttggtggctgccgttaccgcgccattcggtacgtggatagcgggcgcggtctcgccccgcgtcggatcgattctgttcgcctgctacctgtgcgtgctcctgattcgcagcctcttcgtagccgtcaaggccactcgttccgcccgcgcctcttcctgaccgtttgcccttcatgcggcaaaagcatgagtcataattcagtatttagggggtattgggatgatggttgacggaaagaggatttgagataagtgttcactttgtgaagacgagagttcacgttttgttcgtccaaaacgcctcggaagttggtttgcgaaacctggcgtggagattgcaatacagcacaggctgaagaaagaagaaaaaagatgagcaatcgaaaggctctcaaaggagcgattgcagcaatcgcttccgttgcaacgctcggcgcgcttgcggcaccggccagtacaccaccccggccgtgctcgaatcgcactccaccgagcgtggctgctacggcccgcaaggcaagaccgacggcagctccaacgacgcgctcaagcgctgcctcgccagccagctcaaggaaaacggcggcatcggttccatttccgagcagctgctcgatacccgcgctgacgtgaccatcggcggtggttccaagtacttccgccagaccgtgcagggcggcgaatgcgctggcaagaccgtgtgggagcaggccaaggaaatgggctaccagaccgtcgagaacgatccggccgcaatcgcgatgatcgtcaagaccgccaagatcagctgctgaaaatctgaagagatctgaagatcgcagctgaagatcatgactgaagattgaaaaactgaagatcgcaaataagatccggatcgcacgcattgcagtgtggtccggatcttttgcttcatcgcacgattcaggtttggtgacttcacgatttgtggtctgacctcacgatttcattttttaagcctttttccgaatcgtgaggtcgccaaatcgaaatcgtgaggtcaatgcagacagggcgggccgcaaatccaaaatgagatgggtcattcaacgcagcaagcgttgtgagacaatatccttcgagatgtctatctcgcaaaccgggagattatctctcgacatccaaagtattatcaacaaagtattaccagcaaaggagcattcgtgcgtatttacaatctgacggataatgacgatgccgcaattgtcgcgcagcagggcattttccaggtcatggagtggaagcgcgatttttccgtgacgtacggcagcgccatggacgcctactatgcgtccgaaatgaacgtgcgccgccgtcaactggtctgcaatctcaatggca

SEQ ID NO: 869 - DNA, 1480 bp, Unknown
  gut microbiota DNA sequence
tgaactgcgccccgtttgttggacgttgttaattaggatacagccctagaccgcgagggacatgctccggaactcctccggggtgtgtccctcgagtcgtatctggcgccgtctggtgttccaatggatgatgtaggcgtccagttcgcgtttgaactgttcgtacgagtcgaactcccggcctcggtagaactcgtccttcaagtggccgaagacctgctcggtggcggcgttgtccaggcagttgcccttgcggctcatggactggcggatgccgaggcgttcgagctcgtccctccaccattggtgctggtactgccatcccatgtccgagtgcaggatcggctccgcgccggcgggcaggcgctccgcgagcatggcgagcaggcgcctctgctgcccgaggtccggactgcggctcacgtcccaggccactatctccttgctggccatgtcgtacacgggcgcgaggtacgccttgccgcccgcgaccttgaactcggtgacgtcggtcccgagcttggagaacggacgggccgcgtcgaagtcgcgtttgagcaggttatgcacgtgatcgcccgtctcgcccctgtacgagctgtacctcctccacgggttcctggagcggatggcgcatctcagtcccatgcgccgcatgaccccgagcacggttttggcggatatgcgcgtgccgaactcgtggaccaggcacatgcgcacctgccggtgaccgcacccgttcggggtgcgctcccatatctcccgtaccatcggctccacgtccggcctggacacgtgcgccgggcgcgacaggtgatggtagtacgtggatcgcggcagcccggctatctcgaggaggtggtcgagccggtgtccccgccctgcgagcagtcggacgacggcgcttctctcgcgtctcgtgacttctgcgcccgcagggcccggagtttttccaggtacgcgaccttcgccttcagataggcgacctgttcggcgagctcctgctcgcgcgtgggttcgggtttcggtttggatttcgagcctctgggcctgcccttgggcttcggcctgagcgcctccgggcctcccgcccggtactcgcggcaccagcgttccaacggcgcgatgctcgcgatcgcgtacttcgccatgacctccgtcttggtcatgccgttctcgacgtggtcgcgcgccgcggcgaccttcgtctcccagtcgtagcgtctgctgccgttgcctcccatgaccgcctcctcgccgccggacctgtacagcctgatccagtttctcgcggtatacaccggtatggcaagccgtctggcgagcgtgttcccgccggctccggccttgatgagttccagcgcctcgcgccggaacccgtcgtcgtaacgtctccttcgatcctcacgcatacgaaagaaccgcacctccgatcatcgaatctgaatttcttcagtccaacaatcggggtgcggttcac

SEQ ID NO: 870 - DNA, 151260 bp, Unknown
  gut microbiota DNA sequence
tggaacgtgtttccgcgtggacgcagcgccattatgtgctcatggattccgttgatgccgtgatattggtcatgctgctgaatcgcatgtcgattacgttcttttttgatagttcacctcatgtgcagctctctcatgcgatcgccgcatgctgcttgctggcgctggctcttcgacgcaggttccccgagacttgtgcgcttattgtgttcgtattgtcggttgtgcaattggtgtttttggaatcgattgaggttggacatatcgtagcgtcgctgtgtgcgctgtattcagccgtattgtatgggcgtgaacacgtatggcgttggaccggtcttgccgctgtcacctgttcagctctgatgggcttgaaaatcgcagctgttcaacacggatacactaccttgttcggcgccatcgccgcttccgtgggcttaacaaaaccggtttcagccacgtcaagtagtagtgcagcgttctttaccggcgttatgtatacggttgcggtgctgatgctgatgatgtgcgccggcatcatggcgtgggcacgttgggctcgttccagcgattcaaacgcactggtattgcaggctcgcgaagaggcactggtggcagagcaggagaagcagcgcattctcgcggcgaatatggaacgtgaccgtatcagtgccagcattcaggctgaagtcaccgccacgttgaacagcgtgattagtcaagccgtcgatggtatccgcatgctggatagcgccgaagcacaaggcaaagagcttaccaccgacgagatttccgcagcgttcaaagccattggcgagcaggggcgcgccgcgctcaaacgtatgcgcgaattgcttggcgtgcttcgtgagactggtttcagcgatgacactcatgccggtagtgcgagcgaactgcagttgaggcccgcagcaccgttggaggagcagctgcagcgcgtgtctcgatagccgattcaagtttttcagggagatttaagggtttgtttcgcgctatgagcggaacaatgccgataaggtggagagtatgagtgaagaacagaagattcgtgtggtcattgccgatgatcaagaattggtacgtgccggtttcgccatggtgatcggctcccaacctgatatggcggttgcggcgcaggctcgcgatggtgcagaggctgtggcgttggcggaaacgctgcatcctgacgtggtgttgatggacgtgcgcatgcccggcatggatggtatcgaggcgacccggcagatcagtgcgttgcggcatcgcttcgctgccgatggaacgcaatcagaagtcactcataccaaagtgatcattctgacgacattcgacttggatgaatatgttatggctgcgatcactgccggagcttccggttttctgctgaaagatacggaaccggaaacattgctgaattcgattcgcacggtttttcaaggtaatgcgattatcgcaccgtccgccacgaaacgtcttatcgagaaaatgatggaaggcgatttcatggctgcgaacgttggtaggcctgaaaattccgcaactacttctactacggattcaacatataccgatccggaattggatgacctgaccgaccgcgagcgcgaagtgcttattgagatcgcgcatggattgtcgaatcaggagattgccgacaagcttttcatcagcctgccgacggtgaaaacgcatgtggcgcatattctggcgaaaatcaatgcacgtgaccgcgtacaggcggtggtgttcgcttacgaaaaccatttggtctgactggtttgttgttttgcgtatgcatgatacgcaaaaaggactcctaccatgtttgtggtaggagtccttttcgttgtgtttgctatgaagctcaggcttcggcgagcgcctcaacaggaggcgtgctcactgccctgcgtgcggggaatacgctggcgagcagtgctgccacggctgccacggcgagtacgatgccgttaatgccccattcgaacgggaacactactttgccgtacatgctgaacaccacgtatgcgcccagccagccgaacagtgtgccaagcagtacgcccgagatgccggataccagcgagatgagcagggcttccaccgcgagggagcgtcgcaactggcctcgcgtcatgccgatggcacgcagtgtggcggattctcgggtgcgttcgatcactgacagcgacagcgtgttggctacgccgacaagtgcgatgagcacggccacggcgatcaaccccaccagaagcatcatcatggagtcgatcatgttcgcccatacgatgcgttcggcgattggtccggtcactgtcgcatcagtgctcttctccaatgcggcctgcatgtcgttgtagatgtcgtcaacggaaactcccgacttgtcagtgtctgccttgaccagcaacacatgggtggcggcgtcaaggtcaccattggtgaaatggctttcatccacgaatccgacagctccatattgcgcggatacacgacggtagtcggcttggttggcttgcaatgtcagcgaacgcgtagcgtcgccgttctggttccattcagtggagaaatcagccgtgccattggcgaactgcagctccttgccggtttgcgcattgtatgttggcatgagcacgctatcactgtcgatggaggcgttacccaagttggcacgcatgacctgcttgacctgatcgatgtttttcacgccgaccagcaatgcggacgtaggctgggttccatccgctttctccaaggtcacggaaaccgccggcgcatacaacgtgtcggacacgccgttgatgtcagatacatccttgaccatttgctggctgatgtcatcgcccatggccacgatgtcgacgctataacgggtggcgagcgcaccattcatagtctctttggcgctagcggcaccggttgcgatggtggagaccaaggtgacaccgatgagcagagcggcaccggttgctgcgatgcgtcgcggattcttctgaatgttggcgtgtgcaactgttgcggaaggacctgtcagcgaggccaacgctccaacgcccttcatgagggtcggcatccagaataccgcggtgaccaccatgccgaggaacaccagtgcggcaccggcgatggctatgagcagaatcatcgtgaattgatcgccgctcgcatcctcgccgccgttggtggcctgcacctgccagatggagaatatggccatggcgataccgaccgccaccatcagaataccgattatggctcgcgtaaggctggaacgacggttgtcggtcagttcaatcggacgcaatgcctccaatggcgttaccgcggtggcggaacgtgcggatcccatggatgcaagcaccgtcaccacaatgccgaagagaatcggtacgacggcggcttgccaggagaagttgaaccgcatacccgcctgcatgatgtcgctgacgcacatgccccacatgagcaggcttccaagcaccacgccaagcacggatgcgacgaagccgagcaccaccgcttcgaacagcacggaaccatacagttggcctttctttgcgccgatggtgcgtagcaaggcgagtgtgcggcggcgttgcgccacgagcacttggaacgtgttggcgatcaccagagccgccacgaacatggcaagcacgccgaagcacataaggaatgtggtgacgatgttggtttggttgccgcttaaggatttgatgctttcgtcactgatttgctgtcgtgacatcagatcgaaatgctttggcagcaacgctttcacaccgttgatggtttttgcggatacgctgtttccatccaaggcaaggtcgagatacaccattgttgttccggtggcgttgaaatcgtccactccctgcattgcggcaagcagattgttggatcctacgatcgcaccaccatagtatgagtaggcgccgttcggatcggacgtgagtcctaccacgcgcacgttgtccgccttggctttgccatcgtcgcctaccgcatatcgggaggtcaggcttacagtgtctccaacgccgacgttcaactgtttcgccatgtcttccggcagcgcgacttcgttggaatccttcggctggtccccttccgtgatattcacggggagcatgttcttctgtgccgcggtggaaatgatctcgccgctgacggtgctgtctcccttggaaacgctgacgccggtttccaccgaggcacggacgccgccaaccccttcgatgccggcgatctggtcgagatgaaagtcgccgacagtgctggaatacgcctcgttgagttccttatcgctcaggtcggagctgttgatgctcaccgcatagttggcgtttccgaacatggcggtcagctgccgtgtcagggagtcgttcatggcattgccgaacaggaaggtgctggcgatgaacgccgtgccgatcatgatggcgatgcctgcgggtatgagcatgcgcttggtttttcgcatgagtttcaaagtgatggaccacatggtggattctgttcccttcttcgaatgcttctatagtgcgtttagcgggaatgtctcgcggaagccacattcattgtggcggcctcacgttccttcatcagcagttcactcatctggtctgctgtcggcttgtttacgtccgccacgatctggccgtcggcgaacacgagcgcacggtcggcgtaagacgcggcgaccgcatcatgcgtgaccatgatgatggtttggccaagttcgttgacggaacgtttcaggaagctcagcacttcggcgcttgatacggagtcaagattgccggtgggctcgtctgcgaacaccagtttcggtttggtgatcaatgctcgtgcgatggccacacgctgctgttgacctcccgatagttcgttcggacgatggttgagacgttccttaaggccaagcgtttccaccagcagacgcaaccattgtcggtcgggtttcgctccagccaaggtcaatggcatgagaatgttctgttcggcggtgaacatcggcagcaggttgaagctttggaagatgaatccgatgtcgcggcggcgcagcaacgtaagctggttgtcgttcatgcgcgtcagatcgtcgccattgaatatgatgtgcccgccggttgcacaatccagtcctgccaacgtgtgcatcaacgtggatttgccggaaccggaaggtcccataatcgccgtgaattttcctttttcaaaagcgacgttgacgccacgcaacgcatgcaccgtgttatttccggaaccgtagtccttcacaagatccacggttgcaatggccgtattggtagctttgatggtgtccctgatatccatgctgtcattcctttctttggattacctccaaaattacggaaaaacagctgattcgaatatcatgcgttggtctgaattatcatctcatccttgagaatgagcaaagacgaggcgcctaataccattgattcatcaatcgtcgaggagtacaccatcctgcggaggttcgagccagtacgactctttttccacgctgacggtggaagcccaccatgtctggtccacgcctggcagcgaacggatggactcatccaccacacgccacaggtcctcgtcatctccggcgatgatttcgatgaggtagtcggcgccattcaaaccgactccgctcattgcatatgtcacctcgtcgatcgctaacaactgttcgacgtcgaggcgatacggaggcttcacaccgatgccgagaaacgcttggcggaatccgcctaaacgcatggggcttaccgtggccataatgcgcatcacaccggaatcctccagttttttgacgcgcccacgaatcgcggtgtgcgtcacaccaagatgctcccccagcatggcgtaacttgccctgccgtctttctgcaattcgttgaacgtgtgcacgaatcgcgcgtccaaccgatgcacgggaatatcggtgccgacgctggcctcacgtttggtcatgaatccagtttcgccgcgttcggccagcagacggttgaccacgctgacattatggtcgtcaagcaccaatcgaccgcaggagaacacttgcagacgggtcaatccgggcagtgcgcgcaaatcgtacttcaggaaatggtccataccgtcggctgaatacaccacggcttcggcgatgatgtcggcatcgcccagcgtgcagaccacataggtgacctgaggcatggctttgagcatggcgagcgcctcgttgcgattgccgttgatgcgcagtcccacaagcacctgactgtaattgccgagactcaacggattgcatacgggcacaatggtcatgatgcccgcatcggtgagccgtttgtagctttccgtcgccgcatatacggaaatgccgattttatcggcaagcgcctgcatggtcatgcgtccgttgcattgcagtgccgataccaccttcaaatcacgtgcggtgattgtggtacgcccttcatcctgtgtcattgcaccccctatgacagccatgtcatcaaccacacgctgcctgcggcggcggcgatggcaatcacgagaataatccagtcggcaatgctcatcgtgagattgacccgatatgtgcgtttcacaccgttccgattcaggttgagtccgcgcgattccatggcccagcccacactttggctcattttgtaggcgcggatcaatacggcgatgatgatcggcagatacgatttgaaccggtctacgagacgtacgaatatgttgcgttttttacctgccgcattgactttgccgctcagatcaagccctcgcgcacgctgcgcttcggacacggattggaagatggaaaagaacacgggaatataccgtaatgcggctgccagggtaagcccggccttgtagggcataccaagcgaggtaaggccacgaaccagtttggtctggctggtggtgaacagcgtgatgaaacatgcaaagccgagcgctggaatgcgcagacccatcaccgccgccatgagcaggttctcctgcgtgagacgcaaccatccccactgccagagcacgtgcgttccactctggtcaaagaccggccaaagcaccacgatgaacacgatgagcacggcgaggatcttccacacccatccaatgcgttcggcgggcacacggtcggtggcgagcatcacatgttcgagaatgaggatgccgaggatgaacgcccagttacgccatacgaggcaaagggccagcatgacgatggagatgaggaatttgacgcgcggatcggtgcgatgcaaccatccgtcgcctggcacatacaggtcggcatccatcagcgttcctccttgtcgcattcatccttggcgattttcaacaatacgtgggtcgccgataccggaccgcgcgacttgtacggctgccgcgcctgtcgcgcgggcgattgttgcgcttcctgcgatttgtcgatcggtccatattgcacgatatgaccgtcttccaattcgagcacgtgcgtgcaataccgatatacggcacgcatgtcatggctgatcatgatgacggtgacgccatgccggttgagtttttccacggttccaaggaatcgtgatgcgagacgatggtcgagacccgccgtaggttcgtcgaggacgagtattggcgtacgcatggcgatcaccgaagacaatgccaccgcacgtcgttcgccgtagccgagcgtggccggcgaaacatcctcataccggtgcaggtcgaacaatgtcatcatttcgtcgacacgtttgaacacggtggccgcgtcaagtccgagcgcggtcgggccgaacgcgatctcctctttggtgctggagcagaaaatctgatggtcgggattttggaatacgaatccgacgtgcgcggccatttcgcccacgctatgcttcgacacgtcgagcccatccacattcacgattccttgcgtgggttgaatcagcccgttcagatgcttggcgagcgtggttttgcctgacccgttgcgcccaataagccctacgaaggcgccctgttcgatatccaagctgacgtcgtccagtgcgggagacgcattgccgccctgcccatagcggtgcgtcacatggtccagactgatgatcgcatgcttcggcttggcgtcgttccctaccggcaacgccttgatgacgggagatggtccgtcgctcacccgcacgccggaggattccaacagtctacgttcccgggtaaataggctggcgtctccattgcgcaccacttcaccgttgaccatgaagagcacctgatcggcccagtaggcgatgtgttcggtatcctgctcggccatgatcaccgtcatggaacgggtctggcgaatgcggtcgagcacgtcgaacacttcctgcttgccttcggggtcgagggccgcggtgggttcgtcaagaataagcacatcgggttccgccgcgagcgcggcggcgatggccacgcgctgcatctggcctcccgacaggctggtcggcacacgcttgcggtatccggccatgccgactaagtcgagcatgatgtcgatctgcttgtcgatgatgtttggggctactccgcggttttccagcgggaaagcgatctcatcctcgacactcgagcagaacagctgcgcttccggatcctgttgcacgtagccgacgcgctccgacagtgccgagacggagtgcctgctcgtattcatgccgttaacttccacgacgccactcatggtgccgtcggccaggttcggaatgatgccggccaatgccatgcatagcgtggacttgcccgctccggtcggtccgatgatgccgacgaaggatccggaccggatgtcgaagctgacgcgcttgagactttccaccggcttgctcccgtcggtcagtggcgcgtacttccatcctaagtcgcgaaccgtaatcatgacgctcaccccgtgctttcacgcatttttttccgcagcaggtaaccgcatttcacaataaaacccgtggaatcgcctttcatcggcaaatccacgggcctgccttcacatgatattaatgtatcactcccccgccttaataccgaggttgcccaaacgtaccagcggcggataggcctgacgaacggcggtgaacagcgcgaagcccacaatcagacccaccgccatctggaaggagttgcccgcgatctcacccaacgccgggccaaatccggaaaggattccgcctgcgatgaaatagccgaacaccttccatacacctgcgatcaccgaaccgatgatgatgttcgccggattgaacttcttgacgagcaggcccacgagcacggcctgcaggccatcgatgacgaacgtgaagatggcccactgcggataaccggaaatcagatcgctcaacgccgggccaagaccgccgataatgccgcccacccatggtccgaacgcatacgcgctgaaatagatcatggtgtcggacaggttgaggtagccacggatcggggtcgggatcttcacgagcatggtcagcaccgtggtgaccgcggtcataatggcgatcagcggaatggtgttgacctgcaacgcctttttgatatcgttcttgacttcttgagccataatcgcctctctcttctctctttacgtaatccgcaatatcattaccactatttatctttttgaaagaaatctgaacttctttctttcaaaagatagaatttagatattacttttcgtaacaatcgcagattctataccatctgcgctacattacgatgacaacgtccgcgaatatggcgaaacggtttgtggcaccaaccttctcttcggtgccacaaaccgtttcatttgctcaggatggcgttattccgccgatccgatacgcctcacttggcgagacctgattcgcgcagagccgcgaaaccgcccttgagatcgtcgaggatgtcttcgatgttctcggtgccgatggacagacggatcgtgccctggtggatgccctggtcctcaagctcctccggcgtctcctgagagtgcgtggtggaggccgggtgaatcacgaggctcttggcgtcggccacgttggccaacaggctgaacaggtgcaggttgtcgatgaacacgcgtgccgcgtccttgccgcccttgatgtcgaaggtgaagatggagccgccgccgttcgggaagtacttcttgtacagctcgttgtccttgcggccttcgatggacgggtgggagatggattcgacttccggaacggtcttcaggtagtcgatgaccttcagcgcgttctcgacatggcgctcgacgcgaagcgacagggtttcggtgccctgcagcagcaagaaggccgagaacggagacagggttgcgccggtgtcgcgcagcaggatggcgcggatgcgggtcacgaacgcggaaccgcccagagcctcgtagaagttcagaccgtggtacgacggatccggctcggtcagggtcgggaacttgcccggcacttcggcccagttgaagttgccgccttccacaatcacgccgccgagggtggtgccgtggccaccgatgaacttggtggcggattcgaccacgacgtcagcaccgtgctccagcgggcggaacaggtacggggtggcgaaagtgttgtcgacgatcaccggcagatgatgcttgtgtgcgatggcggtgatggcttcgaaatccggcaggtcggcgttcgggttgccgaaggtctcgaagtagacgagcttggtgttctcctggatggcatcctcgaactcctgcgggttctcagcggagacgaaggtggtggtgatgccgtcacgcggcagggtgtggcgcagcaggttgaaggtgccgccgtagatgttcttggcagccacgatgtggtcgccggactgggtgatgttgcgcacggcgtattcgaccgcggcggcgccggaagcgactgccaaaccagcggcgccaccttcaagggctgcgatgcggtcttcgaacacgccctgggtggaattggtcaggcggccgtagatgttgcccggatcggccagaccaaaacgcgcctcggcgtgatcaaagttatggaacacgtagctggtggtctggtagatcggcaccgcgcgggaatcggttgccgggtcggcctgctcctggccgacgtgaagctgcagggtttcgaagcggtagttcttggaatctgccatggtttctgctccttgtggggaagtggttcgttgcttgtcttgctgaccacccgccttgccgtgtgtggcggttggtcaggtgttggtagcgacaataatccgacgtcgcttcgcaatgcaaaccgagcgttatcgcacttgcctatatccccttataaaccgttgcaatcattgccatccaggctttgcaaaactactctggtagccatcaaaaaacttgcgacacgccagcaaacggcatcatggtgactcgccgtacgaggcgatggggcggtgaagtcaggcaagcggctaaagtcatggtcaggcaatcgcaagagagggttcccatgaatgatgtgattctgttcgaccgtgacccacggtacattccacgtgtggccgcggtgcacgacatgtgcggttacggcaagtgctcgctgacggcggccattccgattctgtcggcggccggatgcgacgtatgccccgtaccgacggcgctgttttcggcgcatacgcgctacagcgtgttcacgttccacgatacgaccgaaattttggacggctatctggatgcgtggcgcaaggagaacgtcgatttggacggcgtgtattccggtttcctcggttccgccgaacaagtcgcgattatcaaacgtctgtatgcggattacccgcacgccttgcgtttggtggatccggtgatgggagacggcggcgagatctacgccacatacacgccggaattatgcgaggcgatgggcacgctggtggatggcgccgacgtgctgatgccgaatttgacggaagcgtccatgctgacgggacgcacctacccggggcagaacatcgacaacgcggaagtgaacggtattattgacgcgctgcttgccttgggagcgaaaaacgtggtgctcaaaggcgttgaccgtcaggatggcatcattcgcaactatgtggcatcggccacttccggcgcatccggcaagcaagagcttgcgcacgacaagctgccgttcatgacacatggcaccggcgacgccttcgcatccgcattatgcggtgcggtgatggccggcagacctctggctgaatcggcgcatatcgccggcgaattcgtacgccatgccatggaaagcacgcaattccagccgaaccacactgagcgcggtgtgagcttcgagctgaaccttgacgagttgacgcgtctggttcgccgctgaacattccaaccatatgcggtttcgggcgctccatggccgctcgccttgtggagcaatgtggataacggcaagttatccaccaactatcccaaacacgcccgaaaccgcatcctctatccacattcgccgttcgcccttgcttcgcgccggtcctttctgctggacttgaatcatgaacggcaacacaacacataacgttccgaacgcaacgcagcgctcggaacagcttcttgattccatcgcacggcgactgcatgatggcacactgtgcgcacgacaggtcggcgaactcggcgaacagtatgcggccgcatggctggaaagccaaggctggcagacgctcgaccgcaactggcactgccgatatggcgaactcgatatcgtttcacgcgacgatacgggaatcatcgtcttcgtcgaagtcaaaaccaggcggacgctccgctatggcactccgcaggaagccgtgacgtcatccaagcagatcaacctgcgccacgcggccgtgcaatggctgtcggacagcgaccatcgcacgccgcataacggcgtgcgcttcgacgtcgtcaccgtcatcgtccgtgatggcaaaccgcttgtccaccatatcgaaggagcgttctgatggctatcggcagcgcgctttccgtgggtctcatcggcctgaaagccttcatcatccaaatccaggcgttcgtatctccgggactcccctacttttccatcatcggacttcccgacacctcgctctccgaagcgagggaacgtgtcaaatccgcatgtcaggccagcggtgccaaatggccggaaacacgggttacggtcaatctttcgccggcgtccatgcccaaacgcggatcctcacacgatctggcgatcgcagcgagcgtgcttagcgcatccggaacgataccgcatgactgcttgaacgacaccgtcgtgctcggagaggtgaatctcgatggcacggtactgcccatcaacggtctgctgccgattctgctgcatgcacgcgatcaaggcgtatgcaaggtgatcgtaccgcatgccaatttggacgaggcggcccttgtgcccgacgtcgacgccattggaatacgtcacgtcggcgaactgatcgaactgatgggaggcaccgcgaactatacgatacccgatatgatccgagacgtggatgccaacgacggcgccatgtcggtatgtcctcctcccggagatatgaacgaagtcatggggcaggaaacggccaaatgggcgttggaagtggcggctgccggcggccatcatctgatgatgaccggtcctcccggcaccggaaaaaccatgctcgcctcgcgcattcccggcattatgagtccgctcagcgaatcggaacaactggaagtcgcctcgatccgctccctatgcggcacattgcccagctatggcatcagcgatgttccgccattcgaagcgccgcaccataccgcatccaccgcatccttggtcggcggcggcgcgggattggctcaaccaggcgcgatcacgcgggcgcatcggggcatcctattcatggacgaggcgcccgaattctcggcacgcaccctgcaaaccttgcgcgaaccattggaatccgggtatgtggcgatatcccgcgcgaaaggcaccacctactatccggcacgattccaactgatcatggcggccaatccttgcccctgcggctacgcatacggcaacggcgaacgctgcacgtgcagggaaaaagaccgtatcaagtacttcagccgcctgtcggggccgatcctcgaccgcatcgacattcagatcgaagtgcctcctgtggaacgcatcaacccaggcacggttccttccggcgaatccagccacgccatccgcctgcgggtcatggtggcaaggcaaacggcacaggaacgtttccgggaattcggatgggtctgcaatgcgcaagccaccggaacatggcttcgcgccaacacgtccacaaaagccatcgagctcgtgaaccatgcgttggccagcgaacggctcagcctcagaggggcggaccgagccatgcgactcgcatggacgctatccgacctgtcaggcaaaacctctcccggaccggaagagatgatgcaaggaatctccatgagaacgaggttaacatgaacgagaacacaaccgccgatacgagcgtcaacgcaaccgccatcgacgatgagaccctgtcacgcgcggtgctcacctattgtctggacagcgccgatgcgatgatgtacgcgctggtcaaaggcatcggatcagccacgcataccctgcaactgcttgccgacagcggtccgggcaatcatgaaagcgtggccacggcagcctataaaaccttggacgcggcgctcatcaacggcattacacgttggggacgcaccatcaatgctcgaggtatggcctccttccacggcgcaatggtctcgtggcagcatcgcctgaccacattgcccagcaccgaccccgaggagctcaaaacgtggttcaccgcaaacggcacgcagtggatcgtcgcgccgcatcacccctactggccttcgcagcttgccgacctcaccatacacacggactgggccgcgccattatgcctatgggggaaaggtgacccccaagcgttggtgtcatgctccgaaccggtcggtgtcgtcggatcacgcggcgtaagcgagtacggaaggcaaagcgcacacgagctcgccaaacaagcggcccgagcaggccatctcatagtgtcaggaggcgctctgggcaccgatgcggccgcccactggggagccatccaagccatggacgagatcggaacgcccctcgcaggacgcaccgtcgcggtattcgccggaggactcaactatatcggtccgaaaagcaacgagcgcctcttcgaaaccatcatcaaccattccggcgcgctcatctcggaactctgccccggaaccgttccggaagccagacgattccttatcaggaaccgcctgatagcggcgctatcatccaccctcatcgtagcccaggcacgcgcacgctccggcgcgcttaacaccgcaggatgggccaacgaactcaaccgccgtgtattcgccgtgccaggagatgtaaccatgcctcacaacacaggatgcaaccgactcatacaagaaggccaagcctccatcatctgctcgctgaccgatatcgacgaattctgccacgcagcgcatcgcccgcaatcagccgacgcggcagacaacgacgacgaaccgtcggaagagtcaaccgacaccagtctgtcgcaaccaaccaacgccactgcagccatactcaaagccatacgaacatgcagcgcgaaatacggccacgtctccactgacggtctactcgccatcctggccgaaagcaatcccggagaatactcaatctcacgaatcagcatggagctgggattaatggaactcaacggacttatctgcacacagcatggcaacatcaccatcaccgacgcaagcgccacatgacatcacgcccaacaacgccaccgccaagcctgcacagatcaacggaatccatcgaaaacatacgcatcagacacgcataaccacgcatgcagcggcaaacccgccaaccggcaaaccgcaatgaggtcacaccttgtgcgaaaatcgttgctatgagtccgaagcatgttgaagatatgtatgatgcagtaatcgtcggcgcaggcgcggcaggcctgtccgcagcattgggaatgctgcgaagcgaacaaatgcaagccctgaaggaagccggcatcgagccgaacatcctggtgatctccaaactccagccgttgcgctcgcacaccggttccgcggaaggcggcattgcggccagcctcggcaacgtcgaaaaagacgactggcactggcactacttcgacacggtcaaaggcggcgattggctcgtcgaccaggacgcggccgaactgctcgccaaagaggcgtcggaaaccgtaatcgatctggaacatgacggtgtggcgttctcccgtactgaggacggccatatcgcacaacgacgttttggcggacataccaaggatttcggcaaggaaccggttcgccgcgccgcctatgcggccgaccgcatcggccatcagatcctcttctccttgtggcagcaatgcgtggccgaaggcgtggaattcgccgaggaatggtacgtgaccgatctggtaatcaccgaagacggatccaaagtcgaaggcgtagtggcatttgacacgcataagggccaaacgcacgccatccacgcacgcaacgtgcttctggccaccggaggcgcaggccgcctattccacaccacctccaattcatgggatctgaccggcgacggcatggctctcgcactgcaagcgggactgcagcttgaagacagcgaattcgtgcaattccacccgactggtctggcgcataccggcattctgctgtctgaagcggcacgagcggaaggcggcgtgcttcgcaatgccgatggcgaggcattcatggaaaagtatgctcccggccatgccgatttggctgcacgagatgtggtgagccgttccattatggctgaaatcgatgccggccacggcgtggcggatccgaaggaccccgaagggccaaaggattgcgtgtggcttgatatgaccggtattgatgccgaccatatgcatgaggtactgccgcaggtggtggaaaccatcgaaaaatatgcggatcttgatccgacacacgatttcgtgccggttaagcctaccgcgcattacaccatgggtggcattccgatcaccaccgacggcgaagtctaccgttggcagaacgacgaacgaaatgtcgtcgaaggcctgttcgctgccggcgaatgcgcatgcgtgtccgtgcacggcgcaaaccgtctcggcggcaattccctgctggatgcatgcctgttcggcacccgctccggcaaggcgctggcggaacgcatttccagcgctccagtgaacgatcccatggctgaatccgacgccgacaatggttcggatgcggtccagcaggccgctgacacccgttccaacgaactcaaggatctgctggtgcagcttccggaagacgaggagcatgcagccgacaatccttaccagctgatggccgatctgggtaccgtcatggaacgcgctgtcgccgtgcgctgcgacgagcagggtatcgaacaggcgctaacggcattgcatgatgagtttgcgccccgtgccgaagccctgcacgcgcattccgactcccccacgttcaaccaggagatcaccgccatttgggaggtccgccaccttctggaactcggcaaggccgtactcacctcatccgatgcgcgtcacgaatcccgtggctcgctgaagcgtcttgattttccggaacgcgacgatgagcatttcctggcccattccatggtgaatgcctccggccagatttcctggcagccggtgcacattgtgaatatgccgccaaaagcccgcgaatactgattccgctgggcacggcgtatggcagactagttgacggttttattggaaaggcgggtacatgagcggtatggaaaacggcgtgaatacggtgacattgcgggtgaataggtttgccccgcgcgccgagcgtgcccgcgaccgcgaacgtggcggctctccgttcgccagaaaaagctctccgtttggggattccggcacgtcggcgcgccgccgcccgcgcggcaagcagtggttgcaggattacacgttgaacgtgcgtccggaagacacggtgcttgattgcctgttgaagatcaaacgcaccatcgatccgacgctggcattccgctattcgtgcggacatggcatgtgcggttccgatgcggtgtccatcaacggcacccccaccctgctgtgcaccgcgtccgtcaaggattgggccaaaccgtcgaatccgacattggtcgacgatgaaggattccgacacaccggagatgtttccgacattcaggaaaatgcggtcggcgcaggggatcttggcgtcatcgagctcgctcccctgccgggtttcccggtgcagcgcgatttgattgccgatatcgatcagatgctcaaccaaatcagaaaactcaagccctatctgcaggcgcgcggagaactcgccaccactgcggacggcaagatcaacgctttcgaatatctgcagaatccccagcagcttgccaagtatgagcttctcagcaactgcatcgcctgtggcacttgcgaaggcagctgccctgtgtatgcgggcggcgaagcgttcatcggacctgcagcccttatcgcggcgtctcgtttcatcaacgattcccgcgacggtcaggcgaacgcacgcatggatgccattgattccgccgatggcatcgccgcatgccagtcggtccgcgcatgtacccgcgaatgcccgcgtggcattgacgtcggcgaggaaatctggcagctgatcgcccaagtcaaggaacgctgaacccatggatagaacgtcatataccaatctcgccaagtcatgggaatacgttgaggaccatgcgttctcccgccagtcaaccgacttgaatgctattcgcacccatgctgaagaagcaggcattccgcagggttcagcagcccaagccgagctgttgcgcatgctcgtgcatatggtgaatgcgacatcggtgatcgccgtcggcaccggttccgtggtggaaacgttgcagctggtcaacggtttggataattccggtcagcttacggcggttgattcctcttcccagggcattgcgctgattcgtacgttgtttaatcggctttccgacgagacacagaccacgcttcgcgccgtcaacgctcccgtcgacgtgtttttgccacgtctgaatgcagaaaactacgatttgattgtagttgccggcgacgcggaaaattacggcgcttccttcgagcaggctccccgcctgttgaagaagcatggcgtaatcgtgttcaccgatattcttgcttttgattcagccacgtccgcaggcggcgttttgaatcccgccaatcgtgacgccaaatccattgccatgcgtggtttgctggaaaccgtggaatccgatgagcgtttcgtcactgcgctcaccccgacaggtacaggtttgctcgtggccgtcaagcgctagagcatgccgttcccaacggcttactggcttccctacttttttgcaaaagccgacgctcatcatgtaatgggcgtcggcttttgctacgttctggcatatgcgcaggatcgctctatgtcagaacaccgttatttggtctttggatgcgcgtcgatcatctggctgaccacaacagtgccgtcttccaacacggattccacttccccagcagcatcctcgtcagcagtatgatgcttatgcttcgaggatgcggcagcggcaagctcaaacttcttggattggcggctcagcagaatgccggaaatcaccgccgcgactatggaaccgaccaacacaccgaaacgtgcttcagcagacagttcggcatcctgatatgcaagcgaggaaatcaggaaagatacggtaaagccgatgccacatgcgcaggccgcggggaacatgtcgcgcacacgcaatcccttagccattttcaatccggccacatgcgtggaaagccatgccgtgatcataatgcccaacggcttgccgaccaccagagccaccataacggcaacgacgaccggcgaaatgaacagggccaacgtcaacgattcaaaatgcacaccagtggcgaacaaggcgaaaatcggcagagccagcaacgcggaaaacggctgcagcttgtccgcatagcgttcggcgcgtggggttttctctccgaaacgctcatgagccggcgtgagcaatccaacaagcacgccagccaaagtaggatgcacaccagcttcgaacatcatcacccaagccagaatgccgacaatggccacggcaagccatggcactttgcgcatacgcaccaggaaataccatacgaccgcacacacggcgatgccggcgaaccagtaccatgcgttcaccgaagagaagaacaccgcgatcaaaatgatggcaagcagatcgtccaccgtagccaaggtcatcaggaacgcgcgaatggagcccggcagcgctttggcgaacaaagcaagcacagccaaagagaacgcgatatcagtggccgtaggaaccgcccaaccatgagacatctcaccaaaggtgaaactcgttcccgaagcgatggccaacggatcggatccgaaaccggagaacaggaacaataccagcaggaacaacaccggaggagccatcataccgcccacagcgcacagcatcggcactgcagcagccttggggttcgacagcgaacctgtggcgagttcctgtttcaattccagtccgacagtcaggaagaacaccgtcagcagaccatcctgcacccagtgtcccaatcccatatcgatattggtgtagggaatggcgatgcggaaattctccaactcttcgaacgcatgcgccgtgaacggcagattggcaagcaacagacctgcgagggcgaagccaagcataatcagaccagatatgcggtcggaagcggctatgtatcgtattttcgcccagagtccctgcttacgttcggtcattgctctcccgtctgttgccgcgagtatccacggcccgccattcacttaagaaaagcgtctgcggtattggcatgcgcagacgcttcaatagcggttccagtgtaccgagaggtgtcggcgtttatgtttccaaaccgtctttttcactggtgtttacggttttattcggcatggcggcttttcttgtaccgcaccgttcgctcggagagaaaccgaacgtatctcgacaacagccgctttacataagcattctggtaggtttgcgaatcgcattgattcgaacactattcacggcagcgccgccgttacttccagaaaaaagaaagcctcctccgcatttcgcgaaggaggttcatgtgcgcgagacaggattcgaacctgcgacctgctgatccgtagtcagctgctctaatccgctgggctactcgcgcaacgtcatctcatttatttatgccgcctgatgaccggtggccggtgcgcgagacaggattcgaacctgcgacctgctgatccgtagtcagctgctctaatccgctgggctactcgcgcaacgttgcttgttttcggcaactcgaataagatacacccaaatggccgcgcagcaaaatctcggcgtgtcgcgcctgttttcgtggatttcgcaccggcatccatacttgcttcaaccctatgaaatctgaactctcgcacatacgacgcgcaacacgccgaatgcactacgcggcacgtctgcgaggaatctcctccgtggaaaccttcaatagtttcggagtgccggaaccattgacggacgcctcatccaccaccacctccgatacgccagtcacgcttggtagctggaacatcgtgtcctccaaggttttttcgataatcgatcgaaggcctcgggcgcccgtgcccctgcgaatcgaagtggccgcgatctgccgcaccgccccctcagtgaacgtcaacgtcaccccgtcaatcgcaaacaacttctgatactgcttgaccagcgcgttctccggtgcgaccagaatgcgcgccaaatcatcctccgtaagctcctcaagcacgctcaccaccggcaatctaccgatgaattcaggcaataaaccgaaatcggcaagatcgtcggccgaagcctgggcaagcagctcacgattcggcacctcatgatcatgccacgcggcaccaaatccgctttcacgagcgcccaaacgctgcgccacaatatcggcaagcccgacaaacgcgccgccgcagataaacagaatgtcacgagtgtcgatctgcaccgtctccatctcacgatgcttacgcgaaccctccaccggcacggatgccacagtaccttccaaaatcttcagcagagcctgctgcacgccctcaccggacacatctcgcgtaatagacgtgttctcgccgctcttacgcgctatcttgtcgatttcgtcaatatagacgatgccctgctgcgctcgcgccacatcgccgtcagcggcctgtataagccgttgcagtacggtttccacatcgtcgcccacataccccgcttcagtgagtgtggtggcgtcggcgatgacgaacggcacattcatgaccttcgccagcgtctgcgcaagatacgttttgcccacgccggtcggccccagcagcaggatattcgatttggacacctgcacgccggccagtggatcgtcgctcgcatgcgccgcacgatcgcgcaatgccgcggattcacgcatttccatattgacgcgcttgtaatggttgtatacggccacggaaagcgttcttttagcggattcctgcccgaccacgtagttgtcgagataggcgctgatctgtgcgggcttcggcagctgcaatgtgttcagctgggcgtctttgacacgttcttcggaaatgatgtcgacgcacagttcgatgcattcgtcgcaaatggccgcacctgatccggtaacgagcttacgtacctgattttcggttttgccgcagaacgtgcatcgtgacacttcatcgttgtagctgaccactcgtcccattcgcacccctttgtttgccgtacctgccattgagcaatcgccatcatgcaatcatcattgaagaacagaatacccctgccaacgcccggcaggggtattgatttgtgaagatgcgacttcagatggaacctcgcatatgcgccgttcagctacggtgttccagcacttcgtcgacaatgccgtattccttggcctcaggtgcggtcaggaaggtgtcgacctcgatgtctttgcgaatcttctccacatcgcgaccggtatgcttggccagcgtgttctcaagccattcacgcatacgcagcatttccttggcttggatttcgatttccgtcgccttgccgaagccctgatcgatggccggctgatggatgagcacgcgcgcgttcggcagcatcagacgcttgcccttggctccggcggccagcagaatggcggctgcggaagcggcctgtccaaggcatacggtctgcacatccggcttgatgtactgcatggtgtcgtagatggcggtcatagccgtcatggaaccgcccggagagttgatgtacatcatcacatcacggttcggatcctggctttcgagcaccagcagctgagccataatgtcgtcggcggaagtgtcgtcgacctgcacgcccatgaagatgatgcggtcttcgaacaagcgggtgtacggatcctgccttttgaaaccgtacggggtcttctcttcgaactgcggcagaacataacggttctgcggcgcgaaagcggcttcgcgggctgctgcagcctggaaaccaaccactccggtcggtcctgcgagacgctctgcgcgggctacgaatcgggattcttcgcttgccatgttcactctcccttggtggcgttcatcgtgtcgtgcgtggaaacgagcttatccacaaaaccgtattccagtgcttcctgcgcggtgaaccagtggtcgtactcgttgtcgcggtagatttcctcaacggtatggccggtctgttcggcagtcagctcgctcatggtcttcttcatgtccatgatcagttcagcgttgatgcgcacgtcggtggcggtgccgccgatgccgccggacggctggtgcatcagcacacgggcatgcgaggtcaggaatcgcttgcccttggtgccggagctcagcaggaactggcccatggatgcgcacatgcccaagccgacggtcgccacgtcaggctcgataagctgcatggtgtcgtaaatggccatgcctgcggtgatggaaccacccggggaattgatgtacagccaaatatccttcttcggatcttcagctgccagcatcagcatctgtgcgcagatgcgattggccatttcgtccttgacttcctcgcccatccaaatgatgcggtctttcagcagacggttgaaaatcggatcggcgggtccggccggcatatcttcgccggccatgacgggcaggggtgcactgaggttgctcaccttgtctccttttcctatgttctctatagtttcacagcctaccgcttcgaagcgacgggtggtgaaattgcgctcacagtggagtcttcacgctagaacaaaccttacttgacgatggtgttgtattcgggaacgcccatatagttgtagctcacttccacgtttttggccgatgccgcggtcacgttggtataccacaaaggaatcaccggcaaatccttcagcaacacacgttcgctctgccgatacaggctcacggccttgtccaaatcggtctccgcagcagcctggtcaatcagcgcatcaaattcgtcgctcttgtaatcaccattgttcaaacccttgccgtccgctgccgatgagtcgtatgcctgcaccagatagccttccggatgcggataatcggattgcatgcccgatttgaatgccgcgtcgatggtgcgctcctgaatggcgctgcgtagttccttggacgtggcgaacggatagctttccgcatcgatgccaagcgcgttgcgaatggaattggccgcagcctccacccactccttatcggtgccatcggcgctgtatgcgatgcggaacgttccgctccatggcgaaatcgcatccgccttcgcccacaattccttggctttcgtctcatcgtacgtaagcacgccatcagcgtcaagatcggtatcgtatcccttgatcaccggcgcaaggaaatcggtggcgggcgtcacggtaccgccgaaaatcgagccagcgatgttcttacgatcgatggcatgcgcgatggcctgacggcgatacttgccttcctcaccttggaaatgcttgagattctgcgaaatcgtaaatgctgagaacgacggaccgggcttgctgacggcggtgatgttcttttcgttctgataggttttcaacgcggaagtcggaatggcatcaagcacgtcaagattgtctgccagcagatccgaataggccgcgtcaagactttgatacaccttgaaatcgatgcctgcgttcttgacttcgcgcggccccttgtaggagtcgtctttttcaagaatgatttcttcgccgcttttgtacgccttcagcttgtacggaccgttgccaatcggcttttgcccgtattccttgggattcttgatgacttcggatggcatcggcagaaacgcgatatctccgattttgtacaggaacgccgaattcgacgctttgagcttgaccttcagcgtagtgtcgtcgaccacggtaaggcctgacaattgcgcggttttggaaccacttgcatcctgcagctcatcatagccctgaatatcttcgaaaatggaggctccgacctgtccattggcagcattggccgcgaacgaccagcttttcgcgtacgtgtcggcggtgatcttctcaccattggagaacgccagattcggtttaagtgcgatggtgtattcggaagcgtcgtcattcggcgtgatcgattcggcctcgaccaacgtctcattaccttccgcatcgaaagtgaccaggccgtcatacagctggctgacgattttccaaccggccatatcgctggtgtcacttggcagcaagccattcgatggttccgtgatattgacgctgaccaccttatcggcactggtgacttcctgctgggaatccttcgcctccacggatccacagcccgcaagcagcgcaactatggaaagcgccgccgtaatcggcttgagcagaccggtagtgatgccgctatacgggtgttgtagtctcattgctgtcctctcaataacacggtagagacagcatagcaagccgatattccttgacggaacgctttcctcactttacgctacaggctttttctatagcctgctattacgtttcgcaccaatacggaacgccgcaatcaagcaacagatggcaatggccacgataccaatcatggtagcgaacgtccagctgccaccgacagccgtagcgtgacggaacgtggcacccccctcttcgcctgcgccagcctgagccaccgacagaatcgtggagaacagcgcggtgcctgccgcgccgccgaactgcaggcaggtgttgaacacggcattgccgtccggcatgaactgaggtgcgatgttacgcaacgcattggtcatgatattggaaaaaccaagcgaataaccaaatccgaaaatgaagtagaaaccggcaagcgtgacgggtgtcagtcgcatggaaaataccagcagcagaatcggcccacaaatcgcggcgaaaaacgcgccgagaatcggacgcaccggtccgaaacggtcgtacagcatacctcccaccggtgcgaaaaacgcgccgatcagcgcacccggcagcaccaacgcgccggacaggaacgcgctggttcccaacgaaagctgcgccacattggtgatcacataaccgaaaccgatgccgacgatcggcagcagcatgtaggcgatcaaatgcagcaacaccatcgggtcacgcagccagcccaaacggatcagcggcgagaacgaacgcttcgacgaccagccgaaaaacagcaatgcccccaatccaacgatcagactcaccacggcgaacactgccgataccgtggcgctgccgccggaaaccgcggcgctgacggccactccagcttggttcaggaacatcaccaatccgcacaatgcaagcacaatcgacacgaactgcaacgaattgagacgcgcctcttccgtcgggcgatgctgttcgacgcattttaaaccgaccggcaacgagaccagcagaatgatcggaatgacaatcacgaaaatcgcacgccatggcagaatgctcgacaccgcgccaccaacggtcggaccaattgccggagcgacggtgatgaccagcgaaccgacgcccatcaaacgaccgactttgctctttggcgactgttcaagaatgatgttgatcatcaacggcgtggccacaccggaacccatgccttgaatcacacgggcaatgagaatgaccgggaacgcatgaccgacgatcataatgagcgagccgagcacggcaagcgccaccgcggcaaggaacaacgtgcgatgcttgaaacgacggttaagatacgacgacaacggcatggtggcggcgaccaccagcaggtagatggtggtgatccactgcacggttgcggtgtcgacgttgaattcccgcatgagttgcgggaaaagcaccgtcatcacggtttcggtgagaatgccgatgaaggcgagggagccgaccgccacgatggctccaatgagcttgccgggaatgcgttcgtccggcattttcctgacgttttcactactgtttcgactgatatggctggtggtttcgagcgttgtattccgttcttgcataatcactttccgcgcactttttcctgcggccatgtgcgacgccgcgattgacgcatgggccttgctcatagcaagcaggcatcaaccccaacgaagaattctagcggacccctagtccaacggcaacgaagaatgagaactgacaccacactaggctcgatcagagttaccggtttgaccaccgttcttctcatgcaggattttgcgaattttctccagtctcggtttgatctcatgctcgtagccgcgatcgttcggatggtagtattcccgccctgccagctcgtccggcatgtattgctgcggagccacggctcccggccaatcatgagcgtaccgatacccctcatgattgccccaacttttcatcagggcggtcggcgcgttcctcaaatgcaatggcacttggccgatcagtcccgcgtccacatcggcgagcgcactgttgatggcgttgtagccggcgttcgattttggcgcggtggcgacggcgagcgccgcttctgcgagaataatacgcgcttcgggcatgccgatcatggctacggcctgcgccgccgctacggttacctgcagtatttgcggagccgccatgccgacttcctcggaagctgcgatcataatgcgccgtgcgatgaaccgcggatcctcaccggcgcgcagcatgcgtgccaagtagtgcatggtggcgtccgggtcggatccacgcatggatttgatgaatgcggagatcacgtcgtaatggtcgtcgccgtctttgtcgtagcgcacggtggccacgtccatgacctgcgacaccacgtcgggagtgatggtcggccgcttcgagccttttttgcgtgccttgtctccggtgagcgcccctgcggcggcttcaaggattgtcagtgtttttcgcgcgtcgcctccggccatacgcacgatttcgtcaacggcttcgtcgttgattttgacttcgtttttaagcccacgctcgctttcgatggccctcttgatgagcgttttcaggtcgtcgggttccagcgattcgagtttgacgaccacggatcggcttaacaacggtttgatgatggaaaagcttggattttccgtggtggccgcaatgaaagtgacgtcacggttttccacgcttggcagcaatgcatcctgctgcgatttggagaatcggtgcacttcgtcgatgaacagtaccgtttccctgccctccgcgacaagacgatcatgggcgcgtctgagtacatcccgcacgtccttgacgccggaggtgactgcggaaagctcttcgaagactcgaccggactgtttggccacaatataggcgagcgtggttttgccgactccgggaggtccaaacagaataatggagctcggcgcggtcagcgagcctttggacgccggattggcgagtctgcgcagaggagagccctgtcctagcacccgcgattggcccaccacttcgtccacgctcgacggacgcatgcgcacggccagcgggcgtgtcatatcttcgggagcgtccatcgcaccaaacaaatcctcagtcataatttctactgtaccgcaacatacgcaataattcgaacacacgttcgacatttgagttcatgccagccgctagactggcaatcatggctgacgatacgaattacggttctttgggcgccttggcgccgaattggagcgatggcgagcgcaacatcgacacggacgagatctacgaacgctttttcgagtgggtggcggacgtcaaaggtgttgagccgtggccccatcaggaagaggccatcatggacctgctcgcgggcgatcatgtcattttgaacacgcccaccggctccggcaaatcactggtggcgttgggtatgcatttcgctgcgttgtgcacgggccgtcgctcgtattacacggctccgatcaaggcgttggtgtctgagaaattctttgatttggtggaggtgttcggtcgtgagaacgtcggcatgatcaccggagacacgcacatcaacgccgatgcgccgatcatctgctgcactgcggagattcttgcgaaccaggcattgcgtgagggccgtcatgccgatgtcggctgtgtggcgatggacgaattccattattatggcgattcggagcgtggttgggcttggcaggttccgctgctgacattgccgaacacgcagtttttgctgatgagcgccacattgggcaatgtcgatgcgattgccgacaagttggaggacatgacggacacggacgtcgacatcatcgccgatgcgccgcgtccggtaccgttgacgtacgagtacacgcttgacccgttggagaaaaccgtcgaactggcgttcgacagaggggaaacgccgatctatgtggtgcatttctcccaagacgccgcattggagacggcgaacgccctggcgagcacgggagtgtccagcaaggagcaacgtgcggccattgcggaggcgatcaagggcacgaagttcaccacggcgttcggtaagattctgcagcgtctgctgcgtaccggcgtgggtattcaccatgcgggcatgctcccccgctatcgccgtctggtcgagcagctcgcccagcagggtcttcttccggtgatctgcggcaccgacacgttgggggtcggcatcaacgtgcccattcattccgtggtgttgaccgcattgaccaagttcgatggcacgaagatgcgcaaactgcgtgcccgcgaattccatcagatcgcggggcgtgcgggacgtatgggcttcgacacggagggcttggtcatcgccgaggggccggaattcgaaatcgagaacgccaaggccctcgccaaagcgggcaacgacccgaaaaagctcaagaaagtcaagcgcaagaaggcacctgagggcttcgtcacgtggaatgagaacacgttcgataagctgatcgacgcggaccctgaaactttggtgccgcatatgaaggtcacgcattccatggtgttgaacgaagtggcgcagggcggcgacgcacgctaccgcatcgatcgcctgatcgatgattcagcgcagactccggaacagaaggagcgtcttcatgatcgtgccgacgagatcttccagaccttgttcgacacgaatgtgatcgaaacggaagaccgcgatgatggtggcaaggactatttcatgaccgtcgacatgccggatgatttcgcgcttgaccagccgttgagcccgttcctgctggctgcgttggaactgcttgatccggaatcggaaagttacgcgcttgacgtgatttccatggtggaagccacgttggaggatccgaagcaggtgttgcgcgcgcaggaacgtcaagcccgcgacgcggcgatgatccgcatgaaggaagacggtcttgactatgacgaacgtatggaccgcttgcaggagatcacgtatccgaaaccattggaagacatgcttcaggctgcgttcgacgaataccgtcacgatgtgccttgggccaatgattattggttgagcccgaaatcggtgatccgggacatggtcgaaacggcctccgatttcaccggttacatcgcgcgctacaatatcgcccgctccgaaggcacgctgctgcgctatctgtctgacgcatatcgcgcgctggcgcgtaccgttcctttggagaagcgcaacgaacagttacgggacatcatctcctggctgcgcgttgtggttcgttccatcgactcctcgctggtcgacgaatgggagaacgcgggagccggcaccgacgcttccgaagccgccgcgaacctggccgcgcccggcgcgaagcaggccgtggtggaggatcgtcgaggcctcaccgtgctcgtgcgcaacgccatgttccgccgcgtgcagctcatggatctcgacaaacccgacgagctcggcgcgctcgacaaagactggggctatggcgtgcacgaatgggaggatgcgctcgacgacttctacgatgagcacgaatacgtcaacacggatgcgaaagcccgtagcggcgaactgttcattctggacgattccaaggagaacagcgaacacagctggaaagtgcgtcagatcatcgacgattccgatggcgaccatgattgggccatcaccggaaccgtcgatttggacaccacacagtcgagcggcgaagtcgtgttcttcgactacagcgtttccaactgacgccgcatttcatcggcatcgacttccaagggcggccagatcatgttcatgttcttcaatacgttacggagcagttcagacacaaccgcccttgaataccaacgattgtcggcaggcaccaagtaccagggcgcctgctcggtgctcgtacgcacgaacacgtcctgccatgcggccatgtagtcatcccaacgggcacgcgcttcaaggtcactcgggtcgaacttccaatatttggtcggatcctccagcctgctaagaaaatgctccttctgctcctctttgctcaccacaaggaatattttgatgatggaacatccgtccgcaaccaattgcgattcgaatcggttgatttcgtcatatcgcgcctgccatacctcttccggataggttttgtaaatgcgcggcatgacgatatcttcatagtgcgatctatcgaaaatggagatccaaccattctgcggcagttcccgtttgatgcgccacaaataatcgtggtccttttcctcgcctttgggagcaccgaaaccgtgataatgcatgcccatcggatcgccctggctgaatacgtgacgcacgatgccgcctttgccggaagcatccatgccctgcagaataatcaacagacgacggcgggaacctttcactccattggcgtacatcagtcgctgatatcgtgcgatttcagaagaactgatcgcaatgaatcgttccgcatcatctttgttgccgtcgaaacccggcgtggaatcgccatcgattgcagcgaccctcgtatcatgatggaatcgcaataactgactgggcggaagcgtccacacggaactgagcaactcgctggccttggcaacattcgcaagcccttcggcaacggaactgcagttctcccccttctcaagcctgtcctcaaccttgttcaacgtcttcgcaatggacgacgtcttcgcatccttgtctttgtctgacatgtcaagcctcctcgcttgtcccctatgatagacgatgcggcgattgaaccgtggcatcgccgcacccaatcgccgcatcccgcttttctgacgttttgtctgacttctttcacgcaatagggcgctgattcctcgctctttgcaagaaaccagcgccctatcggtcttctcagatcaaatgacgtcactgcttgggcttatcaccctttgatttgtctgacttcggcttgtcgaatctcagcttgtcctgcttggacgtatctttgatcggcctgccgttcttatcgaactcgacttggctttccggatgcgtctcatcgaatccctgaacatagcgggtctgacgccaatgtcgaatcgacgcgttggaaccacgatggtgcacatggtacaggcgctgggcaccgccaagcggcacaccttccctagccacggcgatctggttcacgttcgacggatccataatggcgatcggagcgaccggttccggttcggcaggtgccgcagtgtgcttctgcatgcgttccggcagccattccgcaagacggctcagcagccagcatgcgatgaagtagatgacggcagccacaaccaatgtctgcagaatgttgaagtacatcgaaccaagtcgacgcgattcctgcagcaaatcggtgtacatgatgatcgagccgagagcggtatccttcagtaccaccaccaactgcgtcacggcggcaggaagcatggcgtagatggcctgtggcacttcgatttccatcagcgactgcgtgcgggtcaagcccaaggcgagcgacgcctcacgctggccgttcggcaggttgccgacaccggaacgaaccagctcggccaccacggaaccgttgtagatcaccaatgcgagcaccacagcccagtatgcggggcttgacatgcctgcgaaagcgaaccaacgccagaagaagatcatcagcagcagcacagggaccgcacgtgcgaactcaacgatggcgccggaaatcgcacgaatcacgatattcggcagcagacggccgataccgaaaatcagaccgaacagcactgcgccgatcactgccaacacggaagctcgaatcgtggcccacaatccgggcagatagaaatcggtccatgcttcagcgtcaagcgccggcttccacaactcccagctcagctggttctcgccatccggcggattgtgaagcctcatgagaatgagcacaactacgattgcaaagacaatgccggcaatccagttgacgatacgaatggttttacgggtcttaggaccgggctggtcgaacagcaccgcgctttcatcgcttgccatggtgcgtcacctcctcaccgcgagcttgttggacagatacgtggtcagcatgccgatcggaatgatcagaatcacataaccgaatgcgaagatcaggaagatcggaacaatcacgtcggaacggtattcgatcatttcgctcatcaacgacgaggtttcggtggcgacggaagccgcggccgcaaccgtggaattcttcagcaatgcgatcaacgtgttgcccagcggtgccacggagccacggaacgcctgaggcagaatgacctgggtggcggactgcatgaagttcaatcccagcgcacggcaggcttcagcctggccaagcggcacggtgttgatgccggatcgcagcgattcgcacacgaaggccgccgtatacaggctcaaaccggtgacggcaagccagaagaagttggtggcgaacgtgtcggagaagctgagcttcagctgcgcgtaggcacccagcaccatgaacaccatgatgatggtcaacggcaggttcttgaacagctcgacgtaagcacccgagaccatacgcagcgacgcgaccggcgagatgcgcatcatcacgaggatgacgccaagaatcgtggagaacaacgccgaccacagggtcagttcaatgttcaccaagaacgcagccggcacattgtactggctgaacaatgagatgaacgcttccattatctctccccctcagtcggctccggcggattgtacttcgcgttcggcgtgtatgcggtgcccttcgtgttgtcggaaatggcacgctgccaagaaccatcctggatcatatcggcgatggcgttgttgatctgggtggccagcttcgtatcgcccttcttgatgccgacgccgtaatactcctgggtgaacggcttgccgaccacgcgcagacggccgcgggacgcggaggcaagaccagccaaaataatgtcgtcggtggtcaccgcatcaacaatgccagagaacagtgcggtagcgcactccgcgtaaccaggctgctccatgagctgcacttcgttggcgaacttctccttgacggtgaccgcggaagtggaaccggtcacggagcacaaacgcttgccattaagatcctccggaccattgatggaggtttcatccttacgcacgagcagatcctgacccgccacgaaatacggtccagcgaaggagacaaccttcttacgttcgtcggtgatggaatacgttgcaacgatgaaatcgacatcgccattctgcagcatggcctcacgctgcttcgacggtgcctccttccatacgatctggtcttcggaatagccgagtttcttggcgatgtacttggccacatccacatcgaagccgacataggtgccggacttcttgaatcccaaaccaggctggtcgaacttgataccaacgcgaatcttgccatcggcgtcgtccgcgccacaggcggacactgcgaacacgcatgcgcatgcgcagaaggtcgctataaccctgcgtagcatacgcttcgccctcatagaaagtctcatatcgaaaatccttcttctgtcttattcccgtcagtcatttcagtgggtgagaatcttcgacaggaagtccttggcacgatcggtcttcggattttcaaagaagtcctccggcgtgctctgctcaagaatctggccgtcggacatgaacacgaccttgtcggccaccttgcgcgcgaagcccatttcgtgggtcacgcacagcatggtcatgccttcgtgagccagctccaccatgacgtcaagcacttcattgaccatttccggatcaagtgcggacgtcggttcgtcgaacaacatgaccttcggctgcatggcaagcgctcgggcgatggcgacacgctgctgctgaccgccggaaagctgcgatggcatcttggaagcctgcgaagccacgcccactcgggagagcaggtccatggcgagatcctcggccgccttcttatccatgtggcgcaccttgatcggcgcaagcgtcacgttttcaagaatggtcttgttggcgaacaggttgaacgactggaacaccatgccgacctcggcacgcaggctggcgagctccttgccttcctggggcaatggcttgccatcaatgcgaatatcaccggaatcaatggtttccaaacggttgatggtgcggcacatcgtggacttgccggaaccggatggaccgacgatgaccagcacctcgcccttcttgacggtgaggttgatgtccttgagcacatgcaagtcaccgtagtgcttttcaacgtgggtcaattcgaccagcgggcggtcgctgtcttccgtacccggcatgatcgggcgcgtctcttgcgtttctttgatatctgtcatacggatagtatatgaaagccatgtttccgcggccgtcaccaccccctgacgtgctcgaaatatgagacaacgttgtcccaaaatgcatcatagcgcgttatcgaccgcaataccgatatcttgagcgccgtacgtggcagctaccaccatcgcggcaattcgatagccagcaccgctattacgaacaatacaaccaccgcaccgaacaccactcgttcgggcaccttggatttgaaaccatccacaacgcgacgccacgtatcaccaatgctcatgcataccaacgtaggaacgccaagcaacgagaaagagccgaacaggcgaacgcaagatgaatttcaccctacattcgcctgtcttttacatgcagattcgtatgaccatccgtcacacgatcgcagcatttcatccgcgatcagcgattaagcaatcgccggggccaagagagcactcagagcactttggaaaggaacgtcttcaatcgttcgctctttggatggttgaagatctcgtccggagtgccttcctcctcgatcacgccggcgtcggtgaagatcacgcgggtggccacttcgcgggcgaaacccatctcgtgggtcaccagcaccatggtcatgccgtcttcggccagctcacgaatgacttcgagcacatcaccgaccatctccgggtcaagcgccgacgtggcctcgtcgaacagcatgaccttcggacgcatggccaaggatcgtgcgatggcaacacgctgcttttgaccgccagacaacgagcgaggcatgacatcggccttttcggccaatcccacggttttcagcaatgccatcgcatgttcacgcgcctgctcgtcggtttccttgtgcaccagtttcggcgcaagcgtgatgttgtcaatcacgctcatgttgttgaacaggttgaaatgctggaacaccatgccaacttgctctcgaacctggtcgatgttcacatgcggatcacccagatcatgaccgttgaccacgatctggccgctggatgcctgttcaagtccgttcaggcagcgcaacatggtggatttgccggcaccagacggtccgatgatacagatcacctcgcccttgcgtaccgtaagatcgacgcctttgatgacttccatatgaccatagtttttatgcagattcttgacgtcgatgatcacttcgccatcattgttgccgtgattgcagttctcgctcatcgattcaccttcctgtcaacgatattggccagccatgtgaggatggtgatggccacgaagtacatcacaccgacgatcagcaacgtttcggtgacgcggaagttcgccgcatacaattgctgcgcctgatacagcaattcaccaaagccgatggccagcagcagcgaggaatccttgatcataatgaccagctggttgatgatcgacggcatggcgattgcagtggcctgaggcatgatcacgcgcgccatggcctgatgatggttgaggccaagcgagcgtgctccctccatctgaccagagtcaacggactgcacggcgccacgcacgatctccgccagatatgcgccggaattgagcgacaacgtcaacgcacctgcaacccaaatgttcacactgtgtccgataagctgcggcacaccgaaatagaagaagaacgcccacaccagaatcggagtgccgcggaacactgcgatataaaccttggacacgcctctcagaatcttgttctccgatactttcatcaagccgaaagcaacacccaacgccagtgcgatcacaaacgacagcaacgtgatcaacagcgtgttcttcagaccagtcagcaaagccggcatcgactgtttgaccagaccaaagaaaccgaccttcttctgcgcctcaccgtcggcaccgttgtcggtgaccttgccggaaatcgcctcgacctgttccttcgcgccatcggcacccaaatactgtgcgacaatcgtctcatactcgcccgaagcgatgagcttgttcagaccatcgtcgatggcggccagcagatcggcgttcttgcctttgttcacggccatgccgtattcaccatgcggcaccttcggagtcacgatcttcaaaccgttgttttgggaaacaccgtaggcaagcaccggatagtcgtcgaacacggcatccgcattgccggatttgaccatctcgtacatggttgatgactggtccacggaagtcacggtatagccgtattcgcttgcatgctgtttggcgtaggattcgccttccgatccggttttcgcgacaacggtcttaccgtcaagatccttgtagctggtaatactatcgttgttttcagcgatggccatttgaataccggactggaagtaaggattggaaaaatcgtaggtcgccttgcgttcgtcggtgattgacatgcctgcgatcaccacatccacctgattggagctcaaagcctgcaatgctgcattgaaacccaatgattggatggtgacttcgaatccttcttcttgggcgatggcacggatcagttccatatcgataccggtcatcttgccgttctcgcgatattcgaacggtgcgaatgtggtatcggtgccgaccgcgtaggttttgcccttgactgcggagggatctccgacttcggcggcgttagcactaactggggatgcgatgagtgcactcactgccacaatcagtatcatcgccaacgcgagaagtcgcatccagacaccatgaaaatcatgtttttccaacgattgcttcaaattcatactacagattcagttctttctcataatatttcagatactcatctttgctccaccataccggcagcaagagaaaatagacagcgtaaacaataaaaacaggctgtccttgcacggtctctcatgcaaagacagcctgttatctcaaagcgaaaacactatcagtcttcgtcttcttccggatcataatcaacgccggtttccgcacgctgttcgtcggaaatcggagccggggcgccggtcagcggatcacgaccgccgccagccttcgggaaggcgatgacgtcgcggatggagtcggcgccagccaggatggcggcggtacgatcccaaccgagagcgatgccagcgtgcggcggagcgccgtacttgaaggcttcaagcaggaagccgaacttgtcggcagcctcttcaggagtgatgccgagcacatcgagcacacgatcctgaatgtcatcacggtggatacgcacggaaccgccgcccatttcgttaccgttgcacacgatgtcgtaggaatcagacatggcgtgttccggatccttgtcgaaggtgtcgatccaatccttggacggcatggtgaacgggtggtgcatggaggtccacttggagtggccgactgccacatcgtcgtcatccggatcgtcggtgggcttgaacagcgggaagtccacaacccaagtgaaagcgaaatcgtcgggcttgagcagaccggcacgatcggcgagttccacacgcacggcacccagcagctcctgagcggaggtgcgacggcctgctgcgaagaacacggcatcgccgtcttctgccccaacggcttccttcaggccagcgcgctcctcttcagacaggttcttggcaacaggtcccttgagctcgccgttctcagcgaacaccacgtaggcgaggcccttggcgccacgctgcttggcccaatcctgccaagcgtcgaactggcggcgaggcgtggccgcgccacccttgaagagcaccgcaccaacgtacggagcctggaacacgcggaacggagtgttcttgaagtagtcggtcagctcgatcagcgggttgccgaaacgcagatccggcttgtcggagccgtacttatccatggcttcctgccaagtgatgcgctgaatcggcagctggatctcatagcctgcggacttccagatggcggcgatgaccttttcggccatggccatcacgtcttcctgatccacgaacgccatttccatatcgagctgggtgaactccggctgacgatctgcacggaaatcctcgtcacggtagcagcgggccagctggtagtagcgttccacgccggaaaccatcagcagctgcttgagaagctgcggggactgcggcaacgcgtaccaagaacctggcaccaagcgggccggcaccacaaaatcgcgagcgccttccggagtggacttgatcatggtcggggtttcgacctcttcgaagcccatctcttccagagcgtggcgagcagccttcgacatctgggaacgcagcttcagattgcgctgcatggacgggcggcgcaggtcgagataacggtacttgaggcgaacttcctcgcccggcagcttgttctcggactcgttttccaacgcggtggacacctggaacggcagcgcgtcagacttggcgagcacctcgatgttttccgccacaacctcgatcttgccggtggccagatgatcattctcgttaccgtccggacgcaggcggacctcgcccaccacctgaatcacaaactcggagcgcagcggacgtgccatgtcttcgtcgtagataactacctgcacaagaccggtgttgtcacgaagatcgatgaaggccacgccaccgtggtcacgacgacgatcgacccaaccggagagcgtcaccttctgaccgacgagttcctcggtcacttcggttgcatgatgtgttctataagccgtctggctcatgcttcccctattccttgttctctaatgattgaagtcttgcgatttcaggcttctacggtaacggtttgctgggcatacacagtatccggctcccaagactgtgcgttggccggctgctggtcgcccgtgatgatgttcttgacttcgtccgaagcgtcctgcgcggacttgtccgcggggaaccacacgtatgggatgccgagcttgtcggcatacttgatctgcttgccaagcttggctgcggtcggagccacatctgccgcaatgccacgggcgcgcagctggttggcgatttggttggaagcggaacggtcctcctcgttccacacggccacgagcacggaagccggggacacgcgattcgcgtgggcaccggcggtgtgcagcatgtacgaaaccaagcgggacaggccaatggacaggcccacgcccggatacttcctgttgccctgcgatgcgagattgtcgtaacgaccgccggaacagatggaaccaagagccgcagcaccgtcaaggaacgtctcatacacggaaccggtgtagtaatccagaccacgcgcgatcttcaaatcagcgatcacggagcccgggcgaatacgagcggcctcgtcaacaatcatcgccaacgtgtcaagaccctgacgtgcgagcacgtacgcctcggaatcattggcaatgccatgcttctcgcacagcgtgtcgaacttgccggacagttcagcgccgtcagctgcggtcagttcagccagctcaaggcacgcacgtgcctgattctcgtcggctccacagccttcgaccagcaacttggccacttcgtcggcaccgatcttgtcgagcttatcgatctcacggagcacgccctcgacatcggtcaagccaagaccacggtagaaaccttcagaaagcttacggttgttcgcatgcacggtggccttcggcaaaccgaactcacgcagacgttccaatgccgataccatgaccagcggcagctcgacctcgtaatgatcgggcagatcaccgttgccgatcacatcgatatcggcctgcacgaactcgcggaaacgaccttcctgcgggcgttcgccacgccagaccttctgaatctgccaacgcttgaaagggaatgccaaatcgccggaatgttcgaccacataacggctcagcggaacagtcaaatcgaagtgcagaccaaggcggtcctcaatcggagtgtcggactcatgaccgacctcctgaaggcggctcagcaggtaaatttccttgctggtttcgcccttcttgagcagactcgaaccctgctcaacagcacgagtttcaatgccaatgaagccattgagctcgaaaacttcacggagcgtgtcgataacacgctgctccacaacacgttcagaggggagccactctggaaatcctgaaatagatgcgccttttgccacgattccctataataaatgaggttgcggaaaatgcagcgcgtttttcaggctttgaaagcacgttcgcacgatccgcatcccctgcactacatgaagcttacttaaaggagctggccatggccgacgagaatgtcaccgcgtccgagaacaccaatgaaaccaccgagcaggcaacgacgcccgcagtcaaggccagcaaaccggccgttccgagcccggcttcgatgaagccccatgctccgagccccgcggccttcgccaagaaagctccacagcacaccgctccggctgccgcatccaccggcttctccgatgccgatgtgaagaccgccgaagcattcggccgtgtcgccgacgatggtactgtgttcgtcaaggacggcgaaggagaacgtgaggtcggtcagttccctgatgcctccaaggaagaggcgctggctctgtatgcccgccgttaccttgatttgaaggccaagttggacctgttcgcgaacaagctcaagtccaacaatgtgaagtcccgcgaaatcgacgagaccatcaagacgctgtccgcggaaaccgaacagccggcagtggtgggtgatctggccgctctcaaggcccagttcgaggcgctgaaggaggaaggcgcagccaagaaaaccgcgttgaccgaggcacgcaaggccgctatcgccaaggccgtcgaggagcgcaccgccattgtggagaaggccgaggcgctggctgattccctcgacgagaacaccaactggcgttccaccgcagacaagttccgttcgctcttccagcagtggcaggagcatcagcgcaacaacgtccgcatcgacaaggaagatgcggacgccctgtgggctcgtttctccgcggcccgcaccaagttcaatttcgcccgccgcaagtgggtgcagaaccgtgacgaagagcgtaattccgccaagtccaccaaggaagccatcatcgccgaggccgaggcgctgcaggattccaccgcttgggttgaaacctcccgcaagttcaccgagctgatggatcgttggaagaaggccggtcgtgccggtcgtcgtgacgatgatgccatgtgggagcgtttccgcgccgccgcagacaccttcttcaacgcacgtcaggccgatcgtgatcagatcagctcctccgagaaggaaaatcttgccaagaaggaagagctgctggtcaaggccgaggcgctggttcccgtcaagagcgaagaagaggccaagcaggcccgtcaggctctcgccgccattcaggaggagtgggaccagatcggttacgtgccgcgtgacgaagtgcgccgcattgaaggccgtctcgatgctgtagacaagcagatcaaggccattgaggatgccgcttggaagcagtccgatccggaagccgacgcccgcaagtcctccttcgaagaacagctcaacgctcagctcgctgagcttgatcagaagatcgccgcggaatccgatccgaagaagaaggccaagctcgaatccgagaaggccaccaaggaacagtggctgaacgccatcaagtaagtcgcacatcctgatatttggttgcgccacagagatgcggtcaaatatcagctggacttcactcaggcataatcaagaaggctggtacgtaacgacatccgtcacataccagccttcttcgtataatcgcacgtgttctcacatgcgcaatcaccatacagaatattcaactatcattcgccgaattcggtagcacaaatatcggccaccgcatcaatgcaggcatcgacgatgagcttacctcgttcggcgctggaacctgcaggagtggccagtcctccgtaatccggaacgtcgcccttgcgcaccgggtagcgcacgtaagccttcggtgtgacattgccttcgtcaatcacacggtccatatgcaccaattccggctcgtaatgcatcatcaatgaggtttccgtcactgcggcatgttccaacgcccaaccggggaacacgagtccgtcgaacacctgctcgaccacgttctccggcagcggatcccaccagttggtttcgacgatggtggccactcccctggtttcgcgggtgatcagatcgattgcctcgataatgaatgcctcgttttcgaaatgcgcgttcatcaccacgattttggtgaaaccgtccgcgatcagctcgccaagcacatcatgcatttgattgatcaccgtcacaccgttcatgtcgatggtgccggggaacaatgggccgcctccggaaagcggcttcgacttgtacccgtagttcatggtcggtgccacgatgccgtcgatgcgttcggcgaggtcttcagacacatggctggcgatcatggcgtccacaccaaggggaagatgctggctatgctgttcggtggagccgattggcacaataaccggctttgatttcgatgcttcgatttccggccaggtcatatggtccatccgacggctgctgctcatgattgctcctttatgtgctggtgttggtttgcgtttcaacaattgataatgattgcgatgatgccgtccccgcgaatcgatgttgcaatcgatgtttcagggacggcgtttattgtttcgaggaattgtttcgtaaaaaccgtttcttctcagatgcggctcagatccttatccgtgttttcgtgagagaggatcatggcgaccagtgccacggcggccaccgccaccatgtaccaggccggagcgatgctcgaaccggtggtgtagatcagccaggttgcgatgaacggcgcggttccaccgaagatggcgttggcaaggttgaagctgaatgcgaagccggtgaaacgaaccgatgtcgggaaggtttcagtcaggtagctcgaaagcgtaccgtcgttggcggtcagggtggcgcacatggcgagctcaacgatcagcaccggccagaactgtgcggtgttcagcgccatgaaggccggaacggtgagcacgatgaaggccacgcatgcaccaatcagcaccttcttgcgtccgaacatgtcggagatgtgacccatgccgaacaccaaagccacatacagtaccaggcagatggtggtgatggtggacgactgtgcggcagccatgccaaccgtgtcgctcagataggtcggcaggtaggtgagcaccgtgtagaagccgaccgcgttgagcacgcaggcaccgaagctgatgaccaaagtcttgaagtggttctggaacagctcgcgcagcggggagacgctcttagtggtggaagcgaactgctgcttgtcgtccaaagcttcggtcatggaagcatacaccggcgaatcagcgagcttggtacggatgaaatgcacgatcagaccaagcgggccggccatgaggaacggaatacgccatccccaagaggtcagtgcatcagagctcagcgaagcggtcatcacggtggcgagcgtggagcctgcgagcagaccgatggcggtggatgccggaatcagcgagcagtagatgccacgcttcttggtcggcgcgtattcgccaaggaaggttgcggcgccggcatattcaccggaagcggagaagccctgcaccatgcgaagcagcagcaacagtgccggagcgaaaatgccgatcgcagcatatgacggcaggcagccaatcaggaacgatgcacccgacatgaacatgatggaaatcgcaagagcgcccttgcgtcccttcttatcgccgaagttaccccaaaacagtgcaccgatcggacgaagcacgaatgacagtgcaaacacgccgaacgtctgcagcatggcgaccgtgtgattgccggacgggaaaaacaccaaagcgatggtggtcgcgaagtaggaataggaagcgtagtcgaaccattcaatgaagttgccgaggaaagacgagacggccactttcttgaccatcttctgctcttcggactgttcagacacggaagccctgttggcggttgcgattgttgcactggcactcatcatgtcacctgctttcttctgctgaatctgtctgtacgttcgcgttttcttcatacccggcgaacgttgtgactctgactatcgcccgaagtatttgcgccaaagtgaactgattgttaaaccgcaaccgtttgtttttgacgttttgccaagttccccttgcttacagcgccgaagtggaagatatggtgtgattatgttgcgatttcgccattttcgcacctaaaagcagcattgaccagctgattttatcggtaggcgctatgcccacgatctgtgtcactttgtccaatcggttgtacaacgtctgccgttggatacctaattgctcgcatgcgccggtcttgttgtcgagattgtcgaaacaggcgcacaacgtgtcgatcagcatggcgttatgcataagctcatgcccaaccgtctgcgtgatcaccatgcgcacggcctcatcggtacgttccattcccaacatgcgttccagcaacgaggaatccacacattcgagggttccatatgggcattccgcatcgttcgaaatgcatgttcgaatcacactgcgcaacgcaccgaacgcatccatcaatgaaatcgtgtccaacgctgcgcgtccatgcacggtatatacgtattcgtttgcagcgacttgcgtcaacgcatgcaaacaccgatctgaaaataccgacacatcgccgccgctgtcttgcgccgcgagaaaaccgatcattaaatcgccttccaacaaacagatcgattcgcaaccgccgttggattcgaaatcgtcgatcatcgacacgattgccggcatggcgttggccaccgacttgagtttcatggcaaatggcatatacacgcccgaagcggcgaatcccaacgcatcaagcatggcatggccctcacgcgcctccatcggcgaaacatgcacgccatcttccggccccgcaatcagatgcgccaccatgccgacccgcgctcccccatcgagatacagtgtcaaaaccggagcggcaatctgttcgatccttctgcacatcgcttcatcgaacaccgtattgcgctggctgatctccaaagcacccaaaggccgtttctgttcctccagtgcaagtacaatgccgcaatctgtagcggtattgatgttctgtccggctcgggcgacttcaagaccgtccacgtcgaatatgaccacatcctcgccgaacaggttcgcaatgccatcggcaacggctttgggattggacgcttgagcaagctcagaacgcaacgaagttgacataacgtccacttgcatctgcatacgcatctgatcacgcacaatcatggtattgacgctctggcagatatcgacgaaaggaatgcgacggcgcaatccaataatcgtaagtccttcatgcttggctgccttcaccaacattttcggcagttgggtgacttcttcaaccaattcgaccatcaatgccgcaatatcagcattcacgaggcttttcacatattcgtccgcacgtttttcacgaccgtccgcaactaaagatcgcccctccaccaccagaagctcgcctcctgccagaaatgaggcgacgtcctcgcgttcgttggtgaacacccaacgcaccggattatccaagctatcgccagcaacttcaacctgtggttccgccgtcgcaaccaaggcatcatcgagcacttccctcaccgtaacagccatacaaaccgtccaatccgaagtaatacacatgtcacatcaagtaacgtgaccgcaaagcaatacgccgacaataaccatcaacgattacgtcaaaggttcccttccgtaacccaatggacatatgacaaaacgtctgccggaacccgaaaactcgcatgaaaactcgtattggaaggagtgattatgagcacgcaactgttcatcaacgcacacatcgccaccggcatgccgggcagcaccgcagcagagacagcggcaatccaagatattctcgtcgaagacggcaagttcatcagcattgcacccaatctcaaagcaacactcgaagcacaaggcaaagatatggcgagcgtggaagtcgtcgatttgggcggaaagctggtctgtccaccattctgcgacacccatctgcatcttgattacgtctttaccgcacgcaagcccggtgcggtgaacgagtcaggcaccctgttcgaaggcattcagcgttggagtgaaaccaaggcagatctcactgtcgacgagatcaaggaacgcgcgaaaatcggcatcgccaaggaaatgcgtcatggcgtgcagttcattcgttcgcacgccgatgtgaccgacccgaatcttacctcgctcaaagctctgctggagcttaaggaggaactgaaagatactgtcacgctgcagatcgtctccttcccgcaggagggcatgtactcctatgaaggtcctcatggcgaatccggcgcggatttggttgaggaaggcctgaaaatgggtgctgattgcgtcggtggcattccgcatttcgagcagtgccgtgagttcggcgaacgttccatgcacaccgtggtcgaactggcttcgaagtacgacaagctcatcgacgtgcattgcgacgaaaccgacgatccaaactcacgttatcttgaactgctgtccgcactcgcctatcgcgccggtatcggttcgaagaccacggcaagccacacttgctccttgggatcggccgacaatgcctatttcttccatctgaccaagctgttgaaggccgcacatatcaatttcgcctgcgcacctacggaaaatctgtatctgcaggggcgtcaagacacgttcccgaagcgtcgtggcatcacgcgagtcaaggaactcaccgaagctggggtgaatgtgtcgcttggtcaggattccatgcaagatccctggtatccggtcggtaacggcaatatgatgctgattctcgattatgtgctgcatttggcgcagatgatgagttttgaagagatcgatgatgcgttgaagttcctgacagtcaacggcgcaaccacgctcggcatgcgcgattcgtatggtcttgaggcaggcaagcccgcaaacttcattgtgcttgatgcttccagcgtgttcgacgccgtatacgagcgttgcgaagtgcttcgctcggtacgagagggtcgcacactgttcacccgtaacacgtcaatcactgccgatctcgatctgctgacactgtaattcgtcaagtttcgaaatactttcggcatacgaaaggccttgaaatcattacatacgatttcaaggcctttcgtgtgtcgcgttacttacgcaccgattgcttattcaacagattctgcggattccgtaagttctgtcgattccgtcgattcggcaggtgcctcggtttcagctgcgacttcaccttcagcaggctccgtatttggctcttcgaacgcctcaccggtaaaggtgaactcgcccaggatgccttcgccttccgcatcgaccttcacgcgctggccatcttcgagttcgcccatcaggatcttctccgaaatggcgtcttcgacgtcgcgctgaatcacgcgacgcaacggacgcgcgcccagcagcgggtcgaagcccttctgcgcgagcagatccttggcagcgtcggtaagctcgagggacatgtggcgatcgaacaagcgatcattgagctgcttgacgtcaagatcgacgatctgacgcacttgcggctcggtgagctgcttgaacacgatgatgtcgtccagacggttcaggaattccggacggaactgctgcttcagctccgcggaaacctgatccttcatgcgctggtagctcgactcggtgttggcacccaagttgaagccggtgttggcggccttggcgatgtctcgcgtaccaagattggtggtcagaatgatgatggtgttcttgaagtccaccttgcggccctggccatcagtcagatgaccgtcatcaagcacctgcagcagcgtgttgaagatatccggatgggccttttcgatctcatcgaacagcaccacggagaacggcttgcgacgaaccttctcggtgagttcgccgccctcttcgtaaccgacgtatcccggaggagcaccaaacaggcgcgaagccgcatatttctcggagaattcagacatgtcgacacgaatcagtgcgtcctcgtcgtcaaacaggaattcggcgagcgtcttggccagctcggtcttgccgacgccggtggggccagcgaagataaacgaaccggacggacgcttcggatccttcaaaccaacacgagcacgacggatggaacggctcaacgcggacacggcctcgtcctggccgatgatgcgcttgtgcagctcgctttccatggtcatgagcttcttggactcggcctgggtgagcttgaacaccggaatgccggtggtctgggaaatcacttcggcgatgacatcctcatccacaaccatcttcacatcggattcgccctcacgccacgaagattccttctgcttgcgttcggcttccagcttctcctgcttatcacgcagctcagcggccttttcgaagtcctggcccttgatggcctggtccttctcttcggcaagcttggcgatcttcgtgtcaagttccttaagctccggcggagcggtcagacgacggatgcgcagacgcgcaccggcctcatcgatcagatcgatggccttgtctggcagatgacggtcctgaatgtaacggctcgacagatcggccgcggcctgcaacgcaccatcggtgatcgtcacatggtgatggttctcgtaacgcgaacgcaagcccttaaggatctcgatggtttcggcaatgctcggctcatgcacctggatgggctggaaacgacgttccaaagcggcatccttctcgatgtacttacggtactcgtcggtggtggtggcgccaatggtctgcagctcacctcgcgcgagcattggcttcaacatgtcggaagcgccaagagcgccatccgcggaaccagcgcccacaatggtatggatctcatcgatgaacagcacgatgtcgccgcgggtcttgatctccttgagcaccttcttcagacgctcctcgaaatcgccacggtagcgcgaaccagccaccatggatcccagatccaacgaatagacctgcttgcccttcagcgtctccggaacgtcgccggcattgatcttctgcgccaagccttcgaccacggccgtcttgccgacacccggctcgccgattagcaccggattgttcttggtacggcggctcagtaccaccatcacacgctcgatctcactcgaacgcccaatcaccggatcaagcttgccggcggcagcttcagcggtcagattgcggccgaactggtcaagaatcgcggaaccggtctggttgcgacgatcctgcacgccaccggcattggccaaatcgcccttgccatcgcccttgccatcaccggaattgccacggatcaggtcgatggtggcgctgcgcagctcgccaagattgacgtccatcttgatcagcacctgggtgccgacgccttcgccttcatgaatcagaccgagcaggatatgctcggtgccgatatagctgtgccccagctgcaacgcctcacgcagcgacagctccaacacctgcctggcatgcggggtgaagggaatgtggccgttcggcgtggcattccccttaccgatcatctcttcgacctgtttgcgggtgtcatccaaggtcacaccctttgaggccagcgccttggctgcgacgccgtcaccctcacgaatcaggccaagcagaagatgctcggtaccgatgtagttgtgctggagggtacgagcctcttcctgcgccagcacgatcacgcgccgcgcacggtcggtaaaccgttcgaacatgcttgtccttccactcttgttagtccatcaacactctaccgattcgcgatgacgtttgttttcatccgcgcgtaaattgcgctctcgacgcaacgcaacggatatgcttgacatatagcaacgaccaaggaggtcaccaagatgagcgacaccaccctaaatgcaaccgaatccgggatgctcgcagatatccgcttgcacgacatcgtcgtcggcgtcgacggttccgacgaatccttcgccgcattacgctgggcgctgaacgaggcatcgcttaccggccagcaggtcaatgcggtgttcgcatggtcccattcctgggatatgggctcggaaccggaagatgaagagcagtgggccgaagtccgccatgagatcgcgcaacggcttcgcgactgggtttccaaagcttcgcagggcatgaccatcaatgaggatcatgtcaaactcacgtcggtcaaggccacaggaacgtccgcattgctggagatcggcaaggatgcgcagcagatcgtagtcggacgccgttcactcggcagagtggcacgctggttcctcggctcgctttcggaatcgcttgccgaagccgcacaggttcccgttaccatagttcgcattctcgacgacgaggaatccagcgtgcaggatgccatcgccaacgcgcttacgccttcggagaacacggtgacgtacgatttgcccggctcccctctgcctaagaaccagcggccgatcgtggttggcgtcgatggttcggaaacctcgcgacacgccttgcgattcgctatcgacctggcggctttgcatcacgctcccctgcaggtgatgttctgctggcagctcaaggatcttggcgtcatcgagggatatgagaacgccatagcgccgattgccgtcggtcaggaacgggcggaacgcattcttgacgagctgctcgattcggttgagattcccactgccggcattcccgacgatttccagatcgaatcgcacgccttccatatttccgctgcgaaggggctgatcgcggcatcccgttacgcacgccatctagtggtcggttcccgtggattgtccggcttggacgcgcatttccttggttccgtctccaagcaaatcgtcaatttcgccgactgcaccgtcactgtcgtgcactaaacctttgaggatatgaaagaagtccgcttccttacatagggaacggacttctttcatatcctcgataagacaggattactcagcttccggaacgttttcctctgcagtgtccgtttcctcggcttcggtgggttccgcatccgtcgcttcatcctcttcggattcgacgataaccggctcttcgtcatcgctcaaatcaacggtggattccacctccggctcatcctgctgggccgtatgttcgagcacttcctcctgattcgcatcatcatccacggtattggcttcgatatcggcttcggaggcttcttcctcatcgttcggattgccgtcttcattcgccgacagctgctcgatcagttcgacggaaccgcgttcatcacgcggcgcctgcgcgatgatatcgatatgcaggtcgtcaaatgcaggtttcgactgcacccacaagtgagacggttccggcggctcgatttcggaatgttcgccacagccatggtcgatggatacgacacgaccgtcatcaggactccacttgttagcgcacacgccgaacagaagattcagttcgcctttcagaggaatgaagaatccgcacgtcgagcatggattgccatccgatgttttggtggacaacgatttcggtccgcgcggtccctcataccagcgtttcgcggtctgggaacggcccaaaggcgtgagcacgtgcctgcgggacagatcgaattcctcaaccgcctcgtcgatgtcctcttcggaggtcaccgatgctacggcattctcgtcttgcgaaccgtcaaccacgtcagcgtccgctccggcattgtcgccgccgtccgccgcttcgacggtctgcacatcgtcggaaacgctttcggcagactcaacgggctcagttctgcggaacccctcttccatacgtggatcatcgggatcggtgccgatcgaatcggtcaccgccaaatcggtcggttcaagacgatccttccatggaatccattccggtgggcgcaacgccttgtcggtaggcaccagcgatgactcattgaccgtccaatggtccaactcagcatcgcgatacaacgtcaccgaccactgccatccctcatacccacgtatgcaggtttcaaaacgaaaatcagtaacgttgtctcccaagtcgatggcttcgacgaagtcaccgacttggccatcctcatcggcgacttcgagggccaccgcctgggcgatcgccttgggatccattgtggtatcggacatgaattattcctgtacgtcgaagttatcggccacggcacgcatcagcgtggccagtttcttgctttcagccggagatggataatggtggcggcgcaactggttccccgcggaatccagcagcttgataagatcctccacaatggcggccatatcatccggcttcggtcgagttgctttgaccagagacggcgcggatgccacaagggtgaggcccattgcctgcggaccacggcggccctccaccacggaatactcgacttttgcacccttacgcaacgtcttcacgccctccggcagggcggctgcaggcaggaacacatcggcaccctgctcgttctgaataaaaccatagcctttgttcgcatcgaaccaacgaacgcgtccgctaggcattgtcacctcactcttacgtaatccacataccttcaggcgaacgaaagaacaatcgtccgccgattacaaatcaaagatacagtttagcgcaagaggtgggatatgtaaccatctcttgcgccaacaatcgtcagatcatgcctttttgcatgtttgcatcattgttttttcggcctgcgcccacgcttgtcgaccttgcgttcgtcactggtctgcgtcaacggacgtggttccacaggagccaccggaagcactaccgtcagtgtcaatccagtcccgtcactgccggaagcgcagatgaaaccatggtgtgccttgaccacggactgggcgatcgccatgccgagacccgtaccgcccttctgtcgtgctctggacggatccgccgtgtagaaccgttcgaagatcttcgagcgtgcatctgcgggaacgccgggaccatgatcgctgaatcgcacaattgcgtaattcatgccgacttgcatggattgccccacctcgatggcctcgataaagtgatgcaacgactgctcgttggatggcatgcgagacaatgattccgggctgatggacgccggaagcacgcccatggacacttcaaccggggaatcggccggcgtgtaccgatggatgttgcctacaatgttcgtgaccacctgacgcaagcgtgatgcatcgccggtcaacgtgatgtccggcatggttcccggctggaaggcgagacgcgaaggatgttccatatccgatcccgcctgcaataccacctggccacaggtgatgccacgatccgggtcgagcgcgtgcagatcatcagccgcatcattgaccacggaagtcagcttcacctgctgggtgatatcgatgccacgtccttcatccaaccgcgccaatgacagcaaatcctcgacaagcaccgtcatacgcgcactggacgcttctatatgttcaatggactcatcggcacgttccaatgctccgggcatgtcacgctgcattttgtacaactccgcatatccgtgaatcgcggcaagcggagtacgcagctcatggctggcatcggaaacgaaccgtttcatcttctcggtcgtttcctcctgcgcgtggaagctttcctcaatacgcgtcagcatggtgttcagcgacatggacagcgatccgacttccgtattttccggcaaatcgggaacacgttggctcaaatcccctgcagcaatcttcgcagcggtcttctcgatacgtttcagcggagcaagcgtgctttgcacgacgatggtaccaagaatggcgccgatcaacaccaccgcgatgccgaccatggcacagaaccgcgtcaacgtgttggacgtgtcgatctggtcactcagcgacaatccgatgaacacgacgccgctgtctttgacctgccccgttttggttttctcgctccaaggcagcgccacaacacgccacggcgactgtgcggcctgcatgatggcatgatccggcaccctgctggtggtaacgtgcaccaccgcctgtgtggtgaacggctctccgagcgtgaccccgtcgatactgccgtcggaaggcagactcggctcggacaccacgccctcacggagcataggcaccgacccagcgccggtacgcttgtattcgctgtcccgcacctcgacataatacgtgttcaccaagctccggccatcctcgctcgtggtgctgtccagcgaatccatgctattgaaaatcatctgcgcctgattcaccaactgcgtgtcggttttctgtagcagataattgcccacaagcgtgcgaatggaaaaggaaatgccgatagtgccaatggtcaacaacacaatgatgcaagtgaccagcttggtgcttaacggaatggcctgcaccttcctgccgatccgccgatgccaaggcacacgttgcggacgcggctggccgccgttcttctgcgtgttctgcgggtcagccgacggctgacgggtatcctgactcatcgcgggaccgtttagttcttcggcgcacgaatcatgtagccgatgccacgcttcgtttcgataagcggagccaccttgcgcttctcgccgttctcatcctccaccgtaagtccgtcgaccttcttgcgcagatatgaaatgtacgattcaacaatcgcggcgtccccgccccaatcgtactgccacacatgatccaaaatctgcgccttcgagagcacacgcccctcgttatccatcaaataacgcagcaacttgtattcggtggggctcaaatcgatcggctgtccggcacgggacacatcatgcgaatcctcattgatctccagatccgcgacgcggataatcggatcatcctcaacctgctcctgggtacggcgcagaatggcacggattcgcgcaacgacctcctcaagactgaacggcttggtcacatagtcgtcaccccccacggtcaaacccatgaccttgtcttgagtatcatcgcgagccgtcaaatacagcaccggcgtagtgatgccttcctgacggatacgacgggtcaccgtgaaaccgtcgatatccggaagcatcacatcaagcacaatcaaatcaggctgtattttctcgatgacttcgatggcttcagatcccgaagccgcggtattcacttcaaaacccgcaaaatgcaaggatgccaccaacagctcacggatggacggttcgtcgtcaacaacgacaatggatgcttcaataggcttgctcatgctttaagcatcactctgttcactggatgtttcctgaacggattctgagtcttcctttgacgtctgccctccatcatgcgcttcaacggacagctcaccatcgacactccacgccttcaccggctcggaacgcacagtaatcgcggcatgccttcccgcatgcttgcgcaccttgcgcttgatgatgccacgcttgcgcagaatatggaacaccaccataatcacaatcagcagcaccagcacggctatcatgccgccaacacccaacagcacggtctgcgacgacgtcgaggtcttcttctgcaccgcaatctgatccatcatatcggttgcggatttcgaccaatccggagtgctttccatcaaaggtttctgcgcagcatcggaaagcgcatcgaccgtcgacttcttcttcaaccattcgtcggaattcgacgaaacggcaaccacgagattgccatcgttcgaagcgaccgccagcaaaaccgtattcggtttcggatcaagcgattccaacagcgcgctcgcccattttgcaggtttttcttcggtgttgaaacttgccaggtacagcaaatgcacggtgacgcccgtttcctgctttgtcgcgctgatggcatccgtgatctcggcgacgtttgatccgagcagattctcagtgtcggtgatattttccgtggccgtgattccggtgcccgtattgtcttccgcgctgccgacgggagttatccacaacatcatcgcacaacacaacagcatagaaagaagcatgcaagccgctacattccaacgatttctgaagttttgccgttgtcgcgacacaccgattgggcacattttcgcacatcctccgaccacaaccctggttttttcattcatcgcgttcactgttgccatacagtccacattaccgttcagatacgtcaagtgcgagcgaacggtaccaaccgagcacacaaaagtacctggcaacgaaaggatcatcatggcacagtttcaggtggacagcgagcagattcaatcctcgagcgcggcggtaaacgcctccatccaagcgatacgtcagtcggtgcagggcatgtacgccaatctcaacaatctgcagagcgtctggaggggcggagcggccacacagttcaatgcggtggcggaacaatggcgtgccgcccaacagcagatggagcagtcgctcgaatcgattcagcatgcgctgacgcaggcatccgcactgtatgcggaaaccgaaatgcaggcatcgcgtctgtttgcgcagtagcggcaggtacttccgacgcaatcaaagcaatagctggcgcaaacaaaaagtggagcccgcgtccactatgggaaacggactccacttatagctttttgcttatgccgttaggctttgccaaaccgttggatcagtagcccatgtcagcgccagcggccggagcggctgccggcggttccggcttgttggccacaacagcctcggtggtcaggaacagaccagcgatggaagctgcgttctgcagtgcggaacgggtgaccttgaccgggtcggtgacgccggcggccagcaggtcctcatactcgttggtggctgcgttcaggccctggccgtcaggcagggaacgaaccttgtcgatcaccacgtcgccggacagtccagcgttttcggcgatctgcttgatcggggcttcgatggcgcggaacacgatcgcggcaccggttgcctcgtcgccttcgagcttgacatcgctctcggccttggctgcagcctggaccagagcgacaccgccgcccggcagcaggccttcttcgatggcggccttggcgttgcgcacggcatcttcgatgcggtgcttgcgttccttggcctcgacttcggtggcagcgccaaccttgatgacggcaacgccgccagccagcttggccagacgctcctgcagcttctcacgatcgtagtctgaatcggtgttggcgatttcggcacggatctgagccacgcgggcagccacgtcttccttggagccgccgccggccacgatggtggtctcgtccttggagacgatgaccttcttggcggtgccgagcacggacatgtcgacggagtcgagcttgaggccgagttcgtcggacacaacctgggcgccggtcaggatggccatatcctgcagcatggccttacggcgatcgccgaagcccggagccttgacggcgcaggacttgaaggtgccgcggatgttgttcagaatcaaggtcggcagagcctcgccatcaacgtcttcagcgatgatcagcagcggcttgccggtcttcatgaccagctcggcgatgtgcacgacgtcctgctgagagctcaccttgccggaggtcagcaggatgtacggctcttcgagcactgcggtctgatcttcggcgttggtcacgaagtacggagcgatatagcccttgtcgaaacgcatgccttcggtgaagtccagatccaggccgaagcggttgttgtcctcaacggtcacgacgccgtcctggccaaccttgtcaagagcttcggcgatcttctcgccgacttccggatcggcggcggaaatcgttgcggtagcagcgatctgatccttggtctcaacgtccttggcagctgcgataagctccttgacgatggcttcggaagccttctcgataccacgacgcaaagcgatcgggttggagccggcggtgacgttcttcaggccttcgtgcaccagggactgggcgagcacggttgcggtggtggtgccgtcgccagcgacgtcatcggtcttcttggcgacttccttgaccagttcggcgccgatgcgctcgtacgggtcgtccaggtcgatttccttggcgatggagacaccatcgttggtgatggtcggagcgccgtaggtcttgtcgaggaccacgttgcggcccttcggaccgagggtgaccttgacggtatcagcgagcttgtcgaggcccgcgagcattccctgacgagcttcgtcgtcgtatgcaatgatctttgccattgttcctccacatatggctacacggtattattcccaccttcgaagcgaagaacgcaccagccgtcagctgccagttatcactctcgctcctcgagtgctaattggcagattagcactctcaggccgagagtgccaaactccatgtcgccagttgcgctgtaagcaagaagaattgttcgtctaaataagccatcaacgttggaattccaaggaaaacaaaaaagccttgttcttggggaaaagaacaaggcttttttgtttcgctcacggcgtttttcagtcaagcaacaccacaacgattggcgtgacgagcccatcgctttgctgcacattcgaaattcccagcgtctgtgcgacgttttcggcggtcgccttatcggtctcgttctgataccagaccacggtctgcgaaggaacgtttcccgtcggattgctggcagaaacactggtatacccggcttgggtcagcacgtcggccttgctttgcgcataaccggtgatattcgtcgcgttcacgacgcgaacctcagtacccgtgttcacagcctgctgcgcagtggcgttatccgtctgctcggcattctggccggcattctggtcggcgttctgatcattttgctgcgagtcggtcggcgaatcggcattggatgcgtccgtcttattgccggaagcggagtcggattgggacttggacttgctctcgccgctcttgctcttttcggcacttgaagtagtcgaactcccctgcgacgaccacggcatcttcagattgttgatctcacctgaataaatgctccagaacagcaaaccagcaagcagcgccacaatgatgacaatgacgtacggcatggcccgggacgccgcggaacgcgcgccacggtgaacacccataggtcccgccggaggattgtcgtacacatccttctcgtaggaatcgtaggtctccttgtcctgcttagccatattgcaaacctcgtttctcacacacttatctgccaagtgtaccgaccacctcagtcagaacacaatcgagccgcattcccacccctattccgaacgttcgtgaaaccatcccgtgaaaaccaaaccacccctgtcatcaggaccgcaacacgtcgtacagtaagatgcatgacacaatcgaacatcaagccgttgaaagatctcgtggagcccggatgggcgaatgccctcgccgaggtcgagccacaggtgcaccgcatgggcgatttccttcgaggcgaaatcgcagccggacgccggtatcttcccgccagcgcgaacattctgcgcgccttcaccatcccattcgacagcatcaaggtgcttatcgtgggccaagacccctacccaacccccggtcatccggtgggactgagcttctgcgtggcgcccgatgtccagcccattcctcgtagtctgaccaatatatacaaggagctgacggatgacctcggcgtacccatgcccacgaacggcgatctgacgccttggacgaatcaaggcgttatgctgctcaacagatgcctgaccgtcgaagcgggcaagcccggcagccatcaggacaaggggtgggagatcgttaccgacgcggcgatcaaagcgcttaacaaccgccgcaatcccgatggcagcatcaaacccttggtcgccatcctgtgggggcgcaaggcgcagacgctgggaccgctgctcaccaacgcatatattatcgcctcacctcatccgagtcctatgtccgcgcgatacggattcttcggttcaaaaccgttctcccgcgccaaccaagcgctcatcgccgcaggcgagaagcctgtggactggtccctcccgtcagcttgacccgttacagtagcaactatggctttattccctccgaagaatccggtaccgacaccaacccccgttccaatgccggccgtcaccaaaccgagcacgttgcccccagaggacatcaaccgggcgaaacagctcggcacgtgcatccgcgcacgcttcgcgcagaccctagttggacaggacaacctgcgtgaatcgctgatcaccacgctggtggcaggcggacatattctcatcgaatccgtaccgggtctggccaagaccacggccgcgcagacgctggcgacttccgtgtccggatcgttcaagcgagtgcaatgcacgcctgatctgatgccatccgatctggtgggcacccaggtcttcgatttcgcgacgcagaagttctccacgcagatcggcccgatccacgccaacttcgtgctgctcgacgaaatcaaccgttcaaacgcaaaaacccaatcggccatgcttgaagccatggccgaaggagccaccaccatcggcggccagtgcatcgcactgccgaaaccgttcatggtcatcgctacacagaatccaatcgaggaggaaggcacgttcaaccttcctgaggcgcaaatggaccgtttcatgatgaaagccgtcatgacgtatccgaccgcgcaggaggaacagcgcatgctcaccatgctcacccatcgcggctccgacacttttgattcacgaacgctcaccggtgacgtcgtgtccatcagcgatgtcgaattcctgcgcgccgcggcccgtcgcgtgcatgtgtccgacgcaatcatgaaatacgcggtcgatatcactgccacatcccgaggagccggcaccaagccggtgcagggattgtccacactagtgcgtctcggagcctcgccacgcgcgtccatcgcgctgactcgcatcggacaggccaacgcgttgatgcaaggccgcgactatgtgattccggaagacgtcaaagccttcacacatgaagtgcttcgccaccgcatcctgctcacgttcgaggcccttgccgacggcgtcaccagcgatcaggtcgtggactcgatcgttcaggcggttcccgttccatgatcgacgcaattcgttccgaagatccgatccgcagtaagatcgaagccctcggaaccacgttgagcctgccgactgttcgcaaggcgctcggtgttcttgagggtgtgcacgcatcagacaagcgtttcggcgccgacgatgtcatggatatccgcatctatgagcctggagacgaggcaaaacggattgattggaagaccagcgcccgtgtgggccgccccatggtggtgcagcgcgaacgcccatccacttcacgcgcctggcttttgctcgatgtcggacaggaaatgaccggtacctgcgtttccggcgaacaggttcatcaggtcgcagccaacgccctatgcatgttcgcggcgctcagcctgcgtcgtggtgacgaagtgtccatagtattcggcgattcaggctcgatcacccgtgtgccattcaatggcggacttacgcaattcgaacagacgttggacaatgcgctgcagcgtgattggaacaaacctcgcaatatcgacgctttgctggagtacgcccgtcgcattcgcgacagggatgcgttggtggtgatcgccaccgatgagcacgcacttaaggaacgtcatgtggagtccattcgcaggatcgcaaggacccatccgatggtgctcatcgatgtcgcaaccattaatccgttcgacaatagccatgcgcgcgacgtattcgacgcgggcagcgaccgccgcattccggcattcctgcgcaccggcaaaacggcgcaggaggttcgcacgcatcgcgaatatctgtccgcgtccatcagacatgagctgaatcgttgcggttccacagtgatccgtgccgattcaagcgaacgtatgttccgggaattcgtacggatggtatccgcatccctatctcgctccacacgcaatcagctcaaagcgccgtcctcactcaccttgggaggcaaagcatgaatcacatcgccttgtctcgcaacgatttcgacacactggacccgattcatatcgaaacggggctgggcatcgttgtcgcggtatgcctcatccttgccgtggcacttgtcgtcttggtggtatggctgtcgaaaccaactctcaagccaacgaagaaaaccaatcgcggacgtcacgacgcatcgacgggcacgtcgatatggcatgaacgcatcaacgatgtggtggaccgtcatgccaacggcgatctcggaagagaggaagcgttcgccctgctcgcatcgatcgccagagatttcgtctccacggccaccggcagcgacgtgcgcaatcagacgctcaccgatattgaagcgacacctcgcacgaccggcaaccagcatgggctcaccctgctcaggcagaccatcgaggcattgtatccgccggaattcgcggatgccgaacgcaatcacacggccagagaggccacggttgaacaggctggagagtgggttgccaatcttgtggaaaggtggcgatgaatggaattgtcatggcactggccgtgggtaggccttgcaggcctgattgcgtcattggccgtcatcgccatcatggtattggcgtccgcaaaacgcaggcataacgactcaggatccgtgcggacgttcagtttggatgacgatctcaacaccgaaaccgcatcgagattatttcggcagtggcgcaccatgtcacgtgccgccgtcgttctgttggtgatggcactggtgctggcgatagcgctggtggcacgccccagcaccgtggatgagggagaggagcgtgcgagcagccgcgacatcgtgctgtgcttggacgtatctggttcgacgttgccatacgaccgcgaagtgatcgatacctaccgcacattggtggacaatttcaagggcgagcgcatcggattgagcattttcaattccacgtcacgtaccgtgtttccgttgaccgacgattacgaattggtgtccgaacagctcgacaagaccagcacgatactgaaaggcgtcgaatcacaggatgatatcgacaagatgaaagacagcgattaccaagcgatttccgactggctggaaggtacgcagaatcgtaaagaggccacttccctgatcggcgacggcgtggtgagttgcgcagccatgctgccaggtttcgcctacggcagttccaacgccgagaccgcatcccgtcaacgtgccgcttccattgtgctcgccaccgacaatgtcgtttccggagatccgacatacacgcttcaggaggctcttgacctgaccaaacaggcggaaatcaccgtggacggactgttctccggaccgcagcaaagcgaatcggaacagacgaccaaacagttcgaatccgaaatcgaatcgcatggcggcgtgtttctcacgcaatcgaacggcgcttccgtggctgagctggtcaagcaaatcgaatcgcggcgcaaccatgacagcgcggcaagcagcaaggccgcaatatcggacgcaccgggatggtggacgctggcattggcagtggcgatagtgatttggctgctcttggcttggaggttgaggcgatgaccaatctgacgctctcccctgctttgggatggcctttaggcacggcgatctgcgtgatcatgctggtttgcgcagtcgcgcagattgtgcttcatatccgtagacgcagccaaagcgatgaaaccgtctgggcttgcgcaagacgatcgatgatttgtgcgctggtggccatcatggcattgacgccaagcatcgtctcgtccacgaacagccgtgcgattaacaccaccgatgtggtggtggcggtagatgtgaccggttccatggcggtcgcggacgcgcagtatggttccgacgaacagctcagccgcttggatgttgccaagcaggcggtgaaggatattgccgccatgtatccgaattccagtttcgcggcattgcgattcggcgcttcgggaacgttggatgttccgttgacgcctgattcgaaggcgatcgataattgggcggacacgcttgcaccggaatcgacttccatttcggccggttcgaccttggatgtgccgattgaccagttgttgctcacatgcaagtcgattcacgatcagcatcccgatgatgcgatcgtgctgtacctgatttcggatggcgagcagacctcgtcgaaaacacgccgaacgttctcatcgttgcgacgctacctttccgatgcgttcaccgtcgccgtgggcagcgagcagggaggcaatatccccgtgaccggcgatggcgtagaggaaggcgacacgcaatgggtcaccgatccggaaaccggcgagcctggcgtgtcccgtatgaatgccgacgaaatgaacgccatcgccgacgagctcagtggaaccgccatccagctcaatgccacgacgaccatgagtggcggggattccaaagaggcatccagcaaatggcgtgtcacgcagacatccaagcaacgcacaagaaccgtcgccatggtctggccgttcgccattgccgtagcgctgctgctgacgttcgaggccggggcatggatcacgcaatcaaggaggctgctgtgagcacaaccgttacagcgcgtgcatcgctgcccgttcgcatcgccatcgccgtcatcgcagccatatcggttattgtgggcgtgcttggcatagtgaatctcgcatccgtcagcaactacaaccaggccacggacagtctgaatgcgaatatcaaagccagccaacagcaagacgccgatttcgacaaattgcagacccaacagcagcagaccgacgcgcaattccgtgaagctggcgcggccggcatgttgttgctgccaaacgtacgcacatccatcgagcataatgccgaagtttcggcaaaactgaccgaatccatacgcaagaaaatcgaagagatgcagcatgccgacggcaccgaggccgacacagccatcgaaggtgggcaatccgtcaccgatggaggccaaggcaacggaggaaccttgactgacgagcagcgtcagaaggtggaggagcttctggcccagaacgcacagtccgcccagtccgattccgatgattccggttcggcggccaagcaggattccaaccaaacatcttcgcccgcaaaaccctggtaagggggcttatttcaggaagttatccacaggcatgtcggcgtgtttttgttgatttttcaacgatgacacgccgacatcgtgcttttcgcccgtcctccgaccacaagccttgttcgccggcttgggcaaccgcccgatgtgctccaatatagctatgaacgcatcaatcacctatccgtttattcccggactggggttcaacctcatcaacaccttggcctcaacgccaggcatgccatgccattgccgtgctggcgtgcgaaccacccaactgctcgtcaatgccaagctcacatccatatcgaaacatcttgacgatcttgacgccacgctcgcatccagttcattgcccgattggacaggaaccgccgccgaatcataccgcgcgcggcttgatgagttacgcaagcaatccctgacgctacgggattcgatcaacgccaccttgcgtctcctatgggcagtaggtgcggcatgagctgggaagtgaccgccaaagtcagcggcggatgcaaatactccacggaggaaaccgaggcatatatgcgcgcggcaaaagccctcagccatcaagccgacgctctgaaccgcgcccatgattcagtccgggcattgagccttcagctttcctcctacccctatgcgtcgtcggccatcgcctcgctgtccggatcaagcccctattgcaatgccacggatcacatcgaactgccatacgaccagctcgtcgaacaatgtgacgcccatgcaagcgcgctgggagccatggcggcaagattgtctgagctatcggcgctgatcattcgcgcgcaatcgttatattcccaagtcgacgacgctggcagaagaacactgaacgaactgctgcaagtggcgatcacatcgttcccgaaggaatcgatactcgccggcgcagccatgtccgccttgggatatgtgatgggatccaccaatgagggcaaatccaatcccatatatctgctggactcgttggattgggcgcaggaaggcatcatgagcgcggccggcgccgcggtcagcggatacggcaaggccaaaggcctgctgcgtaccgatgaggtcaaccatgcagccggcaccatctccaaggcatcgtcgcgcggttacaacctgatccagggcaacaatctcaccgtcacccaagtccatccgaaaaccgaagtggtgcgtgaatcgcataatgtcggagaggccatggaggatcttcgacgtcttgccgaggaacgtctcggcaagaccgatctcgacagcggacttgactacggcaccatcgccatctccaaataccgtaaatccgacggaaccaactcatggctcgtcaccattccaggcacagacggcaagcacgattctccatttgggtggccgcaaaacgtcgaactcatgagttcggacagcaagcaacgcatggaagcggacagtgcgcgaatggtgcaggaagccatgaaacaggccggcatcaaatccaatgagcccgtcgcattgatcggacattcgcaaggtggcatcgttgccgccaccatcgcctcggacctgaaagacgattatgacatcgaacatgtggttaccgccgggtcgcccgtcgccaatcatccgattccggaaaaaacatgggtgaccagcgtggaaatggacgacgagctcgtggcggccctcgatggcgccgccaaccccagttccgaccattggctgaccgtacgcggcaccgcaagcaaatccagcagcaaccaggaatcaacgttcgcaggcactcccgtcacagacgctccagacaacaaggaaatcacgcattggctcaaatatcaccaagccgcataccagaacgcaacggacatgggatccaccgcagtgaacacccacgaacggcatttcgatgagatcatcgacggcgatctgcaggaagtcatgtatttcgaagggcgcatgagcaaatgaaaaaacactgcagccacggcgcaacaagaacggtatcacggcatacatcatgaaagccatccatcgagcggacagatacgcaactttcgtttacggctgaacgtatgctgtagtctatgaagcttactgatatctcccctgcaatcgcattgacccctcttgacggccgctaccatcagcagaccgctccgcttgtcgaatatttgagcgaacctgcgttgaaccgcgagcgcatgcgcgtcgaagtcgaatggatgattctgctggccaacggtttcgagggcaacggcaaccagaccatcgttcccggcgtcaagccgctcaccgatgaggaacaggcgttcctgcgcgccattcctgaggagttcggcgccgagggtatcgcgcaacacgccgcccatgaggcaaagacccatcatgatgtgaaggccgtggaatactacatcgacgaccagctcgacaaggccgccgacgtgcttggccacgacacccagctgaccggcctgaagactttggtacatttcgcatgcacgtccgaagacatcaacaacctgtccatcgcccgctgcgtgaaaaacggcatcgagaatgtgtggctgccgggcgctcaggccatcgtcgaccatttggctcagaaggctgaggaataccgtgacaaggccatgctgtcgttaacgcacggccagcctgctacaccgaccacgcttggcaaggaactcgcagtgtacgtgtaccgtctgaaccgccagctgaacaaggtcagggctcaggaatatctcggcaagatcaatggcgctaccggcacgttcggcgcgcatttggccgcatgcccggatgtcgattgggtggccgtctcccgcgaattcgtcaccaaccgcatgggtctgacgtggaatccgctcaccactcagatcgaatcgcatgattggcaggccgaactgtatggcaccatcagccacaccaaccgcattctgcacaacctgtgcgtggatgtgtggatgtacatctcccgtggcgtgttcgcccaggttccagtcaagggtgctaccggatcctccaccatgccgcacaaggtcaatccgattcgtttcgaaaacgcggaagccaatctggagatctcctgctcgctgctcgacacgctgtccgcaacgctggtcgaatcccgttggcagcgcgatctgaccgattccaccacgcaacgcaacatcggctccgcgttgggctactccgtgctcgcgctcaacaatctgatgggcggtctgaactccatccatccgaacgacatcgccatcgaagccgagctggactccaactgggaggtgcttggcgagccgatccagaccgccatgcgcgcctgcgaacttgccggcctgccgggcatggacaagccgtacgagaaggtcaaggagcttatgcgcggccatgagatctccaaggaagccgtcgagcagttcatcgatcagcaggcgttcgatgacgctaccacggctcgtctgaaggcgctgactccggcaacatataccggcgtcgccagcaaactggtagatttcgaccgctgaaccgaagctgtcaaataagtaccaaaaccatacgccctgagggtggccgcgtatttcgtagccaccctcagggcgtattatcgaatgcagtggggcgatatgacccacctgaagccaatctcacgtatggagcaagtcaacagtgtctcactcccctgcagtcaataagcccgccccgcatatcgacgatgtgccgccgaagcgcagtcgtgattttgccgatctgacgcacgcattcttcgccttggtgctcggcataggcgtgattctgttctccgtgtacttgcatggcaccgcgtccggcgtggaatccgacgttcattccgccggccgcgtggtcagctggctgatggatgttccctcggcattattgcagcagcttgccatcgtatgcatcaccgtcagcgtgctcatccagctgcttacttccaaagagtggctgcaaagcgtgatttccgtggtttccctcatattcggattctttgcggtgtggggcatatccgcgctgatcagcaactccggcaataccatgctgatcattccactgcaatccaacagcacatccgtaggcactggactgctccccgatttttatgccgccatggcatcgttcctcaccgtctccggccctcggcgtatccgctcatgcaccaaatggggctggaacgtgctgtatgcagtggcagtgctgatggtcgtgctttcatggaattcactggctggcgtcatcgcatcctacgccataggccgtgttatcggcatgctgatccgtttcgccataggcacgcagaacaatggcgcgtggggatcacaaatcgcgcaatcattgcgttccatcggtattgacacatcattgctcacccgccgagtcgccccctacgtcgattcgggagtattgaaggccacgctggatgacgatctgaccgaaaattcccgtatttacgatgttgtcgactatgacggcaagcaatacaccgtttccgtactcgacaatcaagtgcatgcggccggatatctcaaccaagtatggcagtggcttcgcctgaccggtgtttccatgcgtcgcgaccgttcctcggttgacgccatgcaccatcattacgccatgattctcggcctgtccaatgccggtttggaaactccgcgcgtgtatggtgtggccgattatggagaatcctccattctggtgttccaccgcaaccgcatgccattggaatgcaaccaaaacaccatgtccgaccatgatatggaagcgttcatggaatatctcaccacagcacaccatcatggcttcacccatcgtcgcatcactccggaaaccctgtcccgcatggaaaacgggcatccggtaatcgcaggttggcataatggcgattatggcagttccgctccgaacttcgcactcgacaaagtacagttgctggttcttcttgccacactcaatggcaatgatcgtgcgatcgcctgcgctcgcaggacttggggagacgagcagctgatcgatttggcacccttcatacagaaggctgccattcccgcttccacgcgcgcattgcctggctgggacaagcatgtgcttaccgatttacgtacgcgtatttcggcgctcgctccgcaggatgtcgcggattccatggaaaaagtcacgctttcccggttcagtcttcgctcgttcattgcgattgcgctgctggtggtcgccgtatatgtggtgttcacccagattcagccggccgaaatgatcaaggccgtcagagacgccaatctcgccatggcgttggtttgcgtcgcgcttggctttgtggcgtggcttggttccgctatcaccttgggtgtgttcatggattccgataaacgcaacacgatcggcttgtattgctctcagatggcgtccggtttcactgcggtgtccatgccggccggcgtcggtccagcattcgtcaacctgcagttccttcgtaaaagcggctatcgcagtacggctgcgaccgcggttatgagcgcggtctgggccgtacagggaggcactaccatcgtgttgttgctgacgattggcctattcaccggccgcaacacattgtccggcatgattccgaccaatacgctgatcatggtgatcgccatcgtcgcgttggttgtgtcggccgccatggcgattcctccagtgcgtcatttggtgaccgagaaataccttccagtggtcaaagcatacgcgcgcaacctggtcaatgtgcttgcacggccaaaggaactggcccttggcattgccggcgcactggtgcttaaccttgcgaccggactgggattctgggcagcattgatggcgtttggataccacacgaatcctgcggaaaccaccttcattttcctgcttgccaacactttgggctccgcggttcccactcctggcggtctgggtgccgtggaggccgtgctgtcggtggcgttcactgccgtgggcatcccctcctccatcgcggtttccgctactcttgtctaccgaatcgccttctactggttgcgtattccggtcggtgcgttggccatgaaatggcttgacatgcataatttgatctgacaaacacccccgtacactttgttttccccctgattttcaaaaaagcgaccaaaacccttgtaaaatgccattttcctcataagagtgcgctaatatcatagagaacgtggatgttcgtaatcagaatgtcccctgacccaagaaggatgctttatggcatacaacaagtctgatctcgtctcgaagatcgctcagaagtccaacctgaccaaggcacaggctgaggcagctgtgaacgctttccaggacgtgttcgtcgaggcgatgcagtccggcgaaggcctgaagctgaccggcctgttctccgctgagcgcgtcaagcgcgccgcccgcaccggacgcaacccgcgcaccggcgagaccatcgagattccggcaacctacggcgttcgcatctccgccggctccctgctgaagaaggctgtcaccaagtaagtcatgtactgatatgttgcttacacgacgaaagccccgaccatgacggtcggggctttcgtcgttcatgacacttgtacaagcgtcattctgcgctacactatgcatatatattagacatcgtgtccatatagatggagagagacatgaccgatcaacgcaaggaagtcatcaatcaactgcatgaattgaacattctgctgctgcataccaagctgaaggccacacgcacacagaccgcgctacgagccgccacacgagtatgcaacgtcgaagcggcacgtcgtggcgtgccaccgctgcaacaacttcccaaaagccatgacacggcaacgcacatgcttgactgcctcagcaccgaggatctttccaccctcagcgaacttctgcagcgcatcatcgacaacaccgacaccaggattctcgatgaagaggttgtcgagcgacgcaaagccatccatgaattccttatgctgaatcacacagatacggaggtgcaggaatgagcgacgagcaggagaccattcccgaagcaaatgcccccaaaccaatccgcatcgacaaacgatccctgttcactcccagtgaagccgtggccgtggaacagcattccacaacaccacatgtgtcacgaacccgttatggaaccgcacgcatcgaaggtcgcctctcctcccccaatgcgagagtacccgcagtcatatcgcaacattgcggcggcatcacagtcaaaggccatacgctcaaatcgttcgcctataccaccgacgctgcgatcatccgtaataccaatgccaacgccattctcgccgtctacccgttcactggagaaccggtgatcacacaggcgttgctcactgtggcacaaatgccacttttcgtaggcgtcggaggaggcaccaccaccggtccgcgtgtgaccgagctggccatggtggctgaaatgcaaggtgcggcaggcgtcgtcatcaacgcgccggcacccgcggaaaccatcgaaaccaccatgtccatggtcgacattcccgttatcgcaacagtcacggaagacgacgaaatcaccgaatgcaagattctcgccggtgcggccatcatcaacgtcgcagccggagcacgcaccgcgcaagtcgtggcaagcatacgtgcgcatcatccggaaataccgatcctggcatcgggaggcggatccgaagatcgcatcctcgccaccatcgaagcgggcgcggatgccatcacatggacgccgccaagcgcgcaacagctgcaatcgcagatgatggcgaaatatcgcggcgaagcctgattcaagccaatcaaaaacgaaagcgaccgcagcgcaatcgcaaaacaattcaggagaacataccgatatgggagtggggtgtgaccgaagcttgtcggccacaccccactcccatcgacgtttcccattgccaccatcgcttactccaaagcgccaatcatggcttggaaatcctcattctccctgcattggaacggatccagcagcaccatatccatcttccgcggcgcatgcaacgatagtctggtccaatcgcaggaatactgcgcgccatgcgatttggccgcactgacgaatctgccgcgcaatgcggcacgagtatccgccggcggcatggtacgcgccttttgcgcctcacgaccgtcaatcagcgaacgcaaggcaccacggcgaagcaacgacgcatacaacgcgccattggccacgtcatgatagtccagatccaactgttccagcttgctcagcggaagatccgcactggaacgggcacgtaacgcttcaaacaggcggtacttgcacacccagtccactctgtctcccaaagcatttgcattgccggaacggaacgcttccaacgtattgcgccactggcgaagcacatcgtgcacatcggtgcgaggcaacgacgaagccacttccggatgctcatccacgaactgttccacagcctgtagataacgttcctgcatggctacggcaccaccctgcaacgtcgatccatcggccatggcaaacgaagcattcacgccgctcatatcgcgactgaccgcacggtttgcggcaccggcgtccgcgaacgcgaaccgcgagaatcccgactcacgtccttcacgcccagcctgttcgataacgcacagcaccagatgcgtggtggccagcttcatcatcgtggcccattgagaacggtttgaatcgccgatgatcacatgcagccttcggaaggcgtcgggatcggcatgcggctcatccctcgtgttgaccattggacgcgatcttgtggtcgccgatgaaacagcctcatccagaaaatcggcacgctgcgtgatctggaaacctgattccgtcaccctgcctgcgccagtgaacagctgcctggtaatcaggaacggcagcaattcgtgttcgatgacgtccaacggcacaaaacgacgtaccagatagttttcatggcagccgaaggaatgccctgcggaatccacattgtttttgaacacatgcactgtggcacgtggcccatgcgtggctcgaagcctttgctgggcgtccaacgcaagatcgcgcatcaccagttcgccggccgcatccacggcaagggcgtccatgggatcgcaggcctcggacgtggcatattcaggatgcgatccgacatcaagatacagtcgcgacccgttttcaatatacgtattggtcgatcgcgcggaggcaacgatcggctggaacatcatcattgccgtctggctggcgtcgcatggcacatccgcaccggtcacactgacgccgtattccgtttcaatgccgaaaatacgagcgaaagaatgaacctcacgcaacgttcccgcatcaagcggtgacgaggaatgattgccgctgtctcgcagctgcggcatcactcgccgcctttttgcacgaaactaccgacatattcctcagcattggactcgagcaccgattcgatatcgtcaagcacggcatccaacgcatcagcggttccgtcgacttgtacgccggcggattcgacaatgtcacccacctcttggcctgcggatgcggattgagcctgttcaaattcctgaggcatgacattcctccctgtaacttccggttgcaaacctgcaaaaaaacgctgcgccacaccttatatcaggtgtggcgcagcatgcaacactatgccaaatactggctcagatcattggtgatcagaccattggtggccatcacatcgttctcctggcgccagtgaacgctttcgccgttccactgggtcagatggccttgcgcctcccaaatcaccacagcaccagcagacacggcaggtacgtcccactcatgcaagtgcggttcgaaatacgcatcgtacgtaccgtcggccaccttgcacaaatcaagggacgccgggccgacacgtttaatatcggcaggacgtccggcaatcttcgccaccacatcgagcgcacgctgcgattcggacgataccggagacatgccgaaactcaccaccgaaccatcgagggacgacgtggtggaaggaatgattttctcgcgtttgtctcccaacggagtcttgcgaatacgaatcgcgccggatccacgcaccgcaagatacgtcaatcccagcgccggagcgtgcacaatcgaaaggatcggctgtgcggagcactggtcgttgaattcgaacaatgtcacggtgatggcccattccggcatgcttcgcgcgaaattgatcacgccgtcgatgccacccacacaccagtatcgctggccgggatagcactgttcagggcgaagctgccagaagccgtcgaacacgttgacataggtcagacggttgctgatgaactgctgcaggcgcttgtcggtgtctgaagtgaagtggaagcagtcttcggacacttccagttttctcatgtcgtgcggattcatctggtcgttcaacgcatgcttgcctgcgtcctgcaggatgcgtgcgacttcgagggcgatttgcctcagttccatagatatgccttttcgtttcctctgtacagtcccggcacgtcctctcctcaaaataccgggatgatgttacctgttgtcaatggtcgttcttcgcgaccaattgatggcaatgttacccgcacagattgcatttcaccgtaacatttccaaaatcgacgccgcatcttggacacgctcacaatagcgggaacattgagatttgctatatttcagagggtctgacatatccaatgagaccatcggattctccacggtattatcaccaatcgttcgatggcgcaccgtaagatgcgaccacgatgcggccacaacctgttctggaaaacgacgaatcatttcggcacgcaaccaagcacgggtatcggaaggcgcttccaccgaagcctgcaccaactgcccgtccgtaaacagccgctccgtttgggcccgcaaccgatcgaaaatcgagtcagcgggatcaatcgcagcccactttaaatcgacggccgcaatacgcgcatcatcccaaccggagccaattttacgacgcagcttctccaacaactgccatttcaatagccattcaatgcggccagcttgctcgcgcatcgtcaaacgcgcatcatcatcggcatgcctgatggcagccacatcggcgagcgcctgcccccacatcgccatgatgttacgggtcgaacggtcagaccatgccggttcaccggacgtgtcggttccatagatcacggcagcggcagcatacaccaggccacgcagggtgacctcaatctgccatgccgaggtctcgccgccatattccagcggcaacatggcacctaatgtcaaatcatgagacacctcgtgcatggcgctcaccggatcggcgagcatgattggctccaacgcttcgtctatgttcaatcccgcctcgtcggcatgctcaagcagccacagcagcatgctggtggtgccgagtttcagcgcctgcggcacatccatacgattggcgtccccgacaatcacatgcaatcgacggtatgcatccgtgctgtgcgattcgtctcgagtattgatgatcggcctgtcgaatgtggtctgcaaaccgactttcatatgaaaatagtcggcgcgctggctgagctggtatccggcggtttcgcttcgttcgccgataccgacgcgacctgatccggtaaaaatctgtctcgctacaaaatgtgccgtcatgagtttcgcaacttggtcaaacggcaccgaacgcagcatcatataattttcgtgggtgccccagcttgcacctttgccgtcgacattattacggtgcagcgcgattgcgataccgttctgttcgctggctttgcgcgcgcactcacgcatgatgagatcgccggcatggtcgtagagcacggcatcgaagggatcatcggtttcgggcgcggaatattcaggatgcgcatgatccacatacacacggccgccattgactgcaatcacattggtgatgttgagctgcggagcgtccgtcaacagatcaggatgcgcggatgcacgttccagcctggtgccgcgggcgtcgttgaccggatcctcctgccgatagtcccagcgaatatgcttggtttgttcgttcaccgcggcaccgaccacatcgaacgatagcttcaccggattgtaatgctccattccgagagcggaaaccgcgtattccgtttccgtgcccatgattcgacgaacgctcattgatacgacttcccttcgtctgatttcgcgttgcctgccagcattattcgactggtcgtatacgggtgatgcgccctgcttccaaaccactgatacggctccactgttccggattggcgtccaacaccgcatcgcgggtttcaagaaactcctcgtcgacggccttcgccaacagatcgacgccaatcgccgccggctgtccgctttcgatggagattttcacagcacgggttttggcacgatccacaatgtttttcagcaccgcacccgacaccacatccgccagatagatcggatgccattgcccatgctcatcgcacacgtcgcacagataccggtgctcgtccatcgaatagatatcgctgaccagcaccccaatcaaagccttcgcatccacccctggcaccaacggcaaatcgtcggtcagataatggcggatgatctgcgccgcctgagccgctttcggacgctccacacgaatcttcacatccaaacgaccaggacgcaacaccgccggatcaatcatgtcgatacggttcgaagcgccgatgaccataacattgccaagcgtttccacgccatcaagttcagccaaaaactgcggcacaatagtggtttccacatccgacgacacgccggatccacgagtgcgcagcagcgagtccatctcgtcaatgaacacgatcaccggtttgccatccgccgcacgttcacgcgcgcgcttgaaaatcatgcggatcaggcgttccgactcgcccacgaacttgttgagcagttccggccccttcaccgacaggaacacgccacgaccgccggcagcgccttcggcgagcgcattggccacagccttggcgatcagcgtctttccattgcctggaggcccatacagcagcacgcctttcggcggcttcaaatcataacgttcgaacagttcgcgatgcaggaacggcatttgcacggcatcgcgaatacgttcgatctgctcatccaaaccgccgatatcagcgaacgtgacatccggcacttcctcaagcaccaagtcggcatcatcctgcgcgggaaccaacgcaagcgcgaatctcatggacgaatcgaccgtaacacggtcggacacattgatcgaagttttcgacagcgctcccgaacggcggaccaacgcaacgtttccaccgccatccgcgaccagcaatcgcccatcatcaatgacctgcttcaccgtgcgcactgcgcccacagcatcggtgccggcttgcgaaaccaccaccatgttctcgttgagcagcaccgtgcgcccagcctcaagcctggatgcctgcacattcgccgcaaccggcacgatcatgcgacggcttccggaaatcacctcggcgctggcatgctgtaccccctgttcgtccgtgcgagaggaatgcacgcgaaccatggtggcgaaggtcatgggcggtcccgccaactggttcagctgggccttggccttggtgagctcctgggtggcacggcttaacgccttggccaacgcatgattcttggccatcaactggtcgttggcctcacccaacgacgccaacgtctcatcacgttgatccatttcatcagcctcgctttccaccgaatgcgtttcgagccgttccgtcatttcgtcatgtcatggcgcattcgcattcaacatgctcaacccttaagaatacccattgtcctcatgatttccgacaatcaaaaccatgcttgaacaagaatcgccaaacattgcgcccactcccaccctttcccagcctggactgctggtgatggatgtggattccacgctgatcgatgaggaagtcatcgatcagctgggcgccgccgctggaattggcgagcagatcgcgtcgattaccgcacgtgcgatgaatggcgaacttgattttcgcgaggcgttgcaggctcgtgttgcgctgcttaaggatctgccgacttcggtgttcgatgatgtgtatcgtcgcgtgcatttcacacagggggcgcttgatttgattgacgctttgcatgcgcatggttggaaggtcggcgtggtttccggcggtttccatgaagtcgtggaccgtcttgccgccgacgcgcatcttgatttttggattgcgaatcgtttggaagccgctgatggttgtttaaccggccatgtgcttggcgatatcgttacgaaagatgtgaaattgcagtcactgcgtgattgggcttcacgcatgggcatcagcatgggtcagactgttgcggttggcgatggagccaatgatctgccgatgattcatgccgccgggcttggcgtggcgttctgcgccaagcctgcggttcaggcggatgctccgcatcgtgtgaacgaacgtgatttgacccggattcttgattttcttcgttgattcgcattcttcgatgatgcgaatcccgatagatccgagtcgcgatatagcaaaatccgatattgcaggataacgatattgccgtgtgaaatgatgatgttcacacggcaatatcgttatgatccgtttattcgacactacttgcagtaggctccgtcgagatgcgcgccacgcgcccaatcggcggcacgcatggcttttttgccttgggctttgacttccagcaattccaaaggatctgaggaagtacccacccacacgttcttttttccggccacgatccgccctggttctagcgaaacgggtgtgttgggattgctcatatcggcgccctgcgcacgcaacacatgcaacgtggccggttctgcttcggcattggcgtgcagttcgcaccatgcgcccggattgggcgtgcaggctcgaatctgacgatccaccgcgaatacaggaatgtcgaaacgaatatgcgcgtcttcaaccgtgatcttctgagccacctcatatgcgccggcaggctgttccacaggcgcgatctgatcgtcggccatggcctgcagcgaggcggcaagcaaacgggaaccatcctcggcaagacggttcagcagctcacccgccgtttcatgcgctccgatttccacagtggactgcgccagaatcggaccggcatccatggctcgcacgatgcggaacaccgtggctccggtcaccttctcgcccgcccaaatggaacgctgcacgggagccgcgccacgccactgcggaagcagcgagaagtgcaggttgtaccatcccatcggcagcgcgtcgagcacatcctgcttcaggattttgccatatgccaccactgccgcggcctgggcaccggtcgcagcaagttcggaaatgaacgtttcctcgctcggatcggattcaatcaccggcaaaccaagatcaagagcggcctgcttcacgggattcggtaccagtttgcgtccacgcccggtaggagcatccggtcgggtgagcactgcgaccacttcgaaacgctcggtatcttcagccagcattttcaacgacggcaccgcaacatccggagtaccggcaaacagcactttcagcacgaaaagtcctccttatcaaatcctcatcgcatcgttatcatcgtgggaatcattccggccgcatcaacagcatgtaaggcagcggaacgcaacacactatgcctgatgcaccgcgggaatcttcacacccgcatcaatcagcagcgcacgcaacgcacgtgaatccttgaatcgaacgccacgaatgcccgcattgttcgcacctacgatattcatggccttatcgtccacgaacaccgcgccggaagcgtcaatgccgaactgttgcaacgcgaactcgtaaatatccttattcggcttacgcagggagacatatccggaaaccacacgatcgtcgaggctgcgcagaatatcgaaattgtcgagcgcgatcgggaacagatccttctgccagttgctcaatccccacacatgcacgccggccgctttcaaatcgttgatgagcacgcgggcgcccggcaccacgccggtcaacgagtcgacgaaattgtcgagatagtactgcagcatgtcggcccatttgtctccataacgttcacgcatcagggcgacgccgtcatcattcgacatgccgcagtccagttcatcgttgatgtcgtagaagccggaaatatcgttgtcaaggaactgttcaacaagctcgtcgctatagcggggcgtcatcacggccaccggatcccagtagacgagcacgttgccgaaatcgaaaatcacatcggtgatcggcttgcccgcattcaccgcagcttcgccgtcagccatgagcacgtcgtactccatatcaggctctccaggccaacccttcatatgatcctccattcactgctgtgcggcctcatgccgaactgccaacctgtctagtttttcacggcgaggggacgtgcgtcagattcgctccttcggatcaagctgaaaacgcagttctcccggttcacgcgcggccacatggcgggcactggcggaacgcaaacgcaacgccaactcacctcggcgactttgcggcacacgcaccaccgccttgacacgatccgcagtgccttccaattcgcgcgaatcaatggtccgaggctgcggaataggtaccggccccaatacggacggcagcatgccttcggtggtttcgatggcggacaggtcacccccacccaacgcgccgatacgttccagcgtgaccttcaccgcgtcacgacgtccccatacgcatgcggcggcaaacacaggcggcaatgcggtttgttcacgttcccgcaattcggtttgtgccagcaacgttgaattccaaagcatcaacgattgagcgagcgtgggatcggtttcgccgatcaacagggcctgacctcccctgattcgcggcgcgcacagcgaaaccgcgcgcatccacgacgtcaacgtgtctacgcccgcgtcaatgccgaaggcgtacaagctggtccatgcgtcgagaatggccacggcccggtattcgcattccgaggggttcctcccacgtacacggggttctgcgccgggagtggcgatgaccaactgcggcgcaaacccgatatcgggaacaatgccgcgtggctggctcggcgttgaaagcacaatgggcacgccacgaaacagtcggcttagctcctgcgcagttccggcggcacccacacgaaccacgcgcatacgttcgttatggcatgccgggcaagcccattgcacagtggcgacaccgcaccaacgacaacgcaccgacccatcccgtaaccgttccaatggacccgtgcagtacgagcagcgagcctgacggtggcatttcgcgcagctcaatgcttcaccgatgccatcctgcggaatgctcaacagcaccggaccgctttccaacgccttcgacagcactcgcaccgcagtgtgcggcacacgcgctccgatggtcgaatccgcaagtcttgccaattcgtcacggttcagccaacgaatccaaggactcgcttccttggttacggcagggaatgcgtgaatcggcgtactgaaaccgctgacctgggtggcaccgacatgcgccgcatcggtttcccactggctttgcacactgcgcgcattggccatcgcgacgaacacgccattatgcgcttttgcacgtaaccgcaacactccgcgggcgttggcgtaaggcatcatgccatcggcatcctgatagcacacgtcatcgagaatgaggaacaacgcattgccatccaccggcgcatacatcgccgcccgtgtgccgatcacgcaccgcacctgccctccactgatggccagatacgcacgataccgttcagcaggcgccatctgcgcgttcagaatggcgaaatcgccgccgtacgcaccattggatgattgggttggcgcgaaacagcgcaagccgatcgactgcaacgtttcggccatgtcctcaatctcacgcatggtcggcaacaccagtaccgccggtttgccctgcaataaggccgcggccaccatccaggccacgcactgcctccaatgatgggatcccggcaatgggtcgagcacgaacgcttggaaacgttgcccttccaatgccgtacgaagcaggtcgatattaccgtattgccgctgcagctgctcgtacgattcccgctcgatcttggcaagcgattcgatacgtccgtttttttcaatacccgttcgattgccgatacgttgttcctgttcgacgcgagccacgcgcggaggcaccgccaaacgcaggatattggctcgcgttccgccgaatgcgtccgcgataagtgtggcatcgttgcgcatggattccgacacaagcacacgatcgatgaccacccgttcgatgaaccgcaatgacgattcaggggtttcgctggtatcggtccgtttccaaatgatgccgttgacccgttgcccgccgaagcggacacgcaccattacgccgggctgggcggcttcggaatacttctcctcaacgtaatagtcgaaggtttgccccaaatggatggcctgaatatccagcaccacttgggctatgggatgctccgcagccggcgttttaaccgcgggcgcacgcttgcgccgcttgcgcggggcgagcccgtcaagcgccagctgctcggcatcctcagtactcatgattcaagggtaactcagccttcgatggcggctttcagctcgtcgaccttattggtggtctcccaggtaaaatcagcatcgttgcgtccgaaatgaccgtaagcagcggtcttggaatagatcggacgcttcagatcaagctcgtcgataatggcggccggtcgaaggtcgaacaccttacgcacagcctgctggatctgctcgcgagtcacaccattttcggtgccgtacgtttccacattgatggacaccggatcggccacgccgatggcatacgccacctgcacctcaaccttgtgggccagacctgccgccacaatgttcttggccacccaacgcgccgcataggcagcggaacgatccaccttgctcggatccttgccggagaacgcgccaccgccatgatgagccgcaccgccatacgtgtcgacgatgatcttgcgaccggtcagaccggcatcggcagctggaccgcccaacacaaacgaaccggtcggattgacaagcacgcgatattcatcatgcgccacacgatcggcaagcacatcatcaagcacaggacgaatcacatgttccgtcaactgctccttaagccacgcctgatcgacttgaggatcatgctgcgtggacaccaacaccgtgtcaagacgaacgggagcatcatgctcatcatattcaatggtcacctgggttttgccatcgggacgcagatgaggcacttcgccattcttacgaacctcagtaagacggtaagccaagcgatgagccaaataaatcggcaatggcatcagcacatcggtctcgtcgcacgcatagccgaacatcacgccctgatcgccggcgccctgcgcctcataacgctgctcgcgagatgccttcgactccgcttcgccactcaaacgagccacaccctggttaatctcagagctctgctcggtcaacgaaacggtcacgccgcatgaatccgcatcaagaccaacgcgagaactggtatagccgatattgcgcaccacagaacgcacaatgctctgaatatcggaatagccttcactcgtcacttcgccgaacacgaagaactggccaaccgtggcgcatgtctccacggccacgtgggactgcggatcctgggcaagcatatcgtcaagaatcgcgtcggaaatctgatcgcagaccttgtccggatgcccctccgtcactgactcagcggaaatcaacttcaattcagccatctggctgctcctttcacgaacgccccacacgttcgcccttctgattgctacgaaaaaaacgccccgtccttcgcatacgcaatcaatagcttcactatggactattcaaagcgcaccgctcaggtatcggggcgaatgaaaacttggaatccggttcttatcgcaagaaccgttacatcagttgccttcggtcagatcgtcttcgccgagggtctcttcaagcagaccatcattgatctcacggaaagcgatggatagcggcttttcctgattctgatactccaccagcggaccgacgttctgcagcaggccctcgttgagctgggtgaaataggaattgatctggcgagcacgcttggctgcgaaaatagcaagagcgtacttggagtccgcatgctccatcaagtcatcgatcggcggttccgcaagaccggtcggggttggctgagtgccgaatgccatattgattatctcccaatcatcagataagccaaaagcttcttttccaaagtcttaagtatagggccgccactggacctgattcaagccctttctctcatgttttcggcaagcgcaagcatcttcggcaatgctcgcgaatataacgcttctgggaattccacatagtgactcttgacaaaaccgtgtcccgcttaaccaccacaatagagaacatggaaatgcgatctgcaaaactgatgaatggacgagtattcgcgggcgcacgcgccctctaccgtgccgctggcgtggacggtaaggatttcggcaagccgatcatcgccattgccaattccttcgatgagttcctgcccggccacgtgcacctgaacaaggttggtcgactgatctccgaggccatcaaggaagctggcggcattccgcgtgagttcaacacgatggccgttgacgacggcatcgccatgggacacaccggcatgctgtactccctgccgagccgtgacatcatcgccgacaccgtggaatatcaggtgaacgcgcactgtgccgacgccctgatctgcatcccgaactgtgacaaggtcgtgccgggcatgctgatggccgctctgcgtctgaacatcccgaccgtcttcgtctctggcggtccgatggaggccggcaccacggtacttcccgacggaaccgtgaagaagaacaccgatctgatcgacgtgatgtatgcctccgccgacgacaatctgaacgaagaggatctgctcgcctatgagaagaccgtctgcccgacctgtggttcctgcgccggcatgttcaccgcgaattcgatgaactgcttgaccgaggccatcggcctggccctgccaggcaatggcaccattctggcttcgcactcctaccgcaaggatttgttcaagcgcgccgccgagcagatcgtcaagatcgccaagcagtattacgacgatgatgacgagactgtgctcccgcgttccatcgccaccaaggaagcgttcgagaacgccatgaccatggatgtggccatgggtggctccaccaatacagtgctgcatatcctcgccatggcgcagtccgccgacgtggacttcacgcttgacgacatcgagcgcatctcccacaccgtgccctgcatctgcaaggcttcgccgtccggcgaatgggagatctccgacgtgcatcgcgccggtggcatcactggcattctcggcgagctcgaccgtgccggcaagctgcaccgcgacgtgcattccatcgattacaagacgcttgaggacaaactcaacgactgggacatcatgcgtgatacctgcaccgaggaagccaagcagatgtatctggcggccccgggtcacatcgtgtcccctgatccgtggacgcataccacgctgttcgactccctcgaccgcgaccgtgtgaacggcgcgattcacgacatcgatcatccagccgtcaccgaaggcggtctggccgtgctgcgtggcaacctcgcccctgacggctgcgtggtgaagaccgccggtgtgccgaaggagatttggaccttccgtggaccggcactggtcgtcgaatcccaggaacaggccatcgaggtcatcctcaacgacactctgaagcccggtatggcgctggtcatccgttacgagggcccgaagggcggccctggcatgcaggagatgctgtacccaacgtcgttcgtcaagggcaagggtatcggcaagcaggtcgccatgctgaccgacggccgctattccggcggctcctccggtctggccatcggccatatcgctcccgaggcggcaaacaagggcccgattgccctgatcaagaacggcgacatcattaacattgatatcccgaaccgtacggtgaacgtcgagctttccgacgaagagctggcccagcgccgcaccgaactcgaagccggcgacggctatgtggcgcaccgcgaccgcaaggtctcccaggcgctgaaggcctacgcggcgttcgcccgttccgcagacaagggtgccacgcgcgatccggagctgatcaacaagctttccggtctcgcctgatcctagcgaatattaaataacataatgaggattgtgcagttaatatgctgcgcaatcctcatttttatttcatacttggcttcttttatataaaaatatgcgcccgatatgttcgagcgcatattacaatccttgtaattattatgattacaaatcgaattccgttgcgataaggttccacagttcatctgctgcctcatccacaacattattgacgatgactttgtcgaattccgattccgcggcaagctcgatttttgcggtttccaatcgtttcgcctgctgcgccggagtttcagtgccgcgcccgatcaagcgtcgttccagttcttcaaatgacggcggcgcgatgaacacggtcattacctcgatacccaactcccccgcacgctgcttgacactgcgagcaccttgaatatcgatttccagaatgactggaatatttcgctcaagatgttccacgacaggtttcacgggagtgccgtaatgtgcgagaccaaacacgtcggcggtttccaagaactcaccggcagcttccttgtcgagaaactcctgttcgggcatgaagaaatagttcacgccatccacttcacctggacgaggctgtcgtgtggttgcggataccgacagccagacttccggatgctgctcgcgcacgcgcccgagaacagtgcctttgcctacacctgccggtccgcaaaggacgattaaacggccatgctgggagtcggtcattgcttcctcactctgtattagttgctgaagatatttacaagaaggaattattgttgacaaatcgatgatgatttactcgtcttcttcatcatccaaaatctcatcatcgacttcgttctgggcctcgatgagcgcttgacgaatatcgagcgccacggattccgtagccgcggccaaactggaaatatccggaccatgcgtggcgatgaagcgagacacggtgacgagcacattgcccttggtgcctttgaacaccgtcttgaggtcgcgggtttcagcaccctgccatccgtagcccggagacagaataggaccagtgaacttggctggatcgacaccggaatcattgatccactgaccgatggtggcaccgatgatcaagcctacggaacccataccgtcattgcccttattgaacttctgagccgtgctggcaatgccgtacgccactgttctgcccttgtactcgcctgcctgacgaatggcggtctgcaggctggcgccctcttggttcgaggtcagcgatgcaatgaatacacctcgaccgttgttcagggcatcgttaatgacaccgcccaacgagcgtgcgccataatatggcagcaaagtgatggcgtcggcaagcaacggagacctcggcttgaaatagacatcggcgaatgcggacaccgtagtcggcaagcctccatgcaggcagtcaacgatggtgatgatacccatttgacgggctgcgtacagtacccgctcgagcgctgcgatacctttcgaaccgtagcgctcgaacatggagaactggaatttgacagctgccgctcgcccattggctgcctgcagcatacgcatggagtatagttcggcacccaatgcgtctacgttgtagccccagtcagtaagaagctgcctgtgtggatcgattcccacgcatagcggaccatattgggccatggaattgctcagtcgcagaccgaagtccgaacgctgggcactcatttcttcactgctgaggctgctcatcattactcacggctttccaactcgaatagctgctgggaatgatcctgaatgctcatgatctgataatcattattacgcacggcctcgatggccatcaacacggcggagaattccgtcatggtggtgaactgaggcaaatccgcggcaatagcggctgaacggatggcgtaaccgtcggaacgggagccacgagaattcggcgtgttgagaatcagatcaatggcaccctcttcgatcagctgaacgacgttcttgccgacgctgccctccgcatggtaggtggtgatcggatcgtccggattggaatccatacgcacgctgatcttgtcgacgatcttggactcgatgccgtaacgacgaagcacggatgcggtgccttcggtggcccagatgttgaatccaagctccaccagtcgcgcagcgaacaacggcagctgacgcttgtcggtatcgttcacggagatgaacacgttgccgctggtcggcagaccgccatcgtaggcggccagctggctcttggcgaacgcatgcgggaagtcacggtcgaagcccatgacttcgccggtggaacgcatttccggtccgagcagcacgtctacggtcttgccgagcggcgtacggaagcgcttgaacggaagcacggattccttgacggcaacctgctggccgcggcgaatgtcaccaccgtctccatgaggcagcagcaagccgttatcgcgctgctgctggatggtttcgccggccataatgcgggccgcggccttggccagtgccacaccggtcgccttggatgcgaacggcacggtacgggaggcacgcgggttcgcctcgataacgtacagggtgttggccatgaaggcgtactgcacgttgatcaggccttgcacgccacagcccttggcgatggcataggtgccttcgcgcagacggcggatctggtcatcggaaagggtgctcggcggcagagtgcatgcggcgtcaccggaatgcacgccagcttcctcaacatgttccataatgccgccgatatacagctcttcgccatcgaacaaggcgtcgacgtcgatttccacggcatcctgcaggaacttgtcgatcagcaacggagaaggcagacggccagaaaccacggtatcggcctgagcttccttcaatgcgcgatccacatacttgcacagctgggcgtcgtcgtacacgatttccatgccgcgaccgccaagcacgtagctcgggcgcaccagcaccggataaccgatgttatgagccgcctcacgggcttcgtcaaggctcagagcggtgccatagcgaggcgcgttcatctcggccttcttcagcacttcgccgaagagctcacggttttcagccagatcgatggattcaggcgtggtaccgagaatcggaacaccggcagccttcagacgagccgccagagacagcggggtctggccaccgagctgaacgataacgcccttgaccggacccatcttcttttcggcctcgtagatttcgagtacgtcttcgaaggtaagcggctcgaagtacagacgatcggacatgtcgtaatcggtggacacggtttccgggttgcagttgaccatgatggtgtcatagtccttgcccagctcctgcacggcatgtacgcaggtgtagtcgaactcgatgccctggccgatacggttcggaccggagccgagaatgatcacggcttcacgctcacgcggacgcagttcactttcgtccgcatagcaggagtaatagtacggcgtgaccgcgtcgaattcggcagcgcaggtatcgaccgtcttgaaaaccggacgaagatcatacgaccaacgcagttcgcggatcgtgttttcgccttcgtcgcccaagtggcgcaggtgtgcgatctgaaggtcggaaagacctgccagcttcgccttctttagcagcttgcggctcagcttgctcgcttccttgatttcaagggcggtctcgttgatgagtacaaactggcggatgaaccacgggtcgatcttggtggcatcgaagatctgctgttcggtggcgcctccccacagggcgcgctggatctgcagataacgatgctcggtcggcaccttgatggcttccaacagctgctcgacttcctgtacgtcaggcttgtcgccgtcccagttgaagcccatgtggcgcttgtcaatggaacgcatggccttgccgagggattcctggaagttgcctgccagagccatggcctcgcccacggacttcatggaagtggtcagcgtcggatcggcacccgggaacttttcgaaggcgaaacgcgggaccttggtgaccacgtagtcgatggtcggctcgaagctggcaggagtggactgcgtgatatcgttctggatttcgtcgagcgtgtagccaagagccagcttggtggcgatcttcgcaatcgggaagccggttgccttggatgccagagcggaggaacgggacacacgcgggttcatttcgatgacgatgatgcgtccggtgttcgggttgatggcgaactggatgttgcagccgccggtatcgacgcccacgccacgaatgatggcgatgccgatgtcacgaagcttctgatactcgcgatcggtcagagtgaacacaggcgccacggtaatggaatcgccggtgtgcacgccgacaggatccacgttctcaatcgggcagacgaccacgacattgtctttcttgtcgcgcatcagctcgagttcgtattccttccagccttcgatgccttcttcgatcagcacctcgtcggttggggaataatggatgcctgcgcctgcgatgcggtgcagttcctcttcgtcgtgcgcgatgccggaaccaaggccacccatggtgaagcttgggcgcacgaccagcggataaccgaacttttcggcgatcttgtcgacttcttcaatggagtgtgcgatgtcggaacgtgcggattctgcaccagcttcctcaacgacctttttgaagagctcacgatcctcgccgcgatcgatggcttccagagaagcaccgatcagctcgacgttgtacttcttgagcacaccggcctcacccaacgccatggccgcgttcagcgcggtctggccacccaaggtcggcagcagcgcgtcaggacgttccttggcgatgatctgctcgagaatcggcgtggaaatcggctcgatgtaggtggcatccgccatttccggatcggtcatgatggtggccgggttggagttgacgagaatgactcggatgccttcctcacgcaacacgcggcaggcctgagtgcccgagtaatcgaattctgcggcctggccgatcacaatcggaccggagccgatgaccatcacggacttgatgtctgtgcgcttaggcattgtgggttccctccttggcggaacgcatgagatccacgaaacgatcgaacaggtatgcggcatcgtgcgggccggctgcggcctccggatggtattgcacggagaatgccggaatatcaacgcactgcaggccttcaaccacgttgtcattcagatcgatgtggctgacgaacaccttgccgtacttgccgttttcaaacggcgcgtcaacggtttcgccgatcggcgcgtcaacggcaaagccgtggttgtgcgcggtgatttcgattttgccggtggtcatgtctttgaccggctgattgatgccgcggtgaccgaacttcagcttatatgtgccgaagccgagcgcacggccgagcagctggttgccgaagcagatgccgaagaacggatgacctgcgtcaagtacctggcgaagcaggttcacttcaggatcggcctgttccggatctcccggaccgttggagaagaagacaccgtcaggattgagggcttcaagctcatcgaacgtgatggtggatggcaccacatgtacacggcagccacgctcggccatacgatgcggagtcatggccttgatgccgagatcgaccgcggcgacggtgaacagcggttccttgccttcgaattcaccacacggctcgatggtataggcttctttggtgctgacttcgtcgtagaggctcatccccttcatctgcggagtggacttgacctcgtcaagcatggattcgatggtacgcagcttgccattggcgtcaagcagagcatcaccggagaaaatacctgcacgcatcacgcctgcggaacgcaggtggcgtacaagcttgcgagtgtcgattcggctgatgccaacgatgtgattggattccaaatcgtcatcgaggctgccggtggcacgccaattgctcacattcgggctgggatcgcgcacaacataaccggcaacccagattcgtgaggattctggatcctccccattgattcccgtgtccccaatgtgtgggaacgtctgcaccacgatctgacgatcgtagctggggtccgtaagcgtttcctgatatccggtcataccggttgcgaaaacgatctccccgctggtcgtgccgatcgcgccgtaaggttcacccacatacacctgcccgtcttcgagaacgagaacggcatcttgagggtcaaacatcacggcttcggaatcatactggttcaccaaaacccccttatagtcaaggtattcgtaccaaggatagcggccggttaggactcgcgacccggccgaatcgcttaactttcagctttattcagctgaaggttcggtcggttgctcatccacttgagcggcatccgcatcagcgcttaccgcgctgagcagaccgtggatgaatgccggtgattcgtcatcacacaacgtcttggcaaggccaagcgcctcgtcgatggccaccatattgggaacatcatcattgaacatgatctcccatgcggcgatacgcagaatattgcgatcgacaacgcccatacgcttgaccttccaaccggtggaatgctcgtcaagcgtggaatcgatggctgcgatatgttccgcaacgccacgaacgatttcgatggcgtattcaggcagcggagtctgggcgccgggctgctcaatgcgctcagcaagaagggacaggatgtcctgtcccttctcatccgcttcatacaacgtattcagagccctcttacgagcggtggaacgtgccatgaaacttctttcgtccttactctcagttctcgcggccgaggtaggagccgtcggtggtgttcaccttgaccttctcaccttcgccgatgaacagcggaacctgaatctcggcaccggtctcaacggtggccggcttggtaccggcgttggaacggttgccctgcagacccggttcggtatgggtaacggtcaggatcacggaagccggcagttcgacggacagcggggtgccgtcgtggaaggacacgacgcagtcggttccttccagcaggaacttggcctgatcgccgacgagagtcttcggaatgtagatctgatcgtaggtggtcatatccatgaacacgaagttgtcgccgtcctcgtaggagtactggaggttgcggttgtcgacggtttcgaattccatcttcatgccggcattgaaggtcttgtcaacgatcttgcccgagaggacgttcttgatggtggtgcgcacgaaagcggggcccttgcccggcttgacgtgctggaacttgatgacggcccacagctggccatcgaggttcaggacggaaccgttcttgatgtcattggtagtctgtgccaaattaactcacctatttcttcgtctaacagggaaagcttaaaagagccttgctcattatgccacggtgtgcatactttgtcggtaagccttccatatataggaaaacctccctcggcgaacatgcctcgggaggttttcctaaaaaacgctagttcaagcgtgccttgatatcaagcagaaactactcgatgatcttggtgacacggcccgagccgacggtgtggccgccttcgcgcactgcgaaggtcaggccctcctccatagcgatcggctggatcagctcaacgccgaaggtagcgtgatcgcccggctgcaccatctcaacgccttccggcagggtgataacgccggtgacgtcggtggtacggaagtagaactgcggacggtagttggagaagaacggcgagtgacggccgccttcgtccttggtcagcacgtagacttcgccctcgaacttggtgtgcggggtcacggagcccggagcagccagaacctggccacgctcgacctggtcacggttgatgccgcggagcagcagaccggtgttgtcgccagcctcgcactcatccatctgcttgtggaaggtctcgatggaggtgacggtggtggtctgggtcggacggataccaacgatctcgacgttggagttgaccgggagcttaccacgctcgacacggccggtaaccacggtgccacggccggagatggtgaagacatcttcgatcggcatcaggaacggcttgtccagatcgtgagtcggggtcgggatgtactcgtcgacagccttcatgagttccttgacggactcaacccacttctcgtgatccggagcgtcgtcgtgcagcgcgccgtaagcggaggtgtggatgaccgggcaatcgcgatcgaagccgttttcgtcgaggaggtcacggacctcttcctcaacgagctcgatgagctcttcgtcgtcgaccatatcgcacttgttcagagcgacgaggatacgcggcacgcccacctgacgagcgagcagcacgtgctcgcgggtctgagccatcgggccgtcggtggcggccacaacgaggatagcgccatccatctgggcagcgccagtgatcatgttcttcacgaagtcggcgtggcccgggcagtcgacgtgagcgtagtgacgctcagcggtctggtactcgatgtgggcgatgttgatggtgataccacgctgctgctcttccggagcggcgtcgatctggttgaagtcgtaagccgggttgatgtccgggtactcttcgtgcaggaccttggagatggctgcggtcagggtagtcttaccgtgatcgacgtggccaatggtaccaatgttaacgtgcggcttagtacgctcgtacttttcctttgccatgtgttttgtcctcctggacgtctcgtagtaagccttgaactcacttcaaggcactcgctacattttactgggtttgacgggtttgtgccactttggagcccgaacccagtcagcgctacaaaatactagcgctgactggagacagtttccacttaagcggcagcgcgtgtcactcgccgcgctgggccttgatgatctcctcggagacgttcttcggaacctcagcgtaggagtccatctgcatggtgaacattgcgcggccctgggtcttggagcgaaggtcgccgatgtagccgaacatttcggacagcggaaccttggcgtcgatgaccttgacaccggtggagtcggtcatggactggatggaaccacgacgggcgttgatatcgcccatcacgtcgcccatgtactcttccggagtacgcacttccacggccatgatcggctcgaggatgaccggcttggccttcggagcagcttccttgaagcacatggaacctgcgatcttgaaggccatttcggaggaatcgacgtcgtggacctggccgtccgtgacggtagccttgacgccaaccaccgggaagccggcgagcacgccggattccatggcttcctgcacaccagcatcgatggaaggaatgaattccttggtgatgtggccaccggtgacctcgttgacgaactcgtaggtctcgccctcttcggtgttgagcggctcgaagttcatcaagacctttgcgaactggccggaaccaccggtctgcttcttgtgcgtgtattcctggttcatgacggccttgcggatcgtctcacggtatgcaacctgcgggttacccacgttgcactccaccttgaattcacgacgcatacggtcgacgatgatgtcgagctgcagctcgcccatgccggagatcagggtctggccggactcttcgtcggtcttcacctggaaggtcggatcttcgtcggacagcttcgccagagcgatgctcatcttctcctgatcggccttggtcttcggctccacggccacctcgatcaccggatccgggaaggtcatggattcgagggagataggcgccttttcgtcgcacagggtgtcaccggtggtgatgttcttcaggcccacgaaggtgtagatgttaccggcttcggcggcatcgaccgggttctccttgtcggcgtgcatctggaagatcttgccgacgcgttccttcttgcccttggtggagtcaagcacggtgtcgcccggggtgacggcgccggagtagacgcgcacgaacacgagcttgccgtagaacgggtgggtagagatcttgaagaccagggcagagaacggatcatcggtggtcggcttgcgatcgatctcgatggattcgtccttaggatcgaaaccgacgatggacggaacgtcctccgggctcggcaggtagtcgacgacggcgtccagcatcggctgaacacccttgtccttgaaggcggagccacagagcaccgggtaggcttcacggttaatggtgagcttacggatgccgctacggatctcgtcctcagtcagttcgccggactcgagatacttctcaagcagctcttcgtcggattctgcgacctggtcgagcaactctgcacgatactgctcggccttgtcctgcaggtcggccgggatgtcggtagtgtcgtagtgagcgcccatgtcgccggaaacgtcgttccagacgtaagccttcatacgaatcagatcgacaacgccagcgaagtcgttctcagcgccgatcggcagctgcacgacaagcggggtcgcgcccagcttggttttgatggtgtcgacggagtagtagaagtcagcgccgagcttatccatcttgttgatgaagcagatacgcggaacgccgtacttgtcagcctgacgccacacggtctcggactgcggctccacaccttccttgccgtcgaacacggcaacggcaccatcgagcacgcgcagggagcgctccacctcggccgtgaagtccacgtggcctggggtatcgatgatgttgatctggaacttctgcttctcgtcatgggtctgacggttccagaagcaagtggttgcagcggactggatggtgatgccgcgttcctgctcctgagccatgaagtccatcgtcgaggcaccgtcatgggtctcgccgatcttgtagttcttgccggtgtagtacaggatacgttcggtggtagtggtcttaccggcatcgatgtgagccatgatgccgatgttacggatctggttgagatcattgagcacgtctagtgccatgagtgttccttaactctcgttctcgactaattaccagcggtaatgagcgaaggccttgttggcctctgccatcttatgagtatcctcgcgacgcttgacagaagcaccaaggccattggaggcatcgaggatttcgttggccagacgctcagccatggtcttctcacgacgggcgcgggagaagtcggtcagccagcgcagggacagagtgttcgcacgagccggcttcacttcgaccggaacctggtaggtagcgccaccgacgcggcgggagcgaacctcgagggatggacggatgttgtcaagagcgcgcttaagcactgccaccggctcctgatcagtcttttccttgaccatatcgagagcggagtagacgatgtcttcggcgatcgacttcttgccgtcgagcagaatcttgttgatgagctgtgccacaacagtggaaccgtaaatcggatccggcagcagctgatgcttcttggaaggtcctttacgtgacatatctcttacttcgccttctttgctccgtacagggaacgaccctgcttgcgatccttcacaccctgggtatcgagggcgccacgaacgatgtggtaacgaacacccggcagatccttgacacggccgccgcgcacgagcacaatggagtgctcctgcaggttgtggccttcgcccgggatgtaagcggtgacttccacaccggagctcaggcgcacacgagcgaccttacgcagtgccgagttcggcttcttcggggtggtggtgtaaacacgggtgcacacgccgcggcgcagcgggcttcccttcagtgccaaagtcttggacttcttcggctttgcctgacgtcccttacggacgagctgttcaatagtaggcaacttgaattctccgattcagtggtttctcttgcttttgtgtgaccgccgcactgcacccacactccacgcatctgaatcgtgaagatagccacagtccaccggcccgatggcccatccctctctcaccgtcgcattgctgcgcgtgatgcaatcgagttccgggatatcccaacccgcacgcctgtcacataaggcatgccgttggcacacacgaattatcagtatacggattcccaagacattccaacatgccgtgtcgcaaatcgcaaaaggaatggccccggatcctttcgaatccggggccatccactcgggaaggaggttcccacttctttgctacgcgctaccttacgcgcactcttcagtctcgttgtctgttttgcatttgcggcccggcgcctgcgccgtactaccccattgccgctgtttcgaatcgctattgttcagttatatcttaaaggcgttgcgcatgaacctcacggccatcggcgcttcgttgcgacctgacgaattctcgactgatccacaactccggccttcagttacagtataccccaaaacgaacaaaaaacacgggtgaagacacccttaaatcccaataatttcaatcattttgcctacatcagcgcaaagcaacaaaacatcacaatgacacgtttgcaccactcaaaacaaaacattccctgaatcgttttgaaagattcagggaatgcgcaatatgacgacggaatctactgacgaatgtcagctgttagctgtttcggcagcgtcttcgcgggccttcgcagccgagcccttctcgccattgtcggaatcaggatggatctgatgcctgtcatcatgctcacgccaccagctggacagcacggaaccggaaatgttgtgccaaacgctgaagaacgtggacggcaccgcggccaacggattggaagcgaacgacgtcagcgccaaagtcgctcccaaagcggaatcctgcatgccgacctcgaaggtgatggctttctgctgtgcataacggaagcccttcggatataccttgtacataagtttggagaaaccgaagcccaacgcgtatccgcacaggttgtgcagaatgaccaccgggatggcaagcagcgaggaagccacgaacagcttcggaccgttggctgcgacgaccacgccgatgataagcaggatggccacctgggacacgatcggcagagcgaccgtaatcttctcgatcttctcgccgaaaatagcatggcagatcacgccaagagcgatcgggaacagcaccaccttgaccgcattgaggaacagggattccaccgggaccgacacatactgggaagccagccactgcatcaacagcggaatcatgaacggcgcgcacagcgtggacaaaatgccgatggacacgtccagcgccacatcgccacggctcagatagctcatcacgttggacgaggttccggacgggcagcagccgaccagaatcacaccgacggcgagcgcaccatcaagacggaaaatccagcacagcagcacagctaccaacggcatgatgacgaagtgggccacggtaccgacgatgaccatcagaggctgggtgagaatgcgcctgaaatcgtcaagggtcaaggtaagacccatgccgaacagcacgatacctaggaaataaccggtataggatttgccccacaagcttgcctgcggcacgaaatagttgaacacggcccacacgatcacaatcgcggtgaaccacttggtgagccaatcaccaaacgctttgaccttctgcatgaatctctcttccttcacatttcacagcttttcggccgatgatccgcatacgccgtaaacactccgagacggcccacaccgccattacagcacacccttacgcatgcagcgactacaaggtacgcgtgagtttcggatttgtgtaatatgccgttcacataatgaacaatccacagcgcaagccgatgacaggcacgcgcaacacgccgatgtagacatagctggaaaatcgtgtatagttttcatctgttgcgcttctgtatgaagcgaaaacatggtggctatagctcagttggtagagcatctgattgtggttcagaaggtcgcgcgttcgagccgcgttagccaccccggtagagacctcggaagaaattccgaggttttttgctatccggacggcttgaatacagcaaacagccggtcgcaagtcatcagcataggtcagatacaaggagcgcatcatgctgtcttttgaaaacgactattcctgcacggcaacaccggaaatcatcgaacgcatcagcgaaatcgcacaaaaccaatatccgggttacggcaacgacagcatctgcgaaagcgcgaaagccaaaatccgcgaagcatgcgcctgccctgacgcacagattttcttcctggtaggtggcacgcagaccaaccagaccatcatcgactccatcacaccgcagtatgccggcgtaatcgcggcaagcacaggccatgtgaacgtgcatgaggcgggcgccatcgaattcaccggacacaaggtgctgacgctcccccaccatgacggcaaaatcgatgcgaccgaactcgacgagtactgcgccacgttctacgcggacggcaactacacgcacatggtgttccccggatgcgtctacatttcgcaggccaccgaatacggcacgctctacacgctcgccgaacttgaggcgatccgcaaggtctgcacgaagtacgacatgccgttgttcatcgacggcgcacgacttggctacgcgctgaccgcaaccggcaacgacgtgacgcttgaagacatcgcgcgtatcgcggacgtattctatatcggcggcaccaaggtcggagccatgttcggtgaggccgtggtgttcacgcacggcaatatgccgaaaaacttcgtgacgctcgtcaagcaacatggcgcgctgctcgccaagggatggctgctgggcgtgcagttcgacacgctgttcaccgacgatctgtattgcaggatcgcccgccacgccaacgatgcggccgaccgtattcgcgaagtgctggtggaacgtggctatacgctcaccttcgacgcgccgaccaatcagatcttcatcacgctcgacaacgcgacatccgagcgtttgcagcgcaatgtgcgcctcggcttcatggaaaaggccgacgacacgcacacggtgatgcgcatctgcaccagctgggccaccaccgatgagcaggtggagcagctgatcgcattgctgtagcgcgcatcgtcgctgtcaatcggaaaaataatcattacgacaaacaacaaaaaggcgcaggaattacatcccgcgcctttttgcttacgttacgatcatttatcacgcatgtggttccatttatgctgattgttacgcattgatttgcttattggcattatcggcgatcgcctcgcgttccatagccacgaatttacgcacggaagcagccaccgaataatgctctttagtgtgttcggcatagatttcgccccatttcgacagttcatcggggtgatcgacccaccaatcgatgcgccttgccaacgcttccacatcgtcgacagggaatagcgattcgtcacgtaacgcgaactggcctgcggcgctcaacggagacgatgcgatgaccggcaccaaaccggcggccataccttcaatgacgctcaccgattcgagatcggcaatcgaaggatgcaccagcaaatcgccggaacgcagcaacgcgggcatttcggtgttcttatgaaatccgatcgatgccggtcgggaaagcaaacgtgcggcgagtcgctgcaatttctttttcaaaggaccggtgccggcaatcgtcagttcaatatcttgcgcatgcctgcaacgggcgatcgcatgaattaatgcgacatgattcttttcgttcgtcaatcgtccggaagcgacaatgtggaacggaaccggagcggacttccccgcatcgcgctgcgttttcgcagtgaatcgtgattcatatccgttggaaatcacatgcagtttcgatttgtacccgtgagaacgcagcaaacttgcgccaagctcggtcggcacatgcacatggtcgattttgcggtacagccacaaattgaacagccagtagatgaacttgtcgatgcccggaatatatttcagcggacctgccgaatacgtgatgttctccggctgcacatgatagcccgcagtaaccgcgattcccatctgtttggcgactttgcacgcatgctggccaaaacggaacggcgtgtagatgtgcaccacgtccacgcctcggaacgcggttctgaacagcgtgtcgctcggttcggcgaactgcatctgctgctttttcgccacccaactgaccagaggcacatggttgactcgtgccgggtattcaggcgcaccaatgcccacaagcctgaccgtatggccttgccgcttcaattcctccgcccactgcaacgccgaattcgacgtgccgttacctcggtttcccgacgtatcgaccaccatggcgatggtcagggggcgctgtgtttcttcctgttccgtctcagacatgcactccatcctacgccgatggcacaatggaaggcatgactgaagagaatcgtgccttgggcactccgcttggtaagcatccgactcgtgttctgtttcttggctccggagagctgggcaaggaagtcactctcgaactgatgaggcttggcgcatgggtgtgcgcggccgattcctatgagggtgcccccgcgcagcaggtggcgcatgaataccgtgcgctcgatatggccaatgccgaacaattgcgcgtattgtttgacgaaatccagccggatattatcgtgccggaagtcgaagcgatcgccaccagcgaattggctgccgcggccgagcgtggcgcacaggtggtgccaagtgccgaaatcgcatccatttgcatggatcgtgaacgtttgcgcgtacttgcgcatgaggaattgggattgccgaccacgccgtaccgcttcgcaggctcgctggaagagcttcgcgctggggcaaaaacggttggctacccgtgcgtggtcaagccgattatgagttcttccggtcacggccagtccgtggtgcgttccgccgatgcgattgatgcggcttgggttgaggcacaggaaggtcgtcgcgcgcacgacgagggagacgtttcccgagtgattgtagaagcgttggctccgcttgattacgagctgacggtgctgaccgtcagctccagcgccggcatcgtgacctgtgctccgatcggacagcgtcaggaaagcggcgactatcgcgaatcctggcaaccggcctccttcacacaggatgtgcttatgcaggcgcaacgcatagcgtgcaccgcagtggaaggtctggtggcgaaggccaaggcttccggcgagaagggttggggtgtgtttggcgtggaattgttcgtgctgaccgacggttccgtgctgttcaatgaagtctccccacgtccgcatgacactggcatggtcacgatggcgtcgcaacggttaagcgaattcgcgttgcatgcgcgtgcgattctcggtttgccgattacgcaggaacatgtcgccttgtcgatcccggacggtgccgtcgcggcaagccatgcgatcgtcattcagggcgatggtgaggccgaattccgtaacgtcgccgccgctttgtctcagccgggcaccgacctgcgtatcttcgcgaagccggaagtgcacggccatcgtcgcatggcggtcgcgctggccatcggaacagatgaggccgacgcgcgtgctaaagccgagaatgtggccgaatcgctcgaaatcgacatcgcctgacgcactattgccggatactgacggaagactgccggaacgcgcccaaaaaccattcgattgtagcctcccgttggtatcttgttaaccgtcaagttcaccaaactatctacctcccaaacaccaggaaaggcgagtaatggagaagttggaaaagctctacgagggcaaagccaagcaactgtacgcaactgacgatccggaggtgctctgggtcgaatacaagaactccgctaccgcaggtgacggcgaaaagaaggaagacttcgccggcaagggcaggctgaacaacctcatcaccacgctgatcttcgatctgctcaagaagcgtggtatcgacagccatctggtggctcgcgtgggcgaaacctcccagctggtcaagaaggtcaccatgttcccgctcgagatcgtgctgcgtaacaccgccgccggccacttctgctctcgcttgggcgtggaagagggcatcgagctcaaggagccggtgctggagtacttcctgaagaacgatgatctgcacgatccgttcgtgaacgacgacgatctggttgcgttgggcgtctgcacccgtgaggatctggctgagatcgcacctctcgcacgccgcatcaacgaagccctgatcgagatcttcgccaagatcggcatcaagcttgttgatttcaaaatcgaaatgggtcgcacttccgatggcacgctgctgctggccgatgagattacgcctgattcctgccgtctgtgggatcagcgtgacggctccggcaaggtcgagcatctcgacaaggatctgttccgccgcgatctgggcgacatcattccggcttacgaagaggtcgaaagccgcttggctgaactcgccaagtccgaaggcattgaagtagccgaataatacttgcgatagcccgcatctgcagtacaaactcggatgcgggcttcatcgtttttgaaaatcttatttttatcaatctcaccaagcccctctttcaaggagtcaaccatggtttttcgcgtgtacgtggaaaagaagcagggttttgatgtcgaggccaagcagctcgccaacgagctgaagaccattcttggcatcgcatcgctgaagaatgtgcgtctcgtcaatcgttatgacgtggaaggcattagcgaggaactgttcgcacaggccacccctaccgtgttcagtgagccgcaggtcgataatgtttccgccgatttgcctgatttcggttctgataatgtgtttgctgtggagtatctgcccggccagttcgaccagcgtgcggattccgccagcgaatgcattcagctgatctcccagggcgagcgcccgactgttcgttccgccaaggtgtatgcacttgaaggcgagctgggcgacgccgacatcgccgccatcaagcattatgtgatcaacccggtcgaggctcgcgaagcttcgctggataccaagaccacgttgaagacgcaggtgccggtaccgggcaaggtggaggtcatcgaaggtttccgcaccatgagcgacgccgatcttgagcagttcatcgccgaccgtggcctggccatggatttggctgatctgcagttctgccgtgctcacttcaccgaggaacagcgtgatccgacaatcacggaaatcaaggtgatcgacacgtattggtccgatcattgccgtcacaccacgttcggcacgcaacttgatgatgtgcagattgacgacgcgaccgtgcaggccgcgttcgataagtatcttgagatgcgtcacgagcttggccgcgacgaaaagcccgtatgccttatggatatgggcaccatcggcgcgaagtggctcaagaagaacggtattctgaagaatcttgacgaatccgaagaaatcaacgcctgcaccgtcaaggtgaaggttgatgtgaatggccatgatgaggattggctgttcctgttcaagaacgaaacccacaaccacccgacggaaatcgaaccgttcggtggtgcggcaacctgcatcggcggctgcatccgcgacccgctttccggccgttcctacgtgtatcaggccatgcgcgtgaccggtgccgccgatccgaccgtgccggtgtccgagacgcttgaaggcaagctccctcagcgcaagctcgtcaccaccgccgccgccggttattcctcctacggcaaccagatcggcctggccaccggtcaggtggacgaaatctaccaccccggatatgtggccaagcgcatggaggtcggtgcggttgtggccgcgactccggccgatcatgtgcgccgcgaaaccccggctccgggcgacaaggtcatcctgctcggcgggcgtaccggccgtgacggcatcggcggcgccaccggcgcgtccaaggcgcataacgtcgaatccttggagcttgacggcgccgaggtgcagaagggcaatgctcccgtcgaacgtaagctgcagcgtctgttccgccgcggtgacgcatgccgtctgatcaagcgctgcaacgatttcggcgccggcggcgtatccgtggcggtcggcgagctggctgacggcctgtatgttgatctcaacaaggtttcgaagaagtacgagggcctggacggcaccgaacttgcgatttccgaatcccaggagcgcatggccgtggacgtggccgccgaggatgtggacgagttcctgggctacgccaaggaagagaatctcgaggccgaagtcatcgcgacagtgaccgaagagccgcgcatgacgatggtatggaacggcgacacgatcgtggatctgtcccgcgagttcctcgcctccaacggcgctccgaagcatcaggtggtgcatgtcgaggcgcagcacggctacgccaccccgtggaagaccggcacgctcgccgaacgcatgcacaccatgctcaccgatctgaacgtggcttccaacaagggtctttccgagcgtttcgactccaccatcggcgcaggcaccgtgctcatgccgttcggcggcaggaagcagctgaccccgaacatggccatggtcgccaagctgccggtgttcggcgagaccaccaccgcctccgcgatggcttggggcttcaacccgtacatcatggagcagaaccagttcacaggcgcttatctgtctgtggtcgagtcgctctcgaagctggtggccgccggtttcgaacatgagaaagcgtatctgagcttccaggaatacttcgagaagctgcgcgacgagccggagcgttggggcaagccgatggccgccgtactgggcgctctgatggcgcaggtcgatctaggcgctggcgcaatcggcggtaaggactccatgtccggcacgttcgaacagctggacgttccgccgaccctgatctccttcgccgtggcggtgggcaacatgaagcgtgccacttccccagagttcaagggcgctggtcaccgtgtgatccgcatcgcgccgcgttaccaggccgacggcctcacaccggacaaggattcgctgctggaggtgttctccgcagtcgaggagctcaccgatttcggcgatgcgctggccgtgtccacgcctggctacggtgccaccgccgaggctatcttcaagatgacggtcggcaaccagatcggcgtgaagctggccgatggcatcagcgtggacgacctgttcgccccggcctatggttccttcatcatcgaacttgccgacaccgcgaaggttccggccgtatccaacctggttgaggtcagtgaggtcggcgagaccaccgaggcctaccagttcgtggcagccggtgagacgctggatctggccgaactgcaggacgcttgggagggcggcatcgaatccgtgttcccgtaccgatccaagggcgacgaaaagggcaagaccgttgagaccgtgtccttcaatgcgccgaagaagaccgtatacaccggcgccggcgtcgccaagccgcatgtgatcatccccgtgttccccggcaacaactgcgaatacgattccgcagccgccttcgagcgcgcgggtgccgacgtgagcacgctcatcgtgaacaacctcacccctgctgctgtggctgagtccaccgcagctttggttgaggaaatcaagaagagccagatcatcatgattcctggcggcttctccggcggcgacgagccggatggttccgccaagttcatcaccgcgttcttccgtgctcctgccgttaccgaagcggtgcgtgacctgttgaacaaccgtgatggtctgatgctcggtatctgcaatggtttccaggcgctgatcaaactcggcctggtgccgtacggcgacatcgtgccgatgaccgccgaatgcccgacgctgacgttcaacaccatcggccgccaccagagccgtctggtgcgcacccgcgtggcgtcgaatctctccccgtggctggcaaagaccgaggtgggcgacatgcacaccatcgccatctcccacggcgaaggccgtttcgtggcttccgacgatatgctcgcccagctcaaggccaatggccagatcgccacgcagtacgtggacgaggccggcgtgccgggcatggacctgagcgtgaacccgaacggttcactgctggccatcgaaggcatcaccagcccggacggccgcgtgttcggcaagatgggccactccgagcgttacagcaacggtacgttcaagaacgtgcccggcgagaaggatcagccgctgttcgcagccggcgtggagtacttcgccgcctgatccacgaccgcatccataaaagcgttctgacgtagcttcgaacatacagaggctgtctggtttgatcgggattcctccctaatcaaaccagacagcctcttttttggtctccgacgcatgttaggcggagaggtagccttcggagagattgacgggggtgttggcgcgttccactgcttcgttggaatgggtggcggcttgtttgatgatgtcgtcgtagccggtgagagcggcgaaaggcatgaattgcgcggcacggttgtgcatgctcatgtgcggacgcgtgcgcgagcgatgatgaggcaagttgatgatgtcatcgtaacggtcggtttgctgcaaactcacgctgcatgacctccaatctgtcggttgcgctgttgacctgtggcatcagcgaacatgtccattcctttgatgacggcgtttttgccgaacttgcgtttgatgtcaagaatcgtctgttgcacatgctgttcggaaatctcatcgacaacctgcatatcgtcagtataggaagaccgcgcgttgttatcgacgttatcactgcaatcgttgctatcgcttccatttgagacttcctgcatatccgaaaacagatcgggctgaacgtaattcgccgcagcattccgctcagccagctgttcgaccgtttgcaaatcagaagcaaccacattcaatcgacgtaccaacagccgatgatcgacgattctgcagaacaattcgtcaaccgcatcgcatatgcgcgtggtggatgacgtatggtcgcccagaccaatcgaccctatagccggcttgggcacacgccgaccatacctatcaagagttacgggaccgctatattcggcaatggctcgctcagccatcgccttcaattccggagtgccacactcccctagccgctttggatcaagactggcggtatcgtaaccgaccatcaaccccatatggccggccttcacacctttggcaaccaagtccaaagacaaggtgtccgccatttctctcacaatcagccgcgccgagtcaaaaccgaccgcgcccgtaagcacctgccccgaactcatactatgaccagctggcttatacgctttgatgtcggcgatcgtgcaaggttcccaaccccacgcatggtcgataagcagctcggcgttcacaccgaacatcttgtacagcaggccctcgttgtaatactcgtcggcacggcctatggaacatcgggctatatcgcccattgtcattagaccttgggcttcgagcttcttcgcataccctcgtcccacacgccagaaatcagtcaacggcctgtgcgcccataacagccgacgatacgacatctcatccaattgcgcgatacgcacgccatccttatccgcgggaatatgcttggcgaccacgtccatagccactttcgccaaatacatattcgtaccgataccggccgttgcggtgatgcccgtctcccgaagaatctgctggatcatttcacgggccatatcatgcgcgcttttgccgtaagcccgcaaatacccggtaacatccatgaatacttcatctatcgaatagacatgaatgtcagcttcggatacgtatcttaaatatatgctgtagattttcgcactgatgttgagataatgcgacattcgaggcttcgctatatacacgccggcagccagattcggattagctgcgagcgctttcgcatcatacgattcacctctcagcacaccgcccggtgccgctgcccgccgtgcagcattgacttctttaagcttcgctttgacttcgaacagtctcgcccgccccggcagtccatatgctttgagcgatggcgacacggcaagacagatggttttgtcggtgcgcgattggtcggccactaccagatgcgtggatagagggtcgaatccgagttccgcacattccgaagacgcatagaaggatttcagatcgatagcgatataggtacgttcggccatcttcagactccttccatgatttggctccatcttgaaacgtcaacgagcacttcgcctcgcaaagcaccgacaaagcatcaccgatgcaccgcactgtattttcctgcattcagcatatcagagagttcgaacaattgttcgacacacccgacatgccaagtgcccctaaggactccacgaaaaccgccaattgtagcctccggttggtagggttgaacggtagcgaaccccttgtctccatggttttggaaggagctttggcttgtcagctgaactcgaagacatccacgaggaatgcggtatttttggcgtttggggtcacccggacgccgcccgactcacctacttcggcctgcacgcgctgcagcatcgtggtcaggaaggcgccggcattgtctcgaacgataacggtcatctcatcggtcatcgcggaacgggtctgttgacccaagtgttcggcgacgaacgcgaaatcgaacgcctgaagggagacaaggcgatcggccatgtgcgttacgccactgccggttcaggcggcaccgacaacatccagccattcatcttccgcttccatgacggcgatatggccttgtgccacaatggcaatctgacgaactgcccgactctgaggcgtcagttggaagacgaaggcgcaatcttccactccaattccgacaccgaagtgttgatgcacctgttgcgccgctccacacagcgtacgttcatggacaagctcaaggaagcgctcaacaccgtgcatggcggtttcgcctacctgatcatgaccgaagacgccatgatcggcgcgcttgatccgaacggtttccgcccgctttccctcggcaagatgaaaaacggcgcttatgtgctcgcttccgaaacctgcgcgcttgacgttgtcggcgccgaattggtgcgcaatattcgcccgggcgaaatcgtggttatcgacgatcacggctacaagatcgtgcagtacaccaatcagacccagttggccatctgctcgatggaattcatctacttcgcacgccccgattccgacatttacggcgtaaacgtgcattccgcccgcaagcgtatgggtgcgcgtctggcccaagaatcgccggtcgatgccgatatggtcattggcgtgccgaattcctcgctgtccgcggcctccggctatgcggaagaagctggtctgccaaacgagatgggcctgatcaagaaccagtatgtggctcgaaccttcatccagccgacgcaggaactgcgcgagcagggcgtgcgcatgaagctgtccgccgtgcgcggcgtggtcaaaggcaagcgcgtgatcgttatcgacgattccatcgtgcgcggtaccacgtccaagcgcatcgtgcagctgctgaaggaagctggcgccgccgaagtgcacatgcgtatcagctcgccgccgctgaagtacccgtgcttctacggcatcgacatctccaccaccaaggagctcatcgccgcaaagaagtccgttgaagaaattcgcgatttcattggcgccgattccttggcgttcctgtcactcgacggattggtcgaatctatcggcctgggtgcggacgccccgtacggcggtctgtgcgtggcctacttcaatggcgactacccgaccgcactcgacgattatgaaagtgattttttgaagtcccttactcctgaagatcgcgtgcgtctgcctgaattcgccttgtataagagcaagtacgagggcaacgaatacaccactacttcatcccaagaagaacactgaacccgagaaaggtttgatatgccaaaagcatatgaggaagccggcgtaagcgtcgaagccggttacgaagtcgtcaagcgcatcaagtcccatgtggcgcgcaccaaccgtccgggcgtggtcggcggtatcggcggcttcggcggcctgttcgatctggcttccctcggatacaaggagccggtactgatttccggcactgacggcgtcggcaccaagctggtcgttgccaagatgtccaacaagcacaacaccatcggcatcgactgcgtggccatgtgcgtcaacgatattgccgctcagggtgcggaaccgttgttcttcctggattacatcgcctgcggcaagaacgatccagcactgctcgagcaggttgtggctggcgttgccgacggctgcgtacaggctggttccggtctgatcggtggcgaaaccgctgaaatgccgggtatgtatgacgaagacgagtacgatttggccggtttcgcggtcggtgttgccgagaagtccgcaatcgtggacggctccaccatcgctgagggcgatgtgctcattggtctgccgtccaccggcgtacattccaacggcttctctctggtgcgcaaggccctgttcgagaaggctggctataccgtcgataccgtgcttgacgagctcgacggcgaaaagctcggcgacgtgctcctcaccccgacgaagatttatgtgaaggccctctccccgctgttcaaggccggcgtggtcaagggtgtcgcccacatcaccggcggcggcttcatcgaaaacgttccgcgtatgattccggacggtctggccgcacacatcaacctcggctcctggccggtactgccgattttcgacgtgctcgaaaaggccggcgaagtcgaccatatggaaatgttcaacatcttcaacatgggtattggtatggtgctggccgtcaacgccgaagatgccgataagaccatggaattgctcaagtccaatgacgaagccggttacgtactcggcaatatcgtcaagaagaccgatagcgacgtcgaactgcagtaaatacatatacgggggtgagccataacggccacccccttttatttcgaaagactttcctgaacataggattttcccaaaagggacacaacaggaggaaacatgaaggttctggtcatcggttccggtgcacgcgagcatgccatcgcccatgcacttatgcgcggcggcagcgtcagcgaagtcacagtggctccgggcaatccaggcatggagcttgacggcatccgcaccacgcagatcaacccgtccaatcatgccgcgctgattgatttcgtgaagaacaacggctacgactgggtgttcgtcggtccggaagtgccgcttatcgagggcatcgtcgacgatttcgcgggagctggcatcaaggcgtttggtccgagcaaggccgccgcgcaaatcgagggttccaaggatttcgccaagcagttgatggaacgtcacaacattccgactgcgaagtatcagacgttcgacgatttggagcgttccaccgcttatgtgcgtgaacatggcgctccgattgtgatcaaggctgatggtctggccgctggcaagggcgtgaccgttgccatggatgaggaaaccgccatcgccgctcttgaagacattttcgtcgatcatcgtttcggcaacgccggtgcgaaggttgtcatcgaggacttcttggagggtcaggagttctcgctgatgagttttgtgaatggcaccgatttctggccgatgccgatttctcaggatcataagcgcgcttatgatggcgataagggtccgaacaccggtggcatgggtgcgtacagtcccgttccgcagatcggtcaggatgtggttgacaccgctatcgaaaccattgtgaagccgaccgtgcaggctatgtccgatgagggtacgccgttcacgggcattctgtacgctggcttgatcgccaccgcggatggtccgaaggttatcgagttcaatgctcgtttcggcgatccggaaacggaagtcgtgctgccgaagctcacgtctgatctcggcgccggcatcagcgctctgctcaatggcgagactccggagttcacttgggataatgacaacgccacgcttggtgtggtgctcgccgccgacggctaccctgtcgatgtgatcaagggcgctgcgattcctgagattccagtcgatgaggattcccacgtctattacgctggcgtggctcgtagcgaagaaggtctggtcgccaattccggccgcgtgctgttggtggaaacctccgcagccgacatcaaggccgctcaagacaaggtgtatgcgattatcgaccagctcgacaccaagggcatgttctaccgtcacgacatcggcgccaaggcactgaacatctgaatgcacccagcgattgcataccatcagaaatgtctgtaaccatgcaatcgcaatcatatatataaaaaggacggcggttttgtggtcggacagagaggagtccgactgcaaaaccgccgttttttaatcacacaacacaggcaagcttatattgattacttctgctctcccggcttcggaatgagcagggatgcgcagaacgcgaggccgagcagaatcacaccgccaaccatggctgcgatgtagccgctggtcgcaccgccggatgcggtgaacgcgttctgagcagcgtacagcactgcataactcagaccggcacccaggttgaatgcaccggagttcagaccaggcaggtagcccggattgtcttccggagagagcacgatgcccagaccgttcagcatgatgttggcagtacctgcgtaggaaacacccaaagccaaagacatgaccacaagtgcccagatgctcggaacgttgcacacgaagatgccgaacagcacgcccacaacagagacgatcaagccagtacgcagcaccgcacggtagccgaacttcgaagcgagcacgcctgcgaccgggccgaatgcgagaccgatcaacgcatacggagtcagggtggcgaacgataccacgctggcgctcatgccggcgccgacttcggtatcctgagcgagagcaggcacgataccgttcatgatggcgaacacgccggtcatggtaagcagggtggtcagcagcagaccccaagtacgacgctgcttgaggtaatgcgtggtgaccatcggagccttctgacgcttctcaacattccagaacaccacgaacagcacggctgcaataatgatttcgacagcgaccagcgcccaattggcggagcccagcttctgaatctcgttgatggccagatatgcggccaagaatgcggcggcaagggaaaccacgccaacccaatccatcttcggagtctcggaagcggtggattcttccgcatacacgaacacaagcacaatggcaagcaccgcaacgccaaccatgacccagaacacggaacggaaaccgaacgtgccagcaagccagccgccaagaatagcgtcgacaccgccgatgccaccattaacggaagtcagaatagccatgagcttggcgtacttcttatcttcagtaaccttggcgtgcagcatgatcagcgtcatcggcacaatcggaccggcaacaccctgaatcacacgaccgatcatcagcatcggcacgttgaccgcgagcgcggaaaccacgcagcccaaagcggtaagcacaagaatgccaagcagcactttcttgcgaccgatcaaatcgccgagtcgcggcaggaacagcgagaacactgcgcacgaggtgaagaacaccgtctgggtcaagccaatctgcgcatcggtggtgttgagttcaacacgcatggtcgtcaatgcaggcgaaagcatggacgcgttgagctggaacgcgaagatggctgccatcaatgctgccatcaatgcgacgacggacttgccgccttcgtcgagcattttgctgtttttggtctctgtcattagagcacccctttacttatctttctcttctttcagccgatggtcttgattgcgtcggttaccaaatcccagaatttgttgaaatcaagcttgactgcaacctgggtgtggcattcttcggcgctcggctctggacctcgcaggtcggcgacggtcatgccaagtgtgagatctccatggatttcgacatcaaccgggcaacgacgggtagtcatgacgctcggatcaatgaggtatgccaccgtgcacggatcatggaccggaggatcgatgaaatcttgattgtcttgataggtcttgcggaagaagtccatcagaccagacacgaacttggcgagatcagtgccaacgccttcgatacgctgctgcacttcgggcgtgcacaatgcctgatgcgtcagatccaatccgaccatggtgatcggccaggcttcattgaacacgatgtgagcggcttccggatcgaccttgatgttgaactcggccacggcactccagttgcccacatggtatccgccgcccataagcacgacttccttgacacgttcaacaatgcgcggctccatgcgggcagccatggcaatgttggtcagcggtccggtcggcaccagagtgatggtgcctggctcgttgctcataatggtgtcgataatccagttgacggcatgtccggcttccagcggacggctgggttcaggcagttcaacgccgtcaagaccggtttcgccgtgaatggaagctgccacttcctgcttgcgcaccagcggacggtcacatccggcatgcaccggcacgtcggtggcatgcgccttttccagcactgcacgggcgttgtaggtcaccttgtcaaggctctgattgccacctaccgtggtgacgcccagcagatcgatattgggattgcccacggcaagcaggatggcgacggcgtcatcatgtcccggatcgcaatcaaggatgattttcttggacattatggttcctccttatgtgctccaacgttgaaccgataatgaggtggtcgacgattgactgactccggctcatcggtcacacaacttgttgcaaggccggcaatggcctttgatatcagcgacttccgaaaccttcgagcagttgttcggctgcctgaagatcgatgtcacgaggtgtgtttcctgcaaaacgctcgtcaactacggcctgcgcattggaaacgagttcttcaacgctgatgccgtaatcctcaacaggatgcagaccgagcatgcggtcgcggaaatccttgaacgctctgcttgcgataaccgcaacctgctcgtccggcgcattttccgggtagaccgcacctagaatctgaccgatctcacgaaccttatgcgcacgtacgggagcaacgaactccataaccgccggcaacgcgtagccaacggcttcaccgtgcacgatgtggtatttcgctccgagcacgtgtgcgatggaatgccccgcaatggttcccgcattgttcagcatccatcctgcaagcgtcgacgcgaccatcacacgttccctggcttcacgatcctgaccgtttgccacagcacgcggcagatagttgtacagcaggaacatcgctttttcgcaaatggcatccgtgaccggacttgccattcgggaaaggtatccttccgcggcgtggcagaatgcgtcaagtccgcaagcgatggtcatttttgcgggcagtgtcagcatgagatccgcgttcagcacggcatattcgctgactgccggatcggcaagcaccgcgagtttacgaccggtggatccttcggtgaccaccagcgcgttggacatttcgctgccggtgccggcggtggtcggaactgcgatcataccgttgcatggtgcgatcggcttggctggatcggtgtattcgatgatggatccgccgttgacacgcacgatgttgatgcctcgggcaacatccatggaactgccaccgccgatggcgatgatgctgtcagccttatgcgcttcgaatgcttcgacgccggattccacggtttcgcaaagcgggtcgggcttgacctggtcgaataccgccacatcgacaccgacctgttcaagcttggtacgtgcggcaacgaccagcggcatgcttccgacgaaggaatccgtgaccatcagcggacgagaatagcccgcggtctgcatgatatcaaccagagtctcccctaaatcgtcagtgcagaccactttgacgggttgcagcagtttgacttccatagccatcggtcactgtccgatctttgcggccgcagcgtcggcattgatgcagaattgacgaaccttgtcgatgtctttctccatgtagccgccgtcatatttgatgctggtcttcgtcagggagtccacgccatacggcttgcactgttcgatggcttcggcaacattgtctggtccaaggccgccagccatgatgaccggcttgccgcattcggccacaatacgggcgtcaatgctccagtcgtgggtcagaccgctggcaccaatgccggtgtcgggggccagaccggagtccgtgaggatgagatcgcagtattgtgcgtacttcttggcacggtcgacggcggattcatcgtcaacgagcacggcctgcatgagtttggtgttcggagcggcttccttaagtcgggccgcgaatgcttcatctgcggcgtacccatcgccagcgatatgcagaatgtcaggccgcacctctctggcaagctcgatcatctcgtcgggatcgttggtcagcatgatggccacggaggtgacgccacgacgcttgcattcgtcgaaaatgcggtgcacgcgttcgattggcacacgatgtgccggaacgccaccattctgcatcggcaccagtccaatgttgtcggcaccagcctccatggttttgacggcctcatcgtattcgatcagagaatagatctgcttgactaccattgtcggttctccttgtgtttgtatgggttgatggacgtgtgatgtagcaaaattcaggcggtacgcacttcgtcgagcaacggctcgatctcgccggacatcttcttacgtatgcgttccacggtgatatcgggcactgcttttgtgcattcgagcgcgatgctggatgctgcctgcgcaattttgccgacttcttcaagatctcgatcggggttatcgaagaagctccaggtgatggctgccatgccggcatctccggccccatttgccgtggcgatttcggtacggtatggcggcacatgcttgaagctgtattcgtcgttttcgtgtctcgcgcacaggattccgttggcacccaatgaaatgaatacgttcttcacgcccctgtcgagcaaggtcttcgctgcggcacctgccgaatactggtcggcgataccgatgccggtgagtacggatgcttccaaatcattcggcttgagcacggtcatcttgttgaggatcgtgtcgaaacggtgcgctttgactgtggaaacggtgtctccgaacagtggcgcggtgacgtgttcgccaatccatgccatggtttccggttcaagattggcgtcaagcaggcagatggcggcaccgttgatgaagtcgaggcgagattcgaggaatgccggattgatttccttgcagatttccatgtcgttgacggccaccagcagatcgcccgtatcatcggtgatgaacatgtaggtggaagaacggcgtccttccagctgtgcggcatagtcaagattgatgttgttggccgcgcacgaacgttccagggtcttgccgttttcatcgtcgccgtagacggtgatcaggtatgtcggcatgcccagatgagccatgttctgtgcgatgttctgcccgacaccacctgcggacatgctgacgacgcccggattcgagtctcggtccactacggtgctcgtcggtctaccacagatgtccatgttcatgccaccgatgaccacaacgtaacggtcaggaacagtatttcctgaagtcatatccgccatggatattgcctcctacattttcggggatatatctgccttgatacacccttgatgaaacgttttatcttcaatttagaatacaacaaaagtttaagccagtcaacttttgcttatatttcatcgatgtaacatatggaaaaatcgcgtgtctcgcgattacgaaagaaacaaatgtaagaccgccatacctgcgttactgcagcaaatcagctttgcgccgcacagcttcttcagaaaaatcagcgcaaatcgactgcacctgagacatattcatcgcagccgccgcagacgcatatctagcgcattcccgctgtgttttatgctcacgacgcgcccacaccagcgcactcaatgccgccgacgcaccaccattggtatatcgacgttcctccgcccttcccggcaaagaccagaaaaagctttcatgttcgcagcagtacagcatgtccgaatcatccacaaaaagaaacacattacgcacaccggaccgcagcaaatgttcggcgcaatctctggcactggcctcgtcatgcacctcaatccccgacacgaatttggcttcggcggaattaagcaccatagtgtcgatgcgatcgagcaccggcgtgattcgcgccgctttattaacggaaaccacgcgcacgaaaatcggtcgacttgttttttcgcaaacccatgctatggcatcagacggcaagctcgaatcaatcgccaccatttccgcattgacgatggtctgctctcgttgcgctagaaattccggggtgatttccgcactgatctgcatatcatcaagacccacaatctgacgcccctgcgcggaaacaaccgacaagaaggtggaagtaggcatatgggaaatctgcttggcatgcgtgatgtcaatgccgttggcatacgcgtcctgcttgacgcgttcgccgttctcatcatcaccatagacggaaatcaaataattcggcacgccaagccggttcagattgtaggcgatattgtaaccaatgccgcccacggatgacacaatgcgccccatgttggaactttccccaaccacatcctgcatggcgacaccgtaatggtctatattgatggcgccaacaacagccacatagctgggcggagtgacgatataccctttgccttggatgtacccttttttcatcaggttggagatgtgcgcggccacccctgaacgggtgatgccgcacagttccgcaagctcgttttggctgatcaaaggattctgcttaatccacgccaaaatctgctgttcgcgatcggttgcggccatctcttcccccttgcctctagggaagatccatgaaatcggtgtctttcaggtagttcttccctgtggtgatatcgtactgaatcagctggtagtcggcaagcaactgctgggtttccgcgtcgaagtcgctttcggccatgggattgccgtcagcgtcgagatagatgttctgaccttcagggatacggtcccatccctggatattgttgacgacaggtggctccatggcggagattttctcatgcatttgcgtgaggaacgccagatacggggacaccttggcgttcatatgctcggcggcctgcgccacgaagaagttcggcgacgaatagtcggcgttgtcgatctcgttgccttgcgagctggacgccttgttggaccagatgaaataatccgtcagatgcaaggcaagcgaattgttgtcgtcttcggaagcggacgaataaatgcccggcagatgatcgccgtagaacaccacggtgatcggcttgtcgatggcgtcgagcttgtcaaggaagtcggcggtcgcctcgtcggtcagagccgcacccttctgataggtttcgatggactccttctcatcgtcctccaaaggagtgtccgtagtggattcggccttgaaatcgttgttcttataccaatcgtggtatggcatgtggttctgcatggtgatgacctgcaggaactggttgccatcggttttcttgacttcttcgatggtgctctcgtacgtcgcttcgtcagacacgtacggcgaatcgtcgatcttgtcttgatgcgagatgacgtccggaccggtcaacgtgtagaaatgcgagaatccgaacttcttatagttggtcgcacgcgagtacatagacgattcgtacgggtgcagtccgatggaattcttcgacgccccccacagttggttgatggtcggcgtccaatgctcgctcggcacaagctgctgatacgggctggtgagcgacgaatcgaaattcgacatgctcaaacccgtcaatcccatgtattcgaggtttgcggtaccaccgccatatccggaagaaagcatcaaaccggaggtcgtattctctttgatggaacgaatgttgggcatggaatccttgttgatcttaagccccggcacgcgagacgggtcggagaaggattcggacagcacatagatcaccgtactgtcggtcatgttctcggtacgagatgcgttgatcttcttcgcttctttttcgtatcgtgccgcgacttccttcatggtttcttcggaatagtcgtcaggcttcaccatgactttcggattcagctgcctggtgaaggcgaccatcggtccgttgcgctgcgcatcgtagacggaatcccacatggacggcatgtcccccattgccgaagagaaggttttcgcccaagatccgacagtgctcacctgcatggaatacagcgtgaagaacgttcccggcacgatgatcagcagtagtcgcacgatggcattcagcgagcgcgactgtttgtcgtcgccacggaaaagcttgccgtgacggccgtcacgatgattcaggaatacgaaaagcgcaatgaaagcaacgaatatgacgacggcgagcagaatggtccactgtgcgcctgccggcatgaagctcataagattgcccgcatcggctttgaggaagttcagatcgctgggaagaatcgcctcatatcggatggatactttgaaatgttcgatcaccgcgataatgaatgtcaccgccagaaatattggcgtggcgatccagaagcggttgatgagcatgagcagtatcacatacagcacgccccacaaaatcaggttgagcaccgccacaaagttgaggttggtgaacattttggtgacgaagccccaaccggtcagccacatgttgttcgaaagcttgacgcgtgtagcggattgactgacgccaatctgtagcgctgccacaccgatggcgtcgaacaccacaaacagtatgccgtacaaccaccctgggaattccttacgttccttggcgggtgcgtttggatcaatcgtcgagatcttcagttcctcaatcgtctctgtattcacggattcgttcgtcaagtgtttatctccactcgtaacgtgtcagttcgcttcgtttcccgccttacggcgacgccaaggcaccattctcgcgaccatatctgacaaaaagctgtaatgatcgatttcatccacagtttcttctgattttcttacgcatatgtcgatgaaatcgcaaaagaacgatgagggggtatagacagttcggatggcagtatctagttgtcgtcaaggattccgccgtccacataaccgttgttgctgaaatcggcgaaattgttgagatcgacggaatcaccgtcgtgcctcattccggcagtcggggcatagtccgaacacctcaagcgtatgccattcgatggtgaatccgtatttctcgctgatgccacgcagccaagtttcggatggcgattcgatttccacggttttgccgcaattcgtgcatacgagatgatggtgatgcccgtcatcaccacacagacggaacagctgttggccttccaaacgcacggtatcagcctcgcctgcctcagccaaggcattcaattgacgatatacagtggcaaggccgaccttcacgccttcgtcttccagcttgcgatgcaaatcctgtgcggaaatgaattcatcgtttgccttcaacgcatcatgaatcagttctttttgtttggtgttgcgctccacgcgtccgtccgtcaatctatgtccgttcttgatggcttcgcgcgccgtcctcccctcagggaaaggctgacgcgcgaaacatgccgtcatcggttttatttcaaatcatcccagcagccggtccgttcaagatccgccacagtttgcctggtgtcgtcggtcagcacggtgatatgccccatcttgcgatcatgacgcacttcagccttgcaatagtcgtgcatattccattcgggatgctcggcgatcagcgcgcgggtcggtgccacatgctgcccgagcacattgaccataacagccggcttgagcagttcgggctgttcgagcggccacccggcgatgcctcgaatatgcgcgtcgaactggtcgaacgagcacgcttcgatggtgtaatgaccggagttatgcgggcgcggggcaagctcgttgacgataacccgctcatccttggtaacgaagagttcgatagcgaggatgccggccagttcgaagccttgcgccaaacgcaaagcgagttcgtgcgcttccttcgccacgtcttcgctgacttcggccggagcgatggtcatgtgcagaatattgttacgatgctcgttgcgcacgatcgggaaggtcacataatccttgccgttaccggcaacgagaatgctcgcttcgaatgcgaaatcgacgaatccttcgagaatgctcggcgggaatccgccaccgcgatcggcacgggctcgtaccttttcgagatcggcatcggatttcagcacggtctggccgtggccgtcgtacccgccggaacgggttttcagcacggccgggtaatggatttcaccgagcgccgcatcaagctcctcaacgctgttgacggccttccatggtgcggtcggcgtgccatgatcattgatgaactgcttctcgttgacgcgatcctgcgtgacacgcagcaaatcggtgccttgcggggctgcagacaaggaacgcacttcgtcgatggcgtcggcgttcacgttttcgaactcgtacgtgagcacgtcggacttttcagccagttctcggatcgcggtgatgtcgtcgtattcggcagtgacttggaagtcggccacctgtgcggtcgggcaatccggagtcgggtcgagcacgccgatgcggaagcccatgtagcgggcggacaacgccatcatgcggccaagctgaccgccaccgataatgccgatggtggcccctggcatcagacgttcaacacggccattggtttcctcagacaagctgggcattggattcagccaccttttccttcagagagtcacgatattcctgcaaagcattggccaaacgctcatcggtggtgctcagaatgctcacagccaaaagacctgcgtttgtggcaccggagttgccgactgcggtggtggcgaccgggatgccgcctggcatctgcacgatggacagcagcgaatcccaaccggacagcgcatgggaacgcaccggcacgccgatgaccggcagggtggtctgggccgcgaccatgcccggcagatgtgccgcgccgccggctccggcgatgatgaccttcagaccgttggcacgggcactatgcgcgaactcgcccatcaattccggggtgcggtgcgcggaaatcacctgcttcatgtacggcacttcgaactggtcaagcatctcgcaggcatgcttcatggtttcccaatcgctcgccgaccccataatcactgcgacttcaggcttgttgtctgccatcaaggacctccgaaagaatccaaaagaacatgttcttgaacaccgtttactttacgcaatcggctagatgtgcagcacgatttttccgaaaacgtcgccattcacgatcttggagaacgcaagatgcgcgtcgtcgatcgcatatgcggaatcgatgaccggatgcagatcggcatgttccacgaatttcagcaaacgtgcgaaatcctcacgggagcccatggtattgccctgcactcgaatatcctggaagaagattctcgtaagctctgcacccggctggtcgccagtagtcgcgccgcaaatggcgatagttcctcccggacgtacggatttgacggaatgactccatgtggccgcgccgacggattcaatgacggcatccgccttgcgtggcagtcgcgcacccgtttcaaaagccgcatcggcaccgagctgcaacactcgcgcacgcttgtcttcgcttcgtgacgtgacgaacacttccaatccggccgcgtgagcaagctgaatcgccgcggtcgacacgccgcctccggcgccttgaataagcaccgtgtctcccggcttcacattcgccgatgcgaacagcagggaatatgcggtaagccagctggtacccaatgcggcagcctcatcaagattcagattcgcgggcttggcgaacacgttggcgctgggcacctgtgtgtattcggccatggttcccgcataccgttcggacaggatcgagcgtctctcccccggcatcacaccggcgccatcggtaccaacgaaggtatacaagaccacttcggaaccggccttaagtccctttcgtacgggaatgtcttcttccaacacgccagccgcgtccgtgccgaggatcatcggcgtctgctcgtcggaaagccccacaccttgcagactccacacgtcatgatggttcacgctcgccgagttcacacgaatggtggaccagaatggcttggtttcaggctcaggcatagtgcccacttcaagcacggacagcggatcatcataattcgttccggtggcatatacggctttcatgttcgcgctcctttgcgaataacggcttttcacgattgcaaacacctctattgtgcctcaagttgagaagactttgcgctcctttgcccgcaaacaccctcgtcggggcatacagtgggatatgatttcgcacttggttgcactgatcgtagggaagggtgattgcgcacgatgaccgctggcattttgagttcgattcacactccggcggacgtacatgccctttcagcccagcaattacgcgatctatgcctcgaaatccgcgccacgctgctcgactacggcaaaaaacatggcgggcatatcggctcgaatcttggcgtggtggagctcactgtggcattgcaccgcgtgttcgactcgccccgcgaccgtttcattttcgacgtgtcgcaccaaagctacgtgcacaaaatgcttaccggccgcgccgaagcatacttggaccaatctcgttttgatgaggtgaccggtttcacgaatccgctggaaagcgaacatgattcctttgtgctcggccataccggcacttcgatttctctggcctgcggtcttgccaaaacccgcgatatgcagcgcggcgccgcctgcgaaagcactatcggcaatgttatcgccattatcggcgatggatccctgagttcggccattgcgttcgaggggctgaacaatgcggccgaacagggcggtaatctcatcatcatcgtcaacgacaacgaaatgtcgatcgctgaggatttcggcggtatgtacgggcagcttaccaagttgcgtacgtcgaatggcatggccgaactgaatctgttcaaagcattcggcttggactaccgctatgtggagcagggtaatgacgttgacgcgctggtggaagtactgaacgaggtcaaagacattgaccacccgatcgtagtgcatatccacaccaccaaaggcttgggcttcaatgacgaaacggaagccgacaatggttcggatggctgcaatcagaccaatcctcaacctcatgcgggccaatgcgaggccaaccattggcaggatccggaggcctcgctcggcaaaccgctcgacgcacgcaaatattatggcgaaatggccatggcatcgctggaacgtcgtttcgacaatgagccgggattggtggtcatctcccccgcaacccccggatcaaatggcatcacccgagattttcgtgaacgtgccggcgcccactacgtcgataccggtatcacggaagaacatgccgccgcgttcgccgcgggtatcgccagggctggcggccgcccggtgcttgcgacttccgccacgttcttccaacgcacgttcgaccagctgcagcaagagttggcattgaatcacgttcccgccacgctgctgattttcggcgcgggaatttccggcgcggacaatacgcattcgggcacattcgatatgacgatgttcgccaatgttcccgacgtgacctgtttggctcccgcgagcggcgaacagatgcttgacatgttggcttgggctaccggcccgtctgaacatggcgtggtggcgattcgtatgcccggcgagcagattctcgcacttgaacgtgccgccgatatggcgttcgacccgttgcagcgtgccgaagagcatgatccagccgtcaatattgccggagcatgcccgttcgcccgctatcagatcgttcagcccggcagggatgtggcgattcttggactcggcaacaccatgccgttggctgccgaaattacgtcggcactggccgaaaatgatgaagaacatgctgcgattaccgcgacgcttgttgacgcattgcaatattccacgatggatgccgaattactggcgatgcttgccgatgggcatcgtttggttgttacgttggaagatggccagctagaaggcggatggggtgagaaagtcaccgcattttatgccaattccagtaataccaaggcttctcacgttcgtgtgctgaatttcggcgcagccaaagagttcaccgaccgagtgcctcttggcgagcttaacgaacgttacggattgacttcagaaaccatcgtctctcgaatccgcggtattctcagcgaataatcgatacataagcgaattggcgggaatgatcggtatatctgtggaccattccccgccaatctataaatcagcgatctgtaatcagcaatcactgatcattcttgatggcatccaaagcgggaatcttcacagccttattggccgggccgaaacctgctaccacaccaacggcgatcgaaaacagcatggccaccacaaaaagccaccacggaatcaccgaaatgcgagtcacatcgtcgccgcccataatcgctttgccgatattctcaatgctgaatccacccaaagacgccatattgatgcctatcgaaccaatcgcggaaatcaagcaagcgatcacaccgccgacaaggccgatcgcaccagcctcgcacaggaacatcatgcgaatatcgcgcacatagcagccaagagccttcataatgccgatttcgcgcgtacgttccgacaccgacataatcatggtgttggcaataccaatcgcggcaacgaagaacgacaccgcgccgatgccgcccaaagccaactggatgccccgcgactgcttttcgatctccttacgcgtttgctcaaacgaggaagtctgataaccggcgcccttgatttgcgcttcaacgtcggcaacgtctttgatgtcttgggtgtgcaccagtacctgatcgtaaacgaccttgctcgacgtgttggccttggtgtcccccgatattttggcgttcaacgttttcatatcgtcgatgctcatcacaatgccggaagtgaacgcatcatagttgttggtggaggaatcaatgacacccaccaccgtgtatggcatggtaatggtgggactctcaccactgccggaatcggatggcgccacggatccgccgcccaccttgcggtagtcgtcgggactttgatagttggctccggtaatcaacgtgattttggagttcagcatatcgaagaacgggtcttcgccttcggattgggcgcaaccgtgctcatcgcagtaataaccgcccgcttctatacgatgattgctcggatctgacgcatacttgtcgtagaacgaatacacgaaggatttgcccgccaacacttcgccggcacgcatcggaagacgtccgctggccaatttatagccggattcttccaattgcgtggcgtcgactcccaccacgttgacatattgcgacacgtaccgggagccagctccttgcgtggcatccacactgtatgacatcgttttctgaggaagcactccggccacaccggcaatgctgcggaaattctgcacggcgtcatcgtcgagtttcgcctgttcgccgtcggcaccgctcacgctggatgacgttgccgtggaatgtgaacctccgccgtccgcatatacggtgatgtcgttcaggttgcccatgtttttgagcatctgctcgttctgttcgttgatgccttggccaatggaaatcatgagcacgatcgaacagcagccgacgatcacgccaagtaccgtaagaatcgtacgcgatttgcgacgcagcagattctgcgtgcatgaacgtgcaatatccgaaaatcgcatgctcactccttggcggagggcacggaatcaatcacctgggtcggcgcgtcaatggcaccagccgtattagccgcaccatcatcagcacctgcatgcgaatcggagggatcccaatcccaatcgtcatcctcggcagccttcttcgccttcttgcggcgacgcacaaccaccacaaccacaatggcgatcacggcaacgacagccacggcaacgacaatccacacccaagtcggaatgccttgattttcctgcgggtcaacatccataccgggatcggcgggagccggagcctcagacaccgtaatcttcaccggcgattccttggtctgctgctggccgtcggcatcctcgtacgtcaccttcagtttggcatcatattcgccggccgcatccgcagtgaaagcgaatccgatggaaccagaagcgccggacgccacattgccgatatactgcgtggcttgcgtggcggtgatgccgtcaccctcgatggacgcttcgacattggatacatcccccttgcccttgttcacgtattccatggaaatggtggattcctcgcccgcattgatggcgtctggaagcacgggatcgcccagttcgaaacggtcgggctgcgaaacaggtacggaaatcttgatatccgaagtgttggaattgcgggtgccgccatcgacatactcgtatttgaagttgatatcgatgccctgcgcgccgttcttcgcactcgacagcacctgcatgggcacggtctgggtcagggaatagcccgcccacagcgaatcgtaatagaacgtgttcgtaccgccggaaatggcgaaattctcgccgccgtcaacggtcacgaccatattgccgaccgcgaccttgcccatattctggaaggtgaagccaagatcgaaattcgtgccgaccgccacggaaccgtcgccataggtgaagttggtgatgatgatgttcggcaccggaccggccggctgcacggtggagccgccgttgttgtcgtcagtgccatcaccgtcttcggcgagcgccgtcggcacaatgcaggtcagcgcgatggcgatggacgccatcaatgcgatgagcatgttgatgaattttgcggaatggttgctgttactcatggaatttccttctcttctctgccgtcacgcgttgttcatcagacggtcatcgatgatgcgtccgtcaagtagcgttacgatacggtcggcatattgcgccatattgtcatcgtgggtgacgagcacgatggtttggtcgaggtcgcgagcgaacgcgcagatcatgttcatcacgtcggttttggttttggagtcgaggttgccggtcggttcgtcggcgaatacgacttgcggtctggctgcgaacgctcgcgcgatgccgacacgctgttgctgtccgcccgacatttgcgtcgggtagtggttcatgcgtttgccgagccctactcgtttcagcattttcttggcgattgcctcacgcttgtttttcggcatgccttggaacatcagcggcattgccacgttttccacggcagtcagattgggaagcaggttgtatgactggaatacgaaaccaagatgtttttgccgaaattccgccaattgccgttcattcaaccgagaaatgggcactcccccgatgagcacgccgcctttggtcggtttttccatacctgctagctggttcagcagagtggatttgccagaaccggattcgccgtagatacagcagatctgcccttgcggaatggtgagattgatgcgttccagcgccacgacggtttcatcgagcaccggatattccttacgcagattcttgacttcgatgatgggtctgcgcgtccccgccatcgactcttgcccttcatgatctgtcatagtcttcattgccctcccccacacggcgtcaatacgtctgtcccacaaccgagtttataccgttttccagttccctgcatcccttaggggaacaccccgagaagcacagacccccgtctcacatcctcctaaaacaaccctaactagggtggttttctcgtttcgtgccaaaaacacttcgtttcgtgccagacggcaaaatccccgaatctcgcaaaaatagaatgaaaacaacgaggcagacattcggatgacgttgtcggaagcgtcatccgcatatcacacaaggggaaccatcatgcgtcgtcgttttactcaaaccgaggtgtattacctgaacaccctgcccgcggtggagcgagcttccatggaccgcatcacgtactcgaaggaatttcaggtgcgttgcatggcgcaatatctgcgcggcaacggtcctaccagtattttcgccagcgcaggtcttgatccgaaaatcatgggaggcaagcgcatcgaacgcgcgatcgcccgttggaaggccgatccgaaaatcatgctcgaagcacagacgttggcaaacaaatccgattccgggcagcgcgatctgctggtgatcacccaagccatgaccatcaaatggctggaaaagaaagtcatggacctgcagaaacagcttcacctgcttgaatcacatgcgatgaactgctcactgccgaattcaaactccagggaaggtcttgtcagcatggcgtgacatacgccgaaacgtatgacatgcgtacgcaaaacacggtcattgccgacaggccaatcacatagacgtgcgttgcggtacggcaacgcgccaaacaataatccctcctttcaccgccgcgctctccgtcacatataagcggccgtctcgaaaggagggattcttcatgcctctggaacgtcagcgaaacatcctcgccccgtatcgacactctgcatttcgtgtataaaacgcgctgtccttactctgcatttcgtgtaaatgccttaattttcaaggagtacaccatgctcttcaggcgcaaggcatatcaaacactcatggcttggaaaagcccgtcgaatggcaagcgcgccatgcttattgagggagcacgacgtgttggaaaaagcactttggcgcaagaattcgcacaacacgaatacgaaggtcatcttgtcatcgatgcagagcatcggcacggctattttgcgactatttcgcagcttcgtccgcggacatcatggcctgggtgatctggtcgcgcatctcgttgaaaccgccaggcgtcgaagccggcaacaccaccgtcttcgcattctgcgacgaggcgagattacgcatggtgtcgagatactggttgaacaacaccacattgttcacgtcgttcacgttcatgccgactgcctgcagactcttgatctggtcgacgataccattggcgatctcacgacgatagttggcctggccttcaccctgaagacgggtcttctcagcctcggctgccgcctgggtctcgatctgaatacgctgggcttcggcgcgctgacgggtggcctccttctcgcgctgggcagcgttgatggaatccatggcgttcttgacctgcggactcggatcgatggcagtgatcagcgtcttgaccacagtgaaaccgaagcgggacatttcgttgccgacggtcttctgtacgtcaaaggccacatcgtccttacgggagaaggcatcgtccaaagacaatgcaggaatggcggaacgcagcgcatcctccatgtaggaacgcagctgaccagccggatcacgcagctcatagtatgcggtggccacattgctcgggtcaacacggaactgagtggacgccaccaccgtgacgaacacattgtcaagcgtcttggtctccaactgcacattaagctgattgacgcgcatgttggttttcatggcgatacgatccacgaacgggattcgaatatgaatgccggcgaactgcaccttgttgaatttgccgaaacgctcaataatataggcctgctgctgcggcacgataaacaacgtggacaggaacaggaacgcgacgataagtgcaatgacaaggagcgtaataaggaacggcatgacattactcccttctttggttttctctcgaaagcctgttgattgacggctttccgtaggttctgcaaccattgccgaacccaagcgaaaacttaccaaagaatgcaatcacgtgcagacaatgtccgcgagttgggcaaagtccattcggaagccggacatcgaccgtccggaagccgacccacatacgtctacgagccgaacaggagacaattctccttgtccggctcgtgagatggcatacgcaatgttgaatcagatcaggccgagttccttgcatttggcttgcaactgcgtggccgaaggctccaccagccatgagccatcggcgaaccgaatcacgggaatatgctgttgtccgctgatcgcaatggccttctctgcagcaccatcctcatgctcgatatcatgaaggctgtaggcgaccccgaaacggtctaatgctgccttggctcgatggcagtcgccgcaccagtcggctccatagaaatcaattgccgcattgtcaatcataaaatcactccttacgaggcattaatctcatcaaatttaggcgatgcctcaagcaacatcttcgtatacgcatctttagggtgtcgtaacacggaaccgacagctccatattcgacaagatggccgtctttcattaccgtcacctcatccgcaactttctgaacaatgtccaaatctcatactcatgccccgacaatcccggataatgcacggattttaccagcggatgcagcaacagatagctggagatcgcacgcgcgttctcctgctggcggtccatgcgcagggcgagcgtctgaataccacgacgcaccgaatcgcattcgttcggcgcaagcacgccacccaaacgattctgcgcgaagtagacacgtttgcccaacccgtcgtccttgaccaccacaagaccggcgttgacttcggaatggccggccagatacttggtagcggaatggatgacgatgtcggcaccttggtcgagcggcagctgcagatacggggtaacgaatgtgttgtcgacaatggaaatcgcaccatagcgatgagcgatttcagcaatcttcgtcacattgttgacctgcagcaacggattggtaagaacttcgaaatacacggccttcgccggacaaccatgcgcgggtcccttggcggagtgcccggaaacagcggcatcaagcacttcgtagtcggcgggttcacggctccggtgttgttatcgttgaccggcagtccgtggacaaactgagtgttgaatctggtcatggtgcgcaccccctcgggttgtggttcattgccgcgtgccattcacgcggtcgctggtacccactaaaccgcatcctgcgtttcaacgcgcgccgcaccttatcaacgtttgttatagaacgcgcgaatcgccataacgttttcttgtaagcagctatcaaacggcggagatgcaagacaccgcaccgcaatcgccagttcatacataaaaggctacgtaggaaaaattacgctagcacagcagtcacccggcgcacagcctcacgcaactggtcctcggatttgagcaggctgaatcgtacgtaatccttgcctactttgccaaaacacgtgcccggcagcgcggcgacggacgcacgttccagcagcgtgtcggcaaactgttcacccgtctgatcttcaggagcgtgcacccaagcgtagatgccaccgtctgaatcgaagacatcaagtccggcttcacgcaatccacctgccacgatttcgcgacgagacgcataccgttccgcaagttcggccacacagctctgatccgacagcagtgccacagtgcccgcgtcttgaatgctggacgtaaccatggaacccatttgatagtggtactgcttcacatgagacacaatgtcgtcgttgcccgcgatgaaaccggcacgccagccggccatcgcatacattttcgacagcgaacacacttccaccgcaacatcgaaggcacccggcagcgatagtatgctgatttgctgcgcatcgacccccaatcccgcataagcgaaatcctgcacgatcgcgaaatgatattcatgagccaaatcgatggcacgttgcagaaacccacgcggagcctgcgcacccgtcggattgttcggatagttgagcaccagcactttcacacgattccacacttgcgcaggcaccgcatccaagtccggcaggaagccacgttccggcagcgacggcagcagcacctcctcagcttggctcatcaccgtcatgcaatgatacgaggggtaatacggatccgcatatgccacagcatcgcccggcgaaacaagcacggcgaacagagccgccagaccatcaaccgcgccctccacggcaaaaagctgggttttccaatcaacctcaacaccatacgtattgcgataccactgttcggcagcctgcagaaaacttggcttgccatcgaacggcgaataacgggcattggccggatcgtcaaccgcctttttggccacttctcgaatgaagtcagcggggaacgcatccggattgcctttggccaggtcgatcacatcggccccgtccgcaaccgcggcagccactttgcgatccatatcggcgaacacattcggcggaatcgactgcgccaccgtagtgaacgcaacaggagaaacatacgaagtcattcatcaaccctccctatcatcgtgcgactgtatatgcgcacattcacgcatatacgcaaccatcagtgcgtcaccttgcgtgcgaaccaatcgccgatccattgaatgatctgcacaatgacgatcagaataataacaatcacgacgagcacgccggtttcgtaacggttatagccgtattgaatggccatatcgccgatgccgccagcgccgatcgttccgaccattgcggaatagccaatcagtgaaataatggtgagcaccacaccacgaatgaacgacggcaaggcctgagggaataccgcatccacaatgatttggcgtgtggtggcaccagtggagatggcagcttcaagcaagcccggatcaacttcggaaaacgcgctttccgcgattcgcgcgaagaacggcaccgcggcgatcgacagggaaattgcgccacctgtcggcgtgtaaggatcacccagaatcaattgcgcaaccggaataagcaccaccatgagaatcaggaacggcagcgaacgaatcgcgttgacgatgaaaccgacaataacgttcaacgcatgattcggcgtgaacaaacgattttcggtcaaatacagcagcaacgccaccaacgtgcccaacaccacgccgataatcgccgacaccacaaccatgtatgccgtgtcgatcaacgcctgaccgagattgtcttgaaggatttccagagtttcttccattgttctcacgcctcctgattatccgcagcttcggcggccacaaccagctgcccacgatcaagttcccgatagctgaacacatgcgttctcaacgtattcaacgcctgcaccagcggctcccccgcgccagaaacgagcacaatcagaatgccgatggcctgcgaaccgaaatattccacattcgcatgcagcacgtcgatgctcacgccgtaatcctgcgcgacccggctgatgagcggttcgagtgccgcatcccccttgtatcgcagttccacgatggtgccggccggcagcgacggcaccagctgcggcggcaccgcaatgcccagatagcgttccaccaacgctttggtggtcggatgcttcggcgtgctgaacacgtcgaaggtgttgccttgctccactaccacaccgttttccataacggccactcggtcgaaaatctgcttcgccacgtcaagctgatgcgtgatgaacacgatggtaatgcccagttcgcggttgatgcgttgcagaagcgccagaatgccttccgtggtttccaggtcaagtgcgctggtagcttcatcgcacagcaggatttccggcttgttggcgagcgcacgtgcgatggatacacgctgtttttgcccgcccgacaggcttgacgggtagctgtcgattttgttttccaaaccgaccagtgccagcagttcgcggatgcgtgccgaccattgcgctttcggatatccgccggctttcagcgcgaattcgatgttcttgccgaccgtgacattggtgatcaggttgaatccttggaaaataaagccgattttcttgcgcaggtcgcgcagctgaccgcctttgagtgcggtgatgtcgctgccgtcgatcaccacatgaccgcccgtcggtcgttccagcaggttgatggtgcgcaccaacgtggatttgcctgctccggagaagcccacgatgccgaagatttcgcctttttccacgctgatgttcacatgtttgaccgcttcgacggttcgtccgccttcatgaaaggtcacggacacgtcgttgagttcaataacgctcatggttcgttcctcattccgttcaagtacgtgtttacgttcgttcgatacgtttcgttcgatacgtttcgtttgatgaatctcgtttgcataaagcccgtatgagttttctaattcatacgggtctttgcatattacctatcgccgcgctgcagcggtcaccaagtggtcggcttgccgaaatccttgaactcgctcttggcgatggcgtccttgaatttctgactgacgagcagtttcttgacggccttgccgaagtcggaatcgacgtcctgggtacggaccacgaacacttcgatcacgccaccatcctgcttttccatggcgagcgcgtcggcaggcttcagatcagcagcccaagaatagttgcccggcaccagagccacatcaacggtgtccaaggaacgggccagctgtgcagcatcgatcgttttgattttgaggttcttcggattggatgcgatatcgttgaccgtggccttggtggcatcgacttcgcccttgagcgtcaccagaccctgctgctggagcacgccgagagaacgtgccaggttagagccatcgttcgcgattgcgaccgtagctccgtcttcgatgtcatcgatggacttgtacttgttggaatagatgcccaagccaagggttggggtctgtccaagggaggtcaggtcgagattgttgtcggcggtgaacttcttcagataattgccatgctggaaaagattcgcctgaatggaaccagatgcaagtgccttattgggctgcacataatcgttgaacagcttggtcttcagtttgaaaccgtcatccttcagcagtggcgcgatgaccttgtcgaccatgtcgccgtatggtcctgcgcacacgccgacggtgattgtggtggttttgcccttcgtggtgttcaggctttccttggatgcggatgcgctgttgccggaaccgcatgccgcaacggaaataagtgttgcagcggcaagtactgctgcggcgattcgtttgatgccgtccggcctcttgaaaatagcgatggtcatggttgttttccctctcctacttgttttgaaaaaatacgattattccgttaccggcttactggcttcgacgtcggctttggcctgtgcgacgatgtctggattgtggatggcgaaggcttgttcggcgagatgcacttcgcgggttaggaattcgtgcagcttgcattcgtagccatgctcgcgtccgactttggcgatatagccgttgatgtagtcgacttccgttggacgtcccttggtcaggtcttgatacatggacggatagtgcagcggatgtgccacgcccgcggtgtgcagaatggtttcgacttccgtttcgcgcgtgcccaacagttggtatccggctgcttcggccgcactgtaggcttcatcgaccagctgttcggtgagccaacgcgcgtcgggatgcgcatggaattcgccgaaacgaatctggtacatggtacacagcgtgttcagcaccgagttgaatacgattttcgccatgcacatgccgatgaagttgtccacgatggtcgggttgagcgtggccgttgcgaaatcctcgtacagcgcctgctcgtgtttgcgcacctcgtcagtcacatcatccgcgtaggcacacaggttcatggccttggcatgtactccgccggtgaagttgaaatcgccggggccgtacacgtaggcaccgatcagtgcggtgccgccgtaaatgcggtctgtggagaagtattcgttgagcttttcgaagtgtccatagccgttcatggcggagaacacgatctgcttctcattgaacagatgggcgcagcgcttgagcacgccgtcaagctgcatctgcttgaggaacacgatccacacgtccggctggccggcgtattcctccggatagtacacgttgatcggcacgagatggcggtcttcaccgtcttgcgacacgtaggcaccgccctgctcgcggatcttctcgacattcggcttccatgtatcgacgaagtcgacgtctttgtgcgcgaattcctgcagcagcacaccgtactggatgcccattccgccggcaccgatcactgcgtacttcatgttccgcgctcctctctcgtaaaacatctcgcttgtttttcaagcagacaatcacaagatatcggaaaaacaacatggcaacatcggcgtggctatatacgctttttatggaaggcgcgaatcgtaataattgttttttatatagcgttatcagcaatcatatatttgtatgtaaatatgattatctgaatatagaaaaaccttccgcctgaagcgacggaaggttcaaaatatttagtttgattaactagttatcagtcgaccacacctttttcgaccacgatttcatcaggatcgacttcgtcgccatacaccggcttcagtgtctcctcataatccttgtggaagaagttttcatcgccaagcttgtcgatttcgtcgttgatccagtcaagcaattccttattgcccttctgcactgcggcagcgatggtgtccttatcgcccagttcggtgataccgaccttgaagcccttgttggacttggcccatgcgagcacctcggtgttgtcggtggagaaggcgtcgccacggccgtcgagcagcgcgttgtaggcatcggcgtactggtcgtacttctgcagcttgatgtcggggtagtttttctcgaagaaggtttcggcggtggtgcccttggtcacgatcagggtcttgcccttgagctggtcaacgtcggtgatttcggcgttttccggggaaacgacgcccaacgccaccttcatgtacggcttggcgaagtcgaccttctccttgcgctcgtcggtgacggtgaagttggccagcgtgatgtcgaccttgttggaggtgagcacgtcgactcgggcggcggcgtcaacggaggtgtattcaacgtctacgccaagatccttgcccaagcgctcggcgaagtagacgtcgtagccggcatagttgccgtccttgtcgacgtagccgaacggggccttgtcggagaacacggcgaccttgagcttgccggacttcttgatctcatccagagtgcgggcggtggcgctgctgctggaactggaatcgctacccgtggagccttcgtcgctcggagtggccgcggacggaccgcaagcagccacggaggctgccatgatcaacgcggccgatgcggccacgatgctcttgaatgttttgttgatgattgatgcggtcatggtttctcctctcttgcaaagatgactgctatcaaaatcttgggtttcgccgattctcgccatttgtcttgattattcggattgatcggcggacttgcggtgccggtcgaattcaaacgtatgcaggaactgcttggcacgttcggtggtcggattggtgaagaatcgttcggcatcgtcggaccgttccacaatgccgccatcttcaagcaggatcacctggtcggcgatggctcgcgcgaattgcatttcgtgcgtcacgatgagcatggtctggccggaatcggcgagttcgagcatcacgtcgagcacttcgcgcaccatttccggatcgagcgcggcggtgacttcgtcgaacagcagcacttccggatgcaggatcagcgcacggcagatggccacgcgttgacgctggccgccggaaagctcgtgcggccaggaatccttgcggtcggcaaggccgacgcgttccagaagcctgatcgcctcctgctcgacttcgcccttatctcgcctctgcaccaaggtcggcgccagtgtgatgttgccaagcacggttttgttgggaaacaggtcgtagctttggaacaccatgccaacgcgggtgcgtagttcgctgctgcgcttgctgcgtccagcggactcagtgcccggcttgcccgtttcgatcacttcgccgttgagcgaaatggtgccgccctgaatcggctcaaggcctgcaatggtgcgcaacaacgtcgatttgccggaaccggaaggcccaacaatcacaaacaccttgccatgcggcacgtcgaacgaaatatcgttcagcactggcctgtcggcattggcgtactgcttgaccaaatgcgcaatcccaagacttgcttggcctgcctgagtctgcttgcccgctgcgtcagtcatgcgaccacctcttttccagtcggcgggccacgatggacagcggccagcacacgatgaagtacatgaagaaaatcaccccgtagatccacaaggttccggtcgggtattggaaacggttcgcgtcgatgatctgttgacccactttgatgacctcgaccacgccgagaagcacggccaacgacgtcgttttcacgattcgtgtcgccagattcaccgaagccggcagaagcctacgcaacgcttgcggcagaatcactgtgacgaacgtctgccagccactcaacccaagcacatacgcggactcatactgggctttcggaatcgactcaagcgcgccacgcaccaaatcgcccaattccgcgccgccccacagcacgaacacgaacacgcatgcgccggtcgcatccaaattccaattccacgcacgggcgaaaccgtaaaacgcgatgaacagcaacgccaattgcggcatgatgcgaatgaaatccaaataaatcctggtcaacacgcgaatgacgggattcttcatcgtcatcaaccagccgacaaccaatcccaccggaacggaaagacccaccgaaacaccggcgatccacaccgtaacccacaggccctgcagcaggcgcgggaacacgcccggctcgagcagaatctcagcgccgctcatagtcgaacctccgttccagccaagtgccgaacaatgaaatcggcagcagaatcaccaagtacgcgacgaccagcatcagcaacgattcgtacgtgctgtagtacatgccgatcagatccttggccatgtacatcacgtcggcgagcgcgatggccgacacgacggatgattccttgatcaggaagatcacgttggccacaatgcctgggatggacgtgccgatggcctgcggaatcaccacgcggctcaaggtctgccattggctcaggcccagcacgtatgcggattcgcgctgcacgttcggaatggtttcgaggccgccacgcatcgcttcggccatgtaggagccgccgagaaagccgagtcccacgatcgcgcattgttccgcggaccagacaacgccaagcttcggcagaccgaaatacaggaaatacagttgtaccagcaacggcgtgttgcggctgagttcgatgtagacgcgcacaatctgcttcaacactgggatgcgtgcgatttcaatgcccgcgcagatgagaccgaccacaatcgaaagcacgatgccgaatacggaaatgaacaacgtcatcgccgcaccgttgacgaagaacggcgcgtagtgcgtcacgaatgtccagtcgaacacacgcgcctcccctctttctcgctaggttttcgaatgttctgcggatcgtttgaagccttctcaggctgtttccaagctttagccttgaacgcgccccatcgtaccgcgcgataatcacggaacaggccacgtcgttatcggtttttcgtataagcgtttatcaaccttcaagaaatgcttcccggtaatccttgccacagtattgcacgtcggcgctttccgccgtcagctcatatcgaaatgtgaagattgggtatgccttgcgagagagtatgcacatgctcattcgacatgcaacgatggaggatttggacgcgattgaggctgtggaggctgcctgcttcccgcctgcggaggccgcaacgaacgagagcctgaccgcacgcgtcgccacatatccggaacatttctggcttttgatcaacactgacgccgatgacgacgcctgcttccccgcttccgtggaagatggcacgttggttggtttcgtcaatggcatgacgaccaatgagaaagatttggctgatgtcatgtatgaggatgtttccatgcatgacgagcagggtgattggcagatgattttcggcgtggatgtggctcccgtctaccagcatcgcggttgcgccagctatctgctgcgtcgtgtgatccttgattcgacgattgccggacgcaaaggcattgtgctgacatgcaaagaacgtcttgtcggattttacgcccgcctgggattcgtggacgaaggcatgtctgcttcgacgcacggcaatgtggcatggcatcagatgcgcttgccgttgacgcaatccccttctgaagaatcgttcgtcgagtccgatccagacgcaaaaaccatggaaattccaatggtttcgatcgctaattgacggcgagtcacccctcgcaacaccatcgcgacacgccgacgatttgcattccgccgagaatccacgtaagttagcactcgcttcgggcggttggcgcagaggtagcgcacttccctgacacggaaggggtcacaagttcgaatcttgtatcgcccacgcgaagcgggtaacgaagccgggaaaccggtggaattatcccacgggtgattggcgcagcggctagcgcacttccttcacacggaaggggtcataggttcgattcctatatcacccactgaatttccgcttctcacggcggaagttctttgcggacatagcttagttggtaaagcgcaaccttgccaaggttgagaccgcgggttcgagtcccgttgtccgctccaccaagccccacctcgtgtggggttttctttttctcacacatctactccactcgcgttttttttaaaaaaaaa

SEQ ID NO: 871 - DNA, 1942 bp, Unknown
  gut microbiota DNA sequence
atgaattcggggaccttgtaccatttgaccggatagccggcgccatgcgcgcagaacaccgaatccggcgtgttctccaggtcggattccggatcgtaagccatgttctcgatcacctcgtcggcattgtggcacggctggtagccggcgaacacgcagcttaaatggccacggccgtgcgtgtacgcgttcacgtccatcgcatagtcacgcatttcggataccggcgccgtgccgttcaacgccatatattcgccgtcgccggtaggcgtgtcgaacgtgcccgacatgcgctggatgtcggccatcgcatgtccgaccatgtcctgcggcacttccagacggaagccgtaccaaggttcaagcagacggcaatcgcccttcttcttcgcttccatcaggccctggcgtatcgcgcggtaggtggcttggcggaaatcgccgccttccgtgtgcttcagatgcgcacggcccgtcagcagcgtgattctcatatcggtgatcggcgagccggtgagcacgcccagatgctcgcgttcctggaaatgctgcatgatgaggcgctgccagttgcggtcgagcacatcctcgctgcacacggtggcgtatgccatgcccgagccctgcggcagcggttcgagcagcacatgcgtttcggcgtagtgacgcaacggctcgaaatggccgatgccttcgaccggcgcggcgatcgtctccttgtacaggatgctgcccggtccgaacgtgacgtccaggccgaaacggtcgtgcatgatctgctggatgatctccagctgcaccgcgcccatcaactgcagatgcacttcctctaggcgagactgccagacgacgtgcagcagcggatcctcgtcctccagttcgcgtagggcgacgagacatttgtgaatgtcgcactcccccggttccagcgtgtacgtgagcaccggctggaggaccggactgccggcgtcccgctccatgccgaggccttcgccggggaatgtctgcgtcagacccgtgacggcgcagatggtgcctgcggggaccgtgtcgacggtggtggatttcgcgccggaatagacgcgcacctggtcggctttctcatgccattggccgtcttcggcaaccacatccgcgtcgccggcgtgcgcggtgccgcttagcatcatcttggccttcagttcgccgccggtcaccttgagccaggtcagacggttgccttgcgcgtcatgagacaccttatatatgcgtgcgccgaattcgccattgtattgcggctcttgcgcgaaccgttcgaaacctgcgacgaactgttctataccgtccattttcagcgctgatccgaaataacagggaaacagctcacggcgggcgatcatggcgcgaatggtttcgtccggcacggtttcggtgtcgagatacgcgtccatggccgtttcgttttgcatggcgatctcctccatgcgttcgccgtcaatcggctcggtgaagtcgacgcagccgtccgagaagcgtttcttgagttgggcgagcagttgcgttttgtcggcgccgggcgagtccattttgttgacgaagacgaatgtgggcacctgatagcgattgagcagtcgccacagcgtttcggtatggccttggatgccgtccgcgccggagatgacgaggatggcgtagtcgagcacggcgagcgtacgttccgtttcggcggagaagtcgacgtgtccaggagtgtcgagcagggtgatggtgaggtcgggcgtggcgatgacggccggctcggtgaagatggtgatgccgcgctgccgttccatggcgtccgtgtcgaggaaggcgtcgccgtggtcgacgcggccgagtttgcgtacttggccggtagcgtacagcagcgcctccgacaacgtggtcttgcccgcgtccacatgcgccagaatgcccgcgacga

SEQ ID NO: 872 - DNA, 1740 bp, Unknown
  gut microbiota DNA sequence
ctgaaccttcttgaaagcggaaatatcccccacataatccttttcggaaacaaaatatttactccaataacttgactcgttattcgggtgctgcatggaaaagaatgcaacctcatgaccgagcgcgcgtaatccttcagctaacgcgaagaaataggtttccgcaccgcctttacgatagaaatatttgttcactaggagaattcgcatgctcactctcccccatacaggttcagtgtttgatcggtgacgtcatcccagctatatttgctgacgatgtaatctgcagcatttgccttgtaacgttgtacaagatcatcgttttcgagcaattcctgaagtttttcccgcagggattcaacagaaccatgctggaatgtcgctgcgtgcccttccactacttccacacattccggaatgtcggacgtaaggcagcagttaccgtaactcatggcttccagcagactcatcggcatgccctccaagtcgcttgggagcacataaatataagcattgctatagagctctttgagtgcctgcccttgtatgaatccggtcaaaataacacgagaatcctgattagccatctgctgaatatgctggtaatactcgttggagtcggaagcgcctccagcgatgacaagctttttgttcgtattcagcttgttgaacgcctcgataaggtaatgcacgcctttctcgggaacaatacgcccgagaaacagtacatagtcgttcttgtgaagaccatatttttcggtaatttcctgcgccgaaaccggctcaccatattcaatgccattgggaatgaaatgtgtaccgcgaccatatttttcttgaaaatactgccgcatgctttcgctgagcactatgatttcatccgcgcatttcgctgcggtacgttctccgaacttgagatatgcggaggcgaacttgccccatttggcacgctgccagtcaagaccgtgaatggtcgctaccgtgcgaatgcccgcccaatgcgccagacgcagcatgacgcagggaccttcggcatgatagtggatcacgtccggtttggccgcaatggctttcagcgtcgcaaagaatgaggaggtcaacgccgccaaacctttcgcttcgaaagttggcactggaacaacacgcacgccgttatatacaaagggcttatttgcagaatgaacgtttccgtcaaattcggcgcccgcaacattatgtcccttgcgattgtacgcgatgaccttatgcccctttgcggccatacgcgtagctagttcatctacaacgatctcaatgccgccttcacgcgaaggaatgcgcttatgacctatcatcgcgatattaaccatcaccggtcaccccttagttattcagagtgccggaatcgtgccacaagcgctatgcatggcagaggattgcacagtctgaccactaaccaaaccgacgtaacggccgttatcggctctttttgcaatcgatcgacctgtggtcggcatgcgagtcccgtcctttccctctaaatgaaccccgaattggtgtctctcaagagcaacccaaaccgcgcaggagttacccgatcccgttcatcacctgccaaggtcgatttttgcatccccctcagacacacccagcccccgtcacctactttgggggtattcttcacaggttttccatgaacgctttgcttgctcgtgacttaaaaactgtgtttgaaatctgattcagtcggttttccggacg

SEQ ID NO: 873 - DNA, 8084 bp, Unknown
  gut microbiota DNA sequence
aagcaaaaatcccgttgaatatcgtatttcagatgttcaacgggatttttatatccgattgtgttgctttcgatatatcttacgaaagatatatcgaaagcaaccgtattgtcggtttttagaacagtcctggctcgttcaatgcggaatgcttgcggctgtacacgaaatacacgatcaaaccaagggcgaaccagattgcgaaacgcacccaggtttcccaattcaaaccgcaaatcaggatgaagcagaaaatgatcgcgcagatcggcgtgaacggtacgcccggggcgcggaagccgcggtgtgcgtccggctgggtcttacgcatccacagaatgcctgcggacacgatgatgaatgccgacagcgtaccgatgttcaccaattcgaacagcacgttgatgttgatgaaaccgccggcgatggccgttagaataccgaagaaccatgtacctttgaacggggtgcggtatttcgggtgtacttcgccgaagaacttcgggaacaggccgtcgcggctcatggcgtagcagatgcgggactggccgtacagctgcaccagcatcaccgtggtcatgccgatcagagcgccaagattgacaacgaacgccagccagttgagaccggtttcgagaatcacgccggccaccggagcgtcaatgaagttcgcgaactccttgtatggcaccacaccggtcatgatcagcgtcatgacgatgtacagcacggtggacacggccagcgagatcagaatgccgcgcggcagtgtcttgttcggattgatggtctcctcggcggaagaggacaccgcgtcaaagccgatgaagctgaagaacacgatcgacgcggccggaacaatgccgtacggctgcgtcgagcccggctggaacgtgtaaatgccgtacggggagaacggcttccaattggcgggattgatgtaccagacggtgcacacgatgaacagcacgatgatggccagtttgatcatcaccataatatcgttggttttcttcgtctggttaatgccgatggacagcacccaagtgatgatgagcacgatcacgaaaccaggcagattgaagtatgtggtcacgcctggcgtggtgccgtatgccgcagtcagttcaactggcagatgcaagccgaaaccttccaacagtttgttgaaatatccggaccatccggcggacacggtggccgcctgcaaggcgtattccaaaatcaaatcccagccgatcacaaacgcgatcagctcgccgaacgccaaatacgcgtacgaatatgcggaaccggacactggtgccatcgcggcgaactccgcatagcacaatcccgcgaaaccgcagcagaccgcggccagaaggaaggagatgcacaatgccggacctgcggtgagggcgcccttgccggtgagtacgaaaatgccggtgccgatgatggcgccgattcccagcatggtaaggtcaaatgttttcaatgtgcgtttcagcggagtcgactcggatacgagctggtccactgactttttgcgaaaaagatccatggtcttaattccctaaaaatggttttatatgggctggaccggacggatttccgggactctggcacgcctcaaacgccagaaatcaaagaagggctgaacgcctcatatacgggaggtgtacgcgccttatgtaaggagagtgtaaaaacctggcacggacaaaaccgtgaaaaccccgtgaatcgtctcgctaagtgtgcgcgttttttcgaagccgtcacgtgggagcgcaacaatagagtcatgactttcaacgctgcccgtgaatggcaattctcatccgaacaaggcaaggccaattatgaggccgcccaaaagcaatatccggcgcaggccatcgtcgatatggccgcattgcgaaacaacatgcgtcatctggtgagcgtggttggcggcccgaattccggcaccgccgtgatgggtgtggtcaaggccgacgcgtacgggcatggtcttattccggccgcgctcgcggcactggcgggaggtgcgacctggctgggcacggcgcaatcacatgaggcgctgctgctgcgcaaggcgggcatcgggccggaccgctgccacattctgacatgggtatataacggcatggctgtgccttttgacgagctgatcgacaatgatatcgatatttccgtcggatcattgccgggcattgacggcgttgcggctgcggcgcgtcgtcttggaaaaaccgcacgtgtgcatgtgaaggtcgattccggtttcggccgcaacgggttcacgcccgccacgttcgacgcggcgctcgccaagctggtgccgctcgccaaggagggtgtgctgcatatcgtcggccagtggagccatttggcggtggctgacgctccggacgttcctgaattcgtggcatccaccgacagacagatcgagaatttcaaggatttcacccgtcgtatggagcaggcgggcattgcgccggagattcgtcatctcgccaataccgctgccacgctttcacgttccgagattcattttgagctgacgcgcccgggtatcggcctgtatggttatgaggctgatccggccatgggcacgccaggtacatacggtttgacgccggccatgacgttgcaggcgcagcttggtacggtcaaggatgttgaagcgggccatggcatttcctatggccgcacgtacctgactccgtccgatacgtccaccgcgatcgtgcctgtcggctatgcggacggcattcaccgttccgcttccggttttgatatggaaggcgcgaagcatgtggtcaagccaggaggcccggtgcgtgtgatgaccacggagggtccgcgcctctaccgtgtgtccggtcgcgtgtgcatggatcagtttatgcttgacctgcacggttccgcggaaaagcttggcgtgcatgagggcgacaccgtgcagctgttcggaccgggtcgcggagaggattatgccgagccgaccgccgacgattggggccgtgccgcaggaaccatcagctatgagatcttcacctgcctgtgcaaccgtatcccgcgcctgtacgagcatgcctctgacgtgctgtcggtcgaagatctcgccaaactcgatcccgcaaccctcctataaagaatcaggcgtgcgatgggaggcacgccgtgaaagtcaatatggtgggcgcggtacgttcgatggttggtcaacgtgccgcgcttgctgttaaggtggtgagctatgccaggaatgattctgaaggaagatatcgaaaaagttcgcgccaccgccgatttgtacgacattgtgtccgcaacggttacgctcaaaccttcaggaactggcacatacgtggggctgtgcccgtttcatgacgagaaaacgccaagcttttccgtgcgtccggcgctcggtgtgtggcattgcttcggctgcggtcttggcggagacgtgttcggctatgtggagcatcaggagaacgtcgactttcgtgatgccgtcgagcttttggccgaccgataccatatcgaattgcgttatgaccagtcgaacgccaagaaggagcataccggttcgaaacgtgcccgcctgttggaagccaacgaggccgcgcaggagtttttcgtctcgcagctgatgaccaaagacgcgctcgccgcgcgcaaactgcttgatggccgtaatttcagccaggccgattgccaacgattcggttgcggatatgctccgcaaggctgggataatctggtgcggtacttggcaggcaagggcttcacacagcaggaaatgttggacgcaggtttggcccgtcaaggccagcatggggtgtatgactatttccgtggccgcgtaacatggccgattcgcgattcaaccggacgcacgcttggtttcggcgctcgcaagttgtatgaggatgattcgattagcgcgaaatacattaatactcccgacacgcagttgtatcggaaaaaccaggtgctgtatggcattgatatggcaaagtcggcgattgtgaagaaacgtcaggcggtgatcgtcgaagggtatacggatgtgatggccatgcatttggccggcattgataccgcgatcgcgacatgcggcaccgcgttcggtgccgagcatgccaagatcgtgcgtcgtctgatcgccgacgattcgttgggtgcggtacagctggttggtccgttgaaggttgaaggacaggcgttgagttcgcgtatcgtgttcaccttcgatggcgatgcggccggtcagaaggctgcgattcatgcgttcggcttggactccgctttttcgacgcaggcgttcgttgctgtggccgacgacaatctcgacccgtgcgatttgcgtatcaagcgaggtaatgaggcggttcgcgcgttgatcgatcatgccgaaccactgtatgatttcgtgatcaaaaccgcgatcgggcgtttcgacaccacttataccactgggcagatgggcgcagtcaaggcggtggcgccgttgatcgcacagattcgtgaccgttccctgttggatttgtattcacgcaaggcggtgcgccagatcggcgtcgacttggatatcatgcagcgtgaagtgcgtgacgcacgacgcaaactgcaggtgcgggacgaagatgcgtacgctccgaaacgtcgttttgcaggcaatgccggagctgcggtggaaccgcgtatggaacaaggcacgaatccgtatgcgaatccttccgcgcggaaggcgttggaacatcgtgatgcggcggagcaatcctactatcgcattgatgatgccgtgttcatttgcgaacagcagttcatggcaaccctgattcaagtgccgcttgccgttgatccgacactgttcgccagtcttacgctgtcgagcttcatgacccccgtatttcgcacgttattccaagcggtcgcggcggccgggggactgccgtctgctgataccccgcaaggattgtggatgcacaatctcaccaaagcgggtggtccgatgttggaatccgtcatcaacgagcttgccgtcatgccattgccgcttcctccgagcgatactgacgcggaacgtgcgtcgcaacaatcgcaggaaggcaacgtgcaattgcgcaagccgaccgacgacgaacgcagatacgcgtctgaactcatcattcgactgcttgacacgggcatcatgcgcaaaatcggcgcggaccagcgtcgcatggcgcaactgccggacggtgccgagaaaatcgagctgcttggccagattaccaagctggaaacgttgcgcaaggatctgcagacgagggtgttcggcaataacgtcgcctgaatatttggtgtgccggagcatcaacccccgaacgtctttgtcgttcacctgaatttgccacatgcctgagtgcggtatgaacagccggcgaacgtgtggtgaacgcaggaagaatacttaacgaattcttggctggtgcacggtatccttcggcgtgttttgcaattgcaaaacagttttgccggtttgcaaagtcagggaacagtaaggcgcatgggctgaaaaacgttggaatggtcggaaaaatagtatgccaagggtatgtggtacgcgatttttcgggtaaagtgaatacggcgtttcttgagtaaatcgcccgggtctgcaaacggtttgcaaactggattcacggaggaatgaatgcgacgattggtcgtcaaaatcctgaaaaacgagaccattctcgtagttgcttccatacttgctcttatttcatgctttatcgtgcctcctgacaaggagtatgccggatatattcatgccagcaccatttcgcagctgatctgcctgatgctggtggtgtgcggtttccagcgcatcggtgtgttccgcatcatcggttcgcggttgctgcatcatgtgagcaccgcccgcggattggtgatcacgctgatttcgctcacctatttttccggcatgctgattaccaatgatgtggcgctggtcacgttcattccattcgcgatcgcggtgctcaccatggctcacatggaggagcatgcggtgctggtcggcacgttgatgaccgtcggtgcgaacgtgggcagtatgttgacgccgatcggcaatgcgcacaacctgtatttgaaagcgttgacgggcatgccgtccgctgaaatgatcggcattatggcaccgtattccgttgctgcggcggtattgctggtggtcatcgtctgtgtggtgttcggtaagaaacctgtttccgaattttcctctatcgacggcagcggcatcgaacagaatgtgctcgctccgaattccgatcagccgcagccggatgagattcgtgtgaccggctacggcgcaggttacggtggttggcgcacgatcgtatattgcgcgctgttcatcgtgtgtttgctggctgtgagcgatttcattccgctatgggccatgtgcgtgatcgtggtggtggcgttcctgttctgcgatcgccgcgtgttccgcaatatcgactggggattgccgctcacgttctgcatgttcttcattttcatcggcaatatgaaacgcgtgccggaattctacgagctggccgcctccttggtgggggcgcatccgctggaagtgtccgtggtgtccagccagttcatttccaacgtgccgaccacgttgctgctgtcgggcttctgcgaccagtggcgtgcactgattattggcaccaaccttggtggcatgggtacgctgatcgcatccatggcctcgctgatcggatacaagaacgtgacgcgtaagtaccccgataagaaggggcgctatctggccgtctattcggcggtgaatgtgctgttccttatcgtgctggtcggtttgagctggattatcgagtagcgtttggccgtcgaccggtttccctgaccgctaatctcaaggtcgccggttcgcaccttttgctgggattgcatgagaacccttggaatcattggatttcaagggtttattgttacgtcggctgatggtctggtgctgtgataatctgtgccgggaagcgtgtgccgagaaacgtaggaaggctgaacatgctgcaaggattgctgggaattttctccggactgatcacgccggtgcagaccgcggtgaacacgcggctcggccgttccatcggctcgccgttgcgcgcctcgctggtgtcgttcagcgtcggcctcattgcgatgctgactttgacgctgctgcttggcccgtatccgctgattcccgccaccgcggcgaacggcccatggtggatgtggttcgcgggcgtgttcggtgtcactttcctgaccggcaatgtgctgctgctgccgaaactgggcagtctcaaaaccgtgatcatgccagtcaccgggcagatcgtcatgggcctgctgatcgacgctttcggctggttcggcactaccgcgcagccgatttccccgctgcgtatcgcaggcgcggcgatcacgctggtcggcttcctgcttgccgtcgccggaccgaatctgcgattgaggcctgccatcgatcgcccggctggcggttcggaaaattccggcgattccgaaaaatccgaaactgacgggaaagccgtacatgtgccaggttccgcgaccgtgctgtggagttgcgcaggcatcgcgttcggcatgtgttcggccgtgcagacggcgttgttgggcaagctgggcgtcgcgttgggatcgccggtgaaggcatcgctcgcctcgttcgtggtcggtctgatctcgcttgcgatcgtcgtcgcattcgtcgaccgcacctacagcctcggcgacgcgctgaagaaaggcaatccgtggtggatgtgggtaggcggattgctgggtgcgacgctggtgatgtgcaacgcgtacctgtccgcgcatatcggcaccggcatgacggtgatgctggtattgctcggtcaggtcggcggaggattgctggtcgaccgtttcggcctgcttggcgtgccacgcaagcccgtggccggcatccaatacgtcggcgtgctcgtagccatcgtcggcattgtgctcaaggcgatgtgattgccgtgtcgagt

SEQ ID NO: 874 - DNA, 3939 bp, Unknown
  gut microbiota DNA sequence
tgccggtcacgccgaacagcagaacacctataacaagcgtgaggatgagatcgcctgcgaagacatgaccatgcatccacgacaagagacgctgcttgaaattcgacatatgctccaccctagcgccagatacgctgtggcgccatcatgcgcaggaatgaaatggcggtaagataaagccgcttttgtgaggtaaggttgtctccgcgtgtgggtgggatggaagccatcaagaagccactactcgcattgaatatgccgatgacgccaaaggaaaggtgaatgcatgacgttgctgagcgaatactacgtgcccggattgcatattgaggatcgttccatcaaggtgccgttggattggacgggccacgagcccggtcatgggttcgatggcgaatcgatcagcctgttctaccgtgtggtcaccgctcccgaacatgtgcatgacgacctgccgttgctcgtgttcctgcagggcggcccaggcggttccggtccacgtccgctcggcccaagttccgatggctggatcgaggaagcgatcaagcatttccgcgtggtattgccggatcaacgtggtacggggcgttcgtctcgtgtcgacacgcatgtgattgagggcatggacggcgacggcaaggccggtgccgcgtttttgaagcgtttcctcgctgattcgatcgttcgtgatttcgagcatctgcgtcgcaccgaattcgggggcgcacgttgggtcacgcttggtcaaagctatggcggattcctgacattgacgtatctttcgctgttcccgcaaggggttattgccagcttcactacgggcggtattccgcacgttcccgccgatgcgaccgacgtgtaccgtcatacgttcccgcgcatggcggcaaagacgaagcagttctacgagcgctacccgatcgatatcgaacgtgccgctacggttgccgacatactgcgatctcgcaaggtcacattgccgaacggcgatccgcttacggtggaacgtttccaatgcttgggatccgatttcggtatgaagccaagtttcgaacgcgtgcattggattcttgatcaggcattccttgacggagacggttcggcctcgacatcgacggaactgtctgacgaattcctgtcttccgtgatggatgcgacctcgtctcgcccactgtattggccgttgcaggagttcatctacgccaacggcgagctgaaaacgccgattcgctgggccgcccagcgcgtgcgctgcgagcatccggaattcgcgggcggcattcgtccgcttaatttcaccggcgaggccatgttcccgtggatgttcgagcaggaacgtgcgttgcgtccgttcaaacctgccatggacgtgcttatggaagacacgcacttcggcacgatctacgatgccgaccagttggctcgcaacgaggttccgctgcaggccgccgtctattttgatgacatgtacgtcgattcgggattgcagctcgacacgctgtctcgcgttggtcgttcacattattggactaccaatgagtttgaacatgatggcgtgcatggttccaccgtgttcagacatctgtttaccgaggcgttgaaccgcggagatttggcggagttgttctgacgattgttcggcaacgacgagtatcgatagcaaaggaaagaaacatggccaatccaaccatcggattcatcggatacggcaatatggcacaggcgatcgccgaaggcctagtcaacgctggcgtcgtcaatggcggcgacatcgtggcctgtgccgcgcattacgacaagctggaacgcaacgccgccaaactcggcgcaaaagcggtgcgtaccgccgcgcaagtcgccgaagcagctgacatggtcgtcatcgccatcaaaccgtatcagatcgaaaccgtgatcgcgccgatcattgatcagctggcgcaagagaacaccatcgttgtatccattgcggcaggctgggatctgaacaaattccgcgacctgttcggaacgtctttcgaacaggcacacatccaatgcaccattccgaacacgccgatggctgtcggcaaaggcgtgctggtcacggaaatcgacaacacgctcacgcaggaacagacggaaaccttcgaaagcctgttttcgtcaatcagcctgattgaacgcgtggacaccgcacacatgggcatcggcatgtgcatcgccggctgcgcgccggccttcaccgacatgtacatcgaagcattgggcgatgccggtgtgaaatatggattgcagcgtgctaccgcgtatcgtctggctgccaaaatggtggaaggcgtgggcgcgctctatttggccaacgaaacgcatccgggtgccatgaaagacgctgtctgctctccgggaggcaccaccatcaggggtgtcgcatcgttggaggaaagcgcgttccgtggtgccgttatcaaagcagtcgacgccatcgaagcctaatactaagctagggaaccatgtctcttactatcggaatcgtcggactgccgaacgtcggcaagtccaccatgttcaacgcattgacccgcaacaacgtgctggcggaaaactatccgttcgccaccatcgaaccgaacaccggcattgtgccgttgccggatgaccgtctgccggtgctcgccaagctcgtgcatacggagaagatcgtgccggccaccgtcacgttcgtcgacatcgcaggcattgtcaagggcgcttcggaaggtgaaggtctgggcaacaagttcctcgccaatattcgcgaagccgacgcgatctgcgaggtcgtgcgtgccttcgaagacgatgatatcgtgcacgtcaacggcaaggtcgatccgtccgacgacattgaaaccatcaacaccgagctgatcctcgccgatctgcagaccatcgagaacgcgctgccgaagctggagaaggatctgcgcggcaagaagatcgaaccggcttacatggaagccgtcaagcaggcgaagaccattcttgaagctggcgaaaccattgataaggcgactcgcgaaggtcgtttcgacaaggattccgtctacgatctgcacttgatgagcgccaagccgttcatctacgtgttcaacgtggacgatgtcgaactgcagaataaagacatgcaggccaagctcgccgcatccgtggctccggcccccgccatcttcctcaacgcgcagttcgaagccgatctgaccgaactcgatgaggccgacgcgcgtgaaatgctcgccgacgccggtcttgaggagtccggcctggatcagttggcgcgagtcggctacgatacgctcggcctttccaccttccttaccgcaggtgagaaggaagtgcgtgcatggcagatccacaagggctataccgccccgcaggctgccggtgtgattcacacggacttcgaaaaaggcttcatcaaggccgacatcgtctcctacgacgatttcgtggctgccgaaggctccatggtcaagatcaaggaggaaggcaagctgcgtcaggaaggccgtgactacgtgatgcaggacggcgatatcgtcgaatttaaattcaacgtctcgaagtaagtgtttctctggctcccctcttttgaggggagctgtcgctacaagcgactgagaagcggcacggataaggcctgagaagtcgtcttctcaggcctttgtcatgacattgttctgcaaggattggctgctgcagcaacataatgtgtgttttattattcggccttggcggcttgctggtcaatccaattgttgacgtcggtgatcgcctcgtcaagggttgctttggcggctttgtagtatttggaatctacaggttgacgatttccgcgccgaacggccagagcgcaagcttggccatcttgaacgcttgaatgccgagcggaatgccgatgatggagatgcacagaatcag

SEQ ID NO: 875 - DNA, 4151 bp, Unknown
  gut microbiota DNA sequence
caccatgacggcggaagaagcggcttccgaagctgactatgtgaccggtgccggaaatatcgttccgaaaggccagatcaagacggcattgttcatttacgcgcctgcgaacggtcgtttggtggattgggaattccagaatgccgacgattacaagggggtgactttgcacgatggcctgaccgtgggcgtgagcgatgtgaccttgcagcccggcgaatcctatgagatcaccgtgcatgtgcagtccgctccagatacggatgagccgctcaccctccgccagaccccgctgatcgaaggccgctagacagtcccgtaggtaacctaagcagctaagcaagcggctctagacaagccatcttgcaacaggggagtatgggggaatatgtgggtatatgcgcatgtagcctcacgttcacggaacggacgtcaacttttcatccgttcttgccgcgcgtttcgcggtatcgcgtcaaaagcaagtttccaatagtcatttaaccgcaaaagcgagttggagatctactctgttaacagggcttatgatactatctcttcatggagggaagcccccttcttttcgggtgggggtagttagtagagggaggagtcatgcaaggcggtttccgcagctctgagcagggttcggatcaagtagtgagaacccaggaaatccatatcgtctcttctaactctcgtcaccaggatcagaagcaggagcgacatcagtctcaagacaacagccctcagtttgagccgatgatgttttcgaacacgccattttccgttggtgaagatggaaagcgcaagggcaggcggaatcaggttgtgcccgcatggcgttattcttttgtcgtctgcttggtgatggtcgatcttgcggtcatgctgatttcgctatccatcagtctttgggctaacgatgccgcatataatgccatcaatggggccatgccgttctggctgttcctcatctgcttcagcctcatctgggtgttgagcctcacttttgctggaacgtatcatcgtcatgtgatggcggaaggctacgagctgtatgcgaaaatcatcaacgcgtcgctgctcaccatcatcacttactgctcgcttgcttttattttcaatctttccttgccgagaaccgcgcttatcgtcgccccgatcattgcattcttcctagaagtcatcgcccgttggcagatgcgtcagtggcagcatcgcagccgtcagaagggcgcctgtaagtataagaccgtggtagtcggctcttccgacggtatcaattgtgcgttgcgcaccatgcgggactactccaattgggggtattcgccgattgccgtgtgcccgatcgaagctgacgacaatgagaaagacgcttatgtggtcacgtcgttcgagcctgatccttccattgaaggtgccgacaagctgaaggtgattccgttcaatgccgctttcccgcgtacgtgcgaaagcttgggtgcgcaggaagtgtatgttgccgacgtgctgtcccgtgattccgaaatgctgcatggcatttcgcttgcggtcgagtcgcttggcatggagcttgcgttggctgtttccttggctgacgtgagcggtcaccgcctgtacttgcgtaatacggccgaacagccggtattgctggcaagtttgccgcagtatacgaatacgacgtacgtgattaaacgcctgctggatatcgtcggttcggctttcgcgctgctgatttcctcgccgctgatgctgggtacggcgatcgccatcaagcttgatgacggtggtccgattttcttctcgcagcagcgtatcggtttgcatggcaagccatttaccatgtataaattccgttccatggtcaccaatgcggaagaattgaagaagaaacttgccgaagaaaatggacagaccgatcgtttcattttcaaaatgaaggatgatccgagaattacgaaggtcggtcgttttattcgtaagacttcgttggatgaattcccccagttcttcaacgttttgaagggcgacatgtctttggttggtcctcgcccggcattgccggaagaggttgcccgctacggttccctttattccacgcgactgctggttaagcctggtattaccggtccgtggcaggtttccggccgttcggatctttcgcaggagcagagcgaatatttggacgtttcctatatcgaaaattggtccattgcaggcgatcttgcgattctcgcaaaaaccgtgctcgtggtcttccgtggcaccggatcttactaaattccgcagtacttttcgcacgaatcgtcgtgcaaatcagagcgctccctcccggagcgctcttttgctttcccacgtggtgcagatgggaaatgtgtttttgtgtggttgcgacctcgcttgtttgattgtgggctcgcttgtttcttgatgggaaacaattattcgtcatatgtgtatttttgcagttattggaatacgtttattcgtgtgaggaatattgtgatactcatgtgaaacagttttaacttatgtgatgaggtccactataactaaagattgtcttttgatatagctcatatcagatttggattttcaaaacaggtaatttgctttcctctgcgtattatgggataattaatgcaatgtggcgccatgatttctgtaacgtcatccctcacagctgagggtggtcccacgcacttcggtgcggattgaaatatgcaacagaacctataaaaggaaataatcatgcgtagtcatgagaagcgggtgaatgtgtgcccgcgaacgcaaggtaagtatttggtttcggtggtgctgaccgctgttttcgcgatcgcgtcgctgtttggaacgctgctattctctgcagatgcagttgccgatgccgccgaatctcaggcggtcgcgcaagtgggcaacgcaacctacgcgagcgtacaggaggcgatcggtcgaacaacgttgaagaacactacggtcacattgctagccgacgtgacggaaagcattacgattatgcctccgaaaggcgtgcgaaacgtaacgtttgacctgaacgggcatgcgctgcaagccactgaatccggtggagctgctgggtttgctacgatcactgtgcctgcgaacatgcagctcaccattgtcggcccgggaacggttgcgggcggaacacagcctgcggtcgattgccgtggcgcattgcatgtggagggtggcacgttcacctcggatgcaacgttgatgcggtttgccgaaacggatgagacttccgcgcaaggcagtttttcgggcggaacattcaccgcgccgacgcttttcaacctgctggatgacgctaaaaatcttggctatgtgaccgttcgcggcggcgaataccggggtatgattccagttggactgaacacgctcgtcttgttgagcggctcgttctccgactcgtcgaatcttgcgcagtacttggctgactcgcttgggctgattccagacggcactagcggtgacggtacgggtgatggaatgttccatgtcggcgatctggcgatctccagcaagcagactttggttgaattggatcccgcgagcggccttcagcagctgagtgccgacgacctactagagttgacggaaacacaactgaacggcatcgccgactaccgtcttgtggtggatagtgaccagttgcaggcgttgaacgatcagatcgatcgcgcaatgcaggcggttgagaagaggaaagccttcgaagccgtgagtcagaacatcaccatcaccgccgtgcgcaatggtgcggatgatgttatagatacaaactcgagtgggggagcggacccacagttgcgcacctccgaccatgatggcataagcactcaagtgacggtaaccatcaaagtcgtcgccgagccagaagaaccagaagaacctggcaaacccagcaatccagaaaagccagagaagccggaaatgcctcgctccggatccgcagtccaggcgctcgccatcatctcgctgctgctggtgatcgcttccgcaatctgcgcatacgcaacggtccatctgcagtcgtcgcgtctgcacaactagtattttccgcccctttcttgagctgtgcagacgggaaatccgacttgtgcagacgcaaaact

SEQ ID NO: 876 - DNA, 45391 bp, Unknown
  gut microbiota DNA sequence
aacaacatgtctaaaacgagcaactggctttctgtctcattttaatgtccattatttagttttcaaaacgccccacgaaaatcacaattcggatttcgatagtttttcaggtgcgaaagacgtcccttatcatgagcgcttacacttcgcacaaacaccattccaagaccggccaccttgccgaaaacacaatactgctggctagaaaacacactctgaataccggacggcacactcaaacgctcaacccagcataccccacaccatatcgttatggcaccatgccattttgcctgtgctatatcatcatcacatcattaaccggcaaactccgttcacgtccataatgctcaatcctatccgcatatcgagcgccaagtttataaaagcgcaggctgtcctcatcggtattggcaatcttcagcaaatcgtgcaccaacaccagataatcggaaggactcaccgagcattcgaaaacactgttctgcacacgctgtccgtatttcatgcatatcttcgccaccaaacgaagacgacgcttcccctcaggggtttccgtactcacatcgtacgcaaccacaaccatcatggtttttcacctccaataacgtatcaccacgaatcatcgcataccgccacacacagctacgcaccttttacttccacataaatggcgggtaatcatcaagatcaccccgcaacgatcgagctagcagcagcgcttgcacatacggaaccaacccccatgaaattttttcttgcaggaacggatgaagaatctgatcgctcttctttttctgccacgccgtaagcactttcttccgcccggaatcagacagcagcacaccaccattctcccgtatttcaaaatcccccggcttaacagcgcctgtattaaccaatgtcagcacaaagcggtcagccaacaccgggcgaaactcttcaaccagatccaatgccagagaggctctcccgggccgatccgtatgcataaaaccaacatacggatccagccccacgccttgcaaagccgcaatgcaatcattcgtcaatatggagtagcaaaaagacaacaatgcatttagtctgtccagcggaggcctcctcgacctattggtgaaaaagaaatcatctttattcttcaggaccaaatcgtcaaaagcgtagaaataatctttggcagcaagcccttcgacacccctcaactcatcaaccgtcaaacttttccgagcttctaacaatgccgccgacaatttgccgctctgctcggcaagtcggtcaatatttacccgcaaagcatgatcacgtttcgtacgttcgagcacccatttcgcattgtaaagttttccaacaatgaaagatttcgcgtaacacaaagatttttgttcgtcatccgcgactcgaaattgttcacggcgaagtagcacattacgattctcctcccctaacacggaacagtaataatggcctctcggtgaatagaatgccatagaaacgcccagtttgccgcagcgccccataagagcaggcgaagcacccttatacgagaaacacatgattccctcaattgaccgtaacggcactttcgccaaggttttgtcattctgatgaatcacaacattgtcgttctccaaagcaagataggcatcttccgtcatcacaaacagcgtgtttaacagccgcttcatcactccccgctttccttgagccgttcttcgatatatgcttttgccgatttcaccttccgtaattcaggcaggcacaaatcccgtagagaacatgacgaacacgatctggtctgtttcactttaggagtccatccgcgggagaaaagatcatgcatttgcaagaagtcagcttcgaccatgttgcgaagatcttcgtccaattttacccgctcacgacgttttgtctgtcgataaaacaaagcaccttcaggaatatcacacgcgagcatttcttccaagcacatcgcttccgcgcatagctgtaaacgatcagcatcaatcgttttggatttgccgtgtttgtattcaatcggatatggcaaccacaatccgtctcttccgtgaagcggaacaccatcattagacttatggaattccacaacatcacaggctccagttatgccgagcgctcgcgaatagactctcaaatcccgcatgatcagcgtatcgccgcgagattcagaagccgcataatcgtgggcgcgttcatgttccagatgcccagctgtggtcaaataattctctgaccacagctgttcgatatggataagagtccactgtcgtttgcagaatgagaaatgctggatgcccgaaagggccagccaatcttcttccggatatccttctggccctttcatgcaacaccccttactctctcaattccaaacgcttcagcgtccttcaatcacttcgtaccgcaagtcgggaatagaagatccattcactgccaccgttccgtccacattaacggaaacggaacgatgaactttggcggaagagtattgccctgacttgctgttgtgcgtgaaccacacaacgtccaacacttccatggaccccgcaggacgagccgaactttcatcattctcaaacaacgtgacgagagcttccttgattttttcggcgtcttctgcagtaaacccggttttttcggcaagctgtgggctgatgctgccatacgtcgcatacaccgcacggccggaaacacggtatttcattcccatggtatcggaggatttcttaccggtgtccgtggtttcactgttcactgacttagtgatctgcacgtcgtcaatggcgatgggttcaaccgagaacgcagcctgaatggaaaccggaccgcgcacgcccaaggaaacttcgtcaacatccttagcttttttgaatgcgaatacttgtccgaacgcacgtacgtcaagccactgttcgcacactttctggaacaccaggttcttctgtttctgctcttctttcggcaaggttttcaaatatgtgttgaaacggtccgacaatgattttgcgccgtcatcggaacggtcatcggactgcacgaaaatcgtttcaccagcatcttgcaggcgattgcgaatcttccttttcagtgcaacgtcagaaacctcgcccagcccttccgatgtggttcgtggacgattgccattcaacggatcaccattaggattggcattattagacgcaaaaacgactgcgaaatcaatcttgttttccaaagctgccatgatatgactccttaactttttctttgataatcaacgtcgataacttcaaaaactaaacactagttttctttgctcttctgggatgcttcttgcgctttacgcatagactcccttcgctggcatgaataaccgagcagaaagagcggtgaaagtgcacggttatcttcgaagtctccttctttgaaaagcgccatgacctcatccacgctgttctggaaccagggcgcgccattcgccgatttcaggtagggcatcagttgcttccacagcgttccccatgttgtaaacggctttgcgacgaaattgctcatgagcttaacggcattggtcggacgggtgtcactgattccttgcttatacaggacaccgttttcaaagcggtccgcgagtgccagcaatctcccgtataagtagtcgcggtcatttcgtgttggttcaaggtacatggatatcgtgtcctcctgtttgttttgcttcctcgcgtcgtcaatgtaatgttttttccataggctgcatgcgatttcaaaatctcttagccatgctcctggagcgtcatatcccataggtttagtgactctgtggtatgtggcgtccaatatgaagcggggaagcgattctcctccgaacatgcattctataagctgctttttcgtgtttttcgcaaaacgtttataggctttgctgcttctgtctgacacgtcatatgcgcagctgatgatgtcggcaaatggtggcgcaccttcatatgcgacaaacttctttttttctttgtcgtacattttcaacggccatgccgcatcaacatgccaccgcaggatactttcgacatattcgtgttttgaaagttcacgataatatgtaacgctcaaacgccctgatgtcgccgcatccagaatgacaatcatcattgggtcggcatgctttttgagtttgttagcattgccatatccgcgtagtaccttcgcaaaaacttgtgcgtattgaaagtttgttgcggtcagcgcatctgcaatatcgttgcggggagcttccggctcgtccacatccgatgagaacaaagagccaaaatcataagaaccttcctgagggtcaagcttcggcttttcgttggggtttttcaccgagcagatgactatggcctgggtatcggtaatcgttccatgattattgaccaaccattgcagcgtcgaatgtatcttctgcgatgtttcaccatcgacttgcaaagcctcctctttggatgcgaagcgccctcgataggtgaaattcgttgaatcgtttgccgataacagtttggcgttgccatttacgctgacaattttcttagggaagttcaatatcggagcatataggtcctctccgaacatatccttcccttttttctgtcgatcatggtacaaataagaaatccattgcgcctgtatatcgggatcgttcgagacatctgagttttgcagcccaatttcaacttcgaagcaaacacctgctttccggtctttttcggttatttccacattgaatcgagcggcttcttcgctgatgctgtgttccgaaacgcatcgatagatggcattgagtttgacgttgtcgcctttccaagcggcaagctgctccaaatacatggaggttttctccttgtcgaaatgcaagtcgagatattggagctgatcaaacagaggatgcggtaccggcttgatggtgcgtcccatggaactttctgtgcacgggataacaatcgtttgtttttccctcagaagccgtagtatctcaccattctcgtttacccctagcgtcaatagtgtcggaagtgtcgtatgccccggaggaatcaaggctttcctaatgtcaagcgtagaaccgtcgccacttctcggaatttttccggcggcgttgtgcacagattcgttgataagcaacagattgttcgacaggctcatcactcactcctctcccaccggctgcagattgctccccaaagcgaattccttgacgctctggtttttcctgataattcgtccatccaatttcgtggattccggacgctcaaattcgatgatgccgtcggacataacaggcgaccagaatcgggcgataaaatcgtggtcctcgttttcatccggatacgtgaatccatggaacatgtatcccatattccactcgccataaccgtcataaaacccttcgccagatccgaactcacatggttccacatacccctggcactcgcgcgtccccaagaatatgtctcggcgaccgcctttctgaacggatctcaaggcgatattatgatgtttgttttcgtcgcggtcagcgacaagatcttcacgctgatcattccattcgaaatgagccaaaacctgataacgcacgtctttgagatacgtgtagtacgaaagatcattgcctccgctcattttgatgggtcgaattccctttccttcagtctgaactctgttcatcacacgaacagcgtcaataacccacataaaagttggcttccaatagatgctttccgtaatgcctttcaaagcttggtacgttggcacctgatacgaaaatttctcacccccaacacgtgttgctgcttccgagaacaacgcatatctgcctgatacctcatattcaattgagttgcgatgtcgttgcatataactccttcgttaatcgttccctcaaccagccactgtcaatatagcacattttacgcttattgtacatagaactctttgagtgtttctcaatcaacaatcaaccagttattcttgtataagtaggttttcctactgtcgccacattcatggcgtggattgaaaatatgtacaacatgcgtatttaccaaacgaaactctcctgcagattcccatcgacctgcaggagaaccactgccctttcatatcatcaacagagacatgtccgtctctgtcaccacgccatattcgcctttgtaataatctccattcagaacgcaaatatcgaaatcctcgctagcgatggaaatcgcatgtttttcgttcaaaatcttgtattcgtaatcgaaaagggaaaccgtgtattcctgtagccgccgcagaatcgcaatcttctccctcaactcaccgtggcccaacatatccagtaattccatcgcattgccatagggaaccacaacattgtgcgtgattttcggaatcacacgatattcattgccgaccgttttgaacgcctgggcaaaaaacggattgtatctctcccccatcgtattgttctcgaattgcttacgttggctttcgttgtatgccagcaactcataaatcgtttttccagcgttttcctttttccaaagcggaccatccagcaaactattgccgccatctcgatcctcactttgaagcagcatgccataaaactcattgagcatgccagtagaaagcagatcagcatcaggatgctcacccataatctgcagagtgagctttttgcctctgtgaatctctggaagatagtccttgaacctttcctcaccttgcaacggatagacatacacatccttgatttctttcgattcaccattcctgttgcacctgccagccgcttgcataatgctatccagaccagccatcgccctgactacgcatgcgaacgaaaggtccactcccgcttcgataagctgcgtgcttacgcaaatcaccggtttggaatcatgaggatcagttaacacctttattctcgctaactggtctgccctatgtttgccacacatggcagtactcaaatgaatcaactcaaactgcccgtcagcattgagctcttgcaaacactgatacattttgcgcgcttcactcttcgtgttgacgatagacagacaattgccgttccgaagtgcctgctcatatatgatgttcgcaagttcctcgcaactcttgctttcctgtgaagcaataatccgggtacgcttgagcttctcttcgtaaccatcagtattgtcgataagatcaggctcgtctgacagacgcagattctttcgcgccgttcgttccaataaaggctgcgtagctgagcacagcagaatagtcgagtccaatatcgtcgaaagaaaactcacaacttcattaaacggattgatgatattcaatggaagcgactgaatctcatcaaaaatgatgacgctattggccatgttgtggaatttacgaagtttcgtaccacgcgccgacataaccgtttccaagaattcgaccatcgtagtcacgatgatcggattatcccaacgttcagacgccagtttacgttgacgttccttcgcatcttcttcctcacttgtgccgatagatcccgtgttaccggaattctgaaggcccgcggtggagtaatgctccagcacaatattgctgtcagcatccagaccaagcatattccggaatgttgccacggtctgtgacgtaatagacaagtacggaatcacataaatgattcgtcttttccctgtttccaaagcatgatgcaaggcgaaattcaacgaagccaacgttttaccgcctccggtcggaaccgacaatcggtaaatccctgtctctctgctcccagcttgacggcactgttccgtaatctgttgacggattttattgatttcggatgtcgaatcgaatgatttcatgctttcgtcaagacggcgaatcagttccgaccaatccgccttgatcggatgatattgctctttcgtctcaaaataagccgtatctgttctatcggcatcaatcaaacgagaataaacgtatttaactagtaatcccgagtagaaataacgactatctttcgacaatttcagcaatttagttcgtcctgcaaaatcgaaaacatctttttcggcctgctggaaggtgtcttgcaagtcgagatccaaatcatgtagcccctgtttgatttccccatacgcatatttaggattctgtttatctgcttccgtaaaacctgtgagaaaagcctcatcaccgatttcattgatgcaatcaggaagctctccatgatgttttgcaataacaagttcaagaatctctttcacgatttccgctgccgaattcgaaatcggcaggtcattgacgacgaacgcaccctgcctcgcatgaggaatctcaccacgacgtcccttgcctgatatcagatacgtttgaaactgttgcgcgacctttccaacatcatgcaggagcgccgccattcgcggaatctgagaaaactccgattcatagctttccgctaagtcacccgcattgtgaagatggtcacgcaacgtctgcacaccgccatccgcgtccttgtgcgccagcaaagtcataatctgctccttcacagatatgttcaagcacccctacattaccatagcgttacagttctcacgagcattgcaacgaggttcggcatatagagacagaagactttcaagtggaataatccgcatatacgtatactcattggtatacctattcatatctttccattttcaattccaaatggaaagatatgaatattttttgcgttagctacacttaaccgaataagtgtagctaaattccgcgttagccacatttattcgcacatagaaaaaaccggacagcggattcttggaatccacccacttgggcgaacccgttgaatccgccgtccggcggcgcgactgcttctcaagaatgtgtgcttgactcacatggatggtactgagaaccattcgcttaacgatctgtttccgtgcgcgccaaccgcgtaaggaacgcggctgcgcggcacggacacaaatcaagtcttgagtggactcgagccgcggtgggcaacgccacggcggctcgaaagccaagggattactctagccgcagcttggaataatcgcaagccgaccgagcttcgttcagttcaggccttggcaacctccacgctgagctcggagccgccttccttcacgttgaaggaggtggcgagcgtctcggaagcgatgagatccttgaactgctcgaccttcgccacgtcatcggccggcacggtcagcaccagtgcgatgcggtcggagatctgcagaccggcggccttacgggcgtcctgcacggcgcggatcacgtcgcgggcgtagccttcggcgatcagatcatcgttcagctcggtgtcgaggatcacgaagccaccggtcggcagcgctgcggaaacggagttggcggcctcttcggcgttcttctcctccacgctgttgatcagctcatattcgccttcctcaagcacgatctcaccgttcggagtctcacataccggagcaccgttggcgttcacatgccatgcgccggacttggaggccttgatggcgaactgtacgtccttgcgcaggcgcttgcctgccacgcgagcgttcacgcgcagctcgttgataatcttcaagccttgggcttcggcatcctcaagcgtgcacagttcaacgttcttcacgttcagttcggatttcagaatctcgtcgtatgcggccacggcatcagtgttttccaccaccacggtcagcttatgcagtggctggcgcacgcggatctgcttcgtcttacgcatcgacagggtgccggacacgacctcgcgcaccttctccatcgcgtcaaccagagccggatcgtcaacaagcacacggcccagttcggtcgcttcgccggtctgttcgtcggcaaggaacggccagtcggccagatgcacggattcgccaccggtcagaccacgccacacggcttccgcttccatcggagcaagcggtgcgatcacgcgcatgaatgcttcaagcacggtgtacagcgtattgaacgcgttctcatcctcgttccagaaacggtcacgattgttgcggatgtaccagttggtgagcatgtcaatgaaatcagacacggcttcacatgcgtcggaaatcaggaagtcatccagcgaatgctgcgtcttctcgatcagtcggcgggtacgtgccagcagataacggtccatttccggcagtgcggcaacctcatcggcacgcagtgcgcgagcgtcgaacccggcaccattattggcggcgttcgcatacagggtgaagaagtagtacgagctccacaccggcagcatgacctggcgaacggtgtcgcgaatgccatcggcggtcacgatcaggttaccgccgcgcaggatcggcgagctcatgaggaaccaacgcatggcgtcggatccgaaatcgttgaacacaccgttcacatccgggtagttgcgcagatgcttcgacatcttctgaccatcagaaccgagcacgatgccatggcagatcacgttcttgaacgccggcttgtcgaacagtgcggtcgccatgatgtgctgcacgtagaaccagccacgagtctggccgatatattccacaatgtaatcacacgggaaatgctgttcgaaggtttccttgttttcgaacgggtaatggtactgggcgaagctcatggaaccggattcgaaccagcagtccatcacgtcgctgatgcggtgcatatggctcttgccggtcggatcgtccgggttgacgcgcgtcagctcatcaatgtacgggcggtgcatgttgacattgccctcatggtcgcgcggatagtcaccgaagtcggccttcagctcctccaacgaaccgtacacgtccacgcgtggatacttaggatcatcggacacccacaccggaatcggggaaccccagaaacggttacgggaaatggaccagtcacgtgcgttggcgagccatttaccgaactggccgtccttcacattgcccggaatccagttgatctgctgattcagttcgagcagacggtccttgatcttggtgacagacacgaaccaggagctcaccggcttgtagatcagcggagtggcgcaacgccagcagtgcgggtaggagtgcacgtagctcttctcctggaaaaggatcgcgcgctgatcttccggaatgcgctccaacgggccgtcgccggcacgcaggttacgcaggatcggcttgttcgcatcgaacacatacatgccctcgtaatccgggcacagcgaagtgaacttgcagcccgcgtcgagcacatcaacgctcttgatgcccttggcgttgagcgtattcatatcgtcttcaccgtacggagcctgatgcacgaggccggtaccttcaacggtatcgacatagtcggcggtgaagatctgatagccttccggacccggaaccttgccttcgacggcgttctcgtcgcctgcgaagtacgggaacaccgggtagtagcgccagccttccatttcggcacccttgagttcgcgcacgatctcatagttctcgccgagttccttggcgtaagaaccgagcagcggcttgcccagatagaacttcttgccagcgaacttgccttcggtcggacgcacttccacatagtcgatgtctgcaccgaccacaatggcgaagttggtgggaacggtccacggcgtagtggtccagaacaccgcgtaggcgtcttcctcgtcgcgcagcttcacggccacggacacggtggtgtcttgacgatcctgatacacgtcggcatccatgcgcagctcatgcgcggaaagcggcgtctgatccttcgggcagtacggcagcacgcggtagccctgatacgcgaggcccttgtcgtacagctgcttgaacgcccacatcacggattccatgtatggaatgttcagcgtcttatagccatgctcgaaatcgacccaacgtgcctgacggtgcacgtagtccttccactcgttggtgtacttgagcacggaggcacggcaggcgtcgttgaacttgtcgatgcccatttccttgacctgatcgaccgaatcgatgcccagttccttctgggcttcaagctcggccggcagaccgtgcgtatcccagccgaacacacgattgaccttgcggcccttcatggtctggtaacgcggaatcacatccttggcgtaaccggtcagcaggtggccgtaatgcggcaggccgttggcgaacggcggaccgtcgaagaacacgaattcgttctggctgtgatcgccggaaggacggcgttcaatggacttctggaaagtgtcgtccttctcccaataatcaaggacggattcttccagcttcgggaaactggggttcggcgctacattggcgctctgctcacccgcagctgccttcggatacacgttgttttcgctcaccgtatctcctcgtaggttcttgctatctatctcctacgaggacgatggccgtaacgtctgctggacgccgccaccgcggtaccacctcgtttgccgcactttcaaatatacgtgcgaccgcttgtatgttcggctattcgggccttcccgccgggtctaataagtcgctcacgcgaccgttcttccggaagctccccgctgataacggatcatcgctcgcatttcggttgtcactatagcatgcagcgcgaactattttcgcttgttttgcatgattatggactatttcacaataggtttcatgacgattcacaatagctcttatgtaggattacatacaacagaaatgccgatactgacagcccatcagtatcggcattgtaatcgtattttcaatatgtatttttagaacatactatgttcgatcattcggagatttcaccggaagcaagcttggcttcgagctcttcgacaatctcgtcgtgcatcttctcggtgatcttcaccttgaagaggaacacgagcaggctcagcacgatgatgcccagcggcacgtagaatgcgcagaccttgaacatgccgatgttcgcggcggtcatatccgcggcggttgcgtcaccgatcatgcctgcggccacggcgatgaagccgacgataccgttggagcatgcgcctgcgatcttgtcgagcatcgggcggacggacagggtgacggcctcgttacgcttgccgttcttgagctgaccatattcgatggagtcggtcagcgacaggatggcggtcatctgaatgaaagtctgcggcaggtagaagaagaccagaccgacgatgaccattgccagattgctggagccgacggcgaacagcaggtagccgacgatcatgagcaccatgccacccaagtacaggtagcggcgcggaatgcgcttgttcaggatcgggtacagcggagccataaccaagccggtgatgaccgggatgacgcccacgatggagtatgcggcggtgttgtcgaggatgtacttgaacaggtacatgagcacgccggtggtggccacgttggcgatggcgtacagcaggtagctcaaggcaacccacagcagctgatcgttctgggccagagccttgaaggcctgcagcgggccgccgttgtcttcggccttggcacgcagcgtggtggtgctttccttggtgccgaacgccacggagcacacggtgaggatgccgaggatggccacgatgatggcgaagcaggtccagccggactggctttcgacgtacttgccggtgaacacccagctgaagtaggtgacgatcgggatgaccacgatggtcagaccgttgtagccgatggagccgccgaaggagccgagtgcggtgtaggtggagcgctcgtgggagtcggagctcaatgccgggatcataccccagtaggaaatgtcacgcagcgagtagaacacgtcgagcacaatgaaggtgatgatgaacagcacgatgaacagggtagtattcacgttcaccagaccgaacagaccagtgtagacgagcaccagcaggatggcggaaacggtaccaccgatgagctgccacggcttgaagcgaccccacttggtgttggtgttgtcgatgatgttgcccagcagcgggtcgatgaagatttctgcgatacgaatcaccacgaccaggccggtgatgatgccaatcagcttggtggcgacgctcttatcgacgccagagaacagcgagctcgtcacgtagacgatgaaataggtgctcagtgcgttgtagaacgcggactggccgacgttaccgaacgagtacgccacgcgagacaagaggttcccgcctttggaaccgttgttgccatttcccatctttgcttctccttagaagtcagatacaggtccttccttgacctaactatcagtatatccccttacctaaagttagtaaaatttatcactgaacatatcgcctatcggcgtgtcatattttgtgagcttctgttcgaaagatagccaaaaacgttattttttcgccatttacacaacaaaataggcaaactgtcgcattatcttgtggcagcttttaccaaaatcgatatttacgatatgcaaaagcttccacgtcgaaacgaaaccaagccaatctggaaatagcccgattactatacagaagtaaagaaataaccgctattttgccggcacaaaactatcgcgcaccaccagcgacgtcgacaggtacgcatgctgacgaatcgtgcgtttgccggaaatggcatcacccaacatcagcgtcgccacacgcgcaagctcgttctgatcgatggagaatgtgctcaacggcggcgaggtcaactgcgaaatcgtttgattgttaatgctgatcacgctgatatcgcgcggcaccagcacgccaaccgcattgaacgcctgcagcacgccaaccgcaatcacatcggcagctacgatcacggcatcaggcagcacgccattatggtcgcgcacgaattgctcccccaacgcacggccgttgctcacggtgaacaagccgtcggaatacaccaatccgtcggattgaataccgaaacgccttgcctcacgacggaaatatgtggcgcgattctcctcatcgacctcataaaagttcatcaggcagcccttgcctccgatgaatccaacgcgcttcatgcccttggcagcacaggccgcgaccgcatcatgcatggtctgctgcaaatcaggctgcacggaatcgaacagattcggcgccggattcacgtcaatgaacacgccatacggcatggccctatgcagccgctccaagtcctcctcgctgatctggtcggcgccgatcgccatgaacccgtcgaatttggaactgcgagcgatcatatcgtcgagattgtggaacaccgtcatttccatgcgttgctgttccgcattgcgttcgagcgctgaacgcaaatcggtgaaataggagtcccgcaacgcctcgtcggacttttcattgtcaagcaatgcaacctcatgagggatgacgatgcgcttggtctgcacgctatagccgaggtcctcgctcgcctgaatgatcttgcgacgagtctcttcacgcaccgatagggtgggatcaccgttcagaagtcgagacaccgtagcctgagaaaacccggtacgttgcgcaatctctttaatcgtcgccatgtctcgctctccaatttagtaaatcgtttacccatgaaaggataacctattattgacataacgacaaaccaagcgagatttatgcaacgattacgcaagccaattataatcgctgctcatgcagcagtctcatgaacgtatgacggaaccgccttcacggaaggcgggctggccgcagccgaataccatgcatggcaaagacaataagaaatcccttgcttcaaaatcgcaatttcaaagcaagggattttccagaggatccgtgccgttcaaagccaccggccataagggcggtatcagccgacagggatcgaagcgcggctagtgtagaacgctagcgtgtgctcgcatcgctccaattcaggagactattagattattcgagttctacggcacctgtgtagagctgatagtactcgcccttctgcgcgatgagctcgtcatgcgagccgcgttcgatgatgcggccatggtcgagcaccatgatcacgtcggagttgcgcaccgtggagaggcggtgggcgatcacgaacacggtacgacccttcatgaggttgtccatgccggcctgcaccacctcttcggtacgggtgtcgatggacgaggtggcctcgtcgaggatcatggccggcggatcggccacggcagcacgtgcgatggaaatcaactggcgctggccctgggacaggccggagccgtcgccttcgagcacggtctggtagccgttgggcagcatgcggatgaagccgtcggcgttcgtgagcttcgcggcggcgatgcattcctcatcggtggcgtcgagacgaccgtagcggatgttgtccatcaccgtaccggtgaacaggttcacgtcctgcagcaccacacccagcgaacgacgcagatccggcttgcggatgcccttgacggaaatgccgtcatacaggatcatgccgtcctgaatgtcgtagaaacggttgatcagattggtgacggtggttttgccagcaccggttgcgcccaccaatgcgatcttctgtccgggcttggcgaaccaggtgatgtcgtgcagcaccggtttgtcggggttatagccgaagttcacgtcggtgaagcgcacatcgccctgcaggagggtgaggcgaccgtccggtgaggtaatggcggtttcacgggctttcatggccacttcggcggcacgcgggctcaaggattgcgcggccttgagcgaacgggtgccgtcatcgccttcctcgcgcttccacgcccagtgaccggtttcatggtcaacttcggtcatggtgcgtccatcttcgccgagttccacgttcaccaaggtcacggaaccgccgtcgtcctccggctgctcgtccataagcgcgaagatgcgggatgcgcctgcaagcgccatcatcaccatgttgaactgcatggacacctggccaagcgggttcacgaaagagcgggacagcgtcaacagcgagatcagcgtacccagggtgagcgggccagcaccggacaatccgaagttgccaagtccggaaatcgctgcggatccgccgaaaatagccagtagaatgtacagcaggtaacccatgttgcctacgattggcatggtcacgttgccccacgtgttcgcttcggcggaagcttcgaacagttcttcgttcttcttgtcgaaggtggtttgggtggcgtcttcatggttgaagaccttgatgaccttctggccgttgaccgcttcctccacgaatgcgttcacgtcgccgatggcgatctgctgcttgacgaagtaacgtccggagcgggaaacgaccttgcgcaccaccacgaacagaatcatggtgaatgcgagcacgaaaatggtgacgggcaccgacagccacagcatcgacacgagcgcggcgattgcggacaccgcggacgagaacatttgcgggaacgattggctgatggcctgacgcaacgtgtcggtgtcgttggtgtaacggctcataatgtcgccgtgttcgttggtgtcgaagtagcggatgggcagggtctgctgatgggcgaacatgtcgtcgcgaatcttcttcaacgtgccctgctccacggttacgatgacccactgccacagccagctgcagaaaataccagccacatacaggcatgccataagcgtcaacgcgcgcagcaacggcatccaatcagggttggtggcaccaaccatcggcagaatgtacgtatcgaccagcgactgtaggaacagcgacgatccggcctgggccgcggcaccgacgagaatgcacactaccacaagtgccacacgccacttgtattggaaaatgtaaccgaagatacgcttggtggtgcccggtgcggctttctgcatcggcggcttgccgtgcgattgctgcatgccggccgcgttgttgttgtctttggatttcaatgcggaagtttgttcagtcatctgttgcctcctttcactgcagttcctcaggttgagcctgattcttggtttgcgattcgtagatggagcgatattcgtcgcagttttcgagcagttgttcatgcgtgccggccgccatgatgcggccatgatccatgacgagaatcatgtcggattcctgcacggaggccacacgctgggcgatgatgatcttcgtggtgtcgggaatctcatgatggaatgcggcgcgaatcagctgatcggttttggtgtcgaccgcggacgtggaatcgtcgagaataaggatcttcggctttttcagcagcgcacgcgcaatgcacaaacgctggcgctgaccgccggaaacgttggtaccgccctgttcgatgtacgtatcgtacttgtcggggaattcctgaatgaagccgtcggcctgcgcaagctggcatgcgtgacgaatctcttcatcagtggcgttcggattgccccaacgcaggttttcggcaatggttccggagaacagcacgttcttctgcaataccatggcgacctgatcgcgcaatacttccaaatcgtaatcgcgcacatccacgccgccgaccttcagcgagccttcggtcacgtcatacaaacgtggcacaagctgcaccaaactggactttgcggaaccggtgccgccgacgatgccgacggtcataccggaacggatcttcaaatcaatatcgtcaagcaccggcttttcggaagtggcggaataacggaaggtgacatggttgaaatcaatctcaccattcttcacttccataaccggattttccggattcgtaaccgtgctttcctcgttcagcacctggcagatgcgttcggcggaggcctgcgaaataatgcacatcacgaaaatcatggacagcatcatcatggccatgagaatctgcatggcataggtgaccaatgcggtcagatcgccggcggtcaatccaagggccgcattgttgccggatgccacgatctgctgggcacccatccaggcgataagcagcatggacacgtacacgcacagcatcatgagcggattgttgaagctcataatgcgttcggccttggtgaagtccttgaagatgcgctcggaaatgcggttgaacttttcggtttcgtggttttcgcgattgtaagacttgaccacgcggatgccctgcaggttctcgtctaccacgttgttgagcttgtcgtacgtgtggaacacgcgctcgaacaccggatgcaccagtactgccagaccgcacaggccgatggcgagcaccggaatgcaggcgaggaacaccagcgaaatggatgggctgatgcggaaggagaagatccacgccacaatcaccatgatcggagcgcgcacacccatgcggatgatcattgaatatgcgttctgcaggttggtcacatcagtggtcagtcgcgtgatgatcgaaccggtggagaaacggtcgatattggtgaagctgtagccctgcaccttctcaaactggtcgtgacgcaggtttttggcgaatcctgcgcccgcaatggccgagaactttccggccaaaaagccggatgtcagcgaaaccgccgaacaaatcagcagaatcaagccgaatttcaaaattgccggcatgctgccaccgctgatgccctcatcaatcagcgatgccatgacggtcggaataaggatttccagcacgctttccacggctacgaataccggggagagcaggctggcttttttgtattcgcgcagggatttgcccagtgtgcgaatgacgtgttgctttggttttgacgttgtggacgtcgttgcgtttgccgctgtcactccttgtcctttctttttcgtacttacttgcttgcgtgtgttacctgaggttgtttgcgatcgccatttcctgcgacattcgcagtatgcgcgaaacgtattcatcatgagaatcgcgattatgcggattccgtccatcgcatgattcttgcgattcttgcgaaacctgcggcttttgcgaaacctgcgattcgccaaaatcctgttcctgtatttccaagcttgaatatcggctttcgtctccgatcaaacctgttttcaccagattcgtctgcatgacgtcaagcatgtgcatgaattggcggatctggtcgtcatcaagaccttccaacaggattcgttccatgtttttcgcattgtcgtgcagcacttcggcaatatgcctcgatttgtccgtcaatacgatctttttcagacgtgcgtcacgcttcaccgactcgcgggcgatcagccccttctgctccatcagtcccaacactcggcatgatgtggatcgggtcacgccgaaacgttgctcgatgtcttgagggaagatctcctcgttatcatgtcttgccaagtacacgatgatgtcaacgttgccgttgctgacgtcttccgcctcttcgggacgggtgacgcgcaaataccggttgaccacgttgtgcagcgagcgaatggccacgctgggaggcttggtcaggccactttcccagacttcggcaagtcgtgaacctgacggttccttgtattgttcattcgtcacttctgtcacaccacacatgctaaaccgttgcatatacaactgttgtacatgcaacgattagcgtgtcgcgcatctcatcgtccgcgacaaaaaaggccgaggaatcagatccgcaccggttcagcgttaacggatcgaatccctcggccttaagccttgaatcctacgaaactacttggtgagttcagcgtacttctcaagcatgtattcgaagatctgcttgccatcggcgcccatcagcaccgacatgctgttgatcggcatggaatcgaggaacaggcgggtcatgtcgttgtcgggcaccaccggcatgcggccggcttcaccctcggcacgcagaatttcaagcaccttggaaccgagcggatccttacgccattccatgaagttggaccattcggtgagcggctgggccttgccgtcgccgtcgagctccaccaccgcggaaccggcgatgtcacggctggacgtgccgacctcgatggtgtattcgccgctctccacgtgccagtcattgaacctctcagaccagtaggcaaaggcgcgatcgtcgagctcgaaggagacttctgcggattcgccagccttgaggaataccttcttgaagcccttaagctcgtgtttcgggcgaactacgtcggccttgccaggagccacgtacacctgcacggtttcggcggcgtcaacgttcgaggtgttcttgaccactgcgctgacggatgcggtacaggcaccggtcttgacagccttcacgtcgctcacttcgaacgtggcgtagctcaggccgaatccgaacgggtagtcgacggccttgttgtaggtgtcgtaatagcggtagcccacgaacacgccttcgccgtagtcgacatgcccctcttcgcccggccagttgatggtgctcggatcgtcgttgatgtcgaacggaatggtctgcgcgagcttgccggacgggctcaccttgccgaacagcacgtcggcgagcgccggaccgccggactggccgagcagccaggattcgaggatgcccttggcgttcttggcccacggtgccacggtgacgacggagccgttggagagtacgaccacaacgttcttgttttcggctgcgacggcttcgagcagtgcgatctgcttggccggcatgtcgagggtctcacggtcgaagccttcggattcggctgcttcggggagccccaggaacatgagcaccacgtcggcgcccttggcagcgtcgacggcttcggcttcgagtgccggatcggccggttcgaggtcgagggtgaagcctggggcgaacttggcgtccacgccgcgttcggtgagggtgtcgaggaagctggtcatcttggttggggtgatgtgcgaagagccgccgccctggtagcgcggagtgcgtgcgaattcgccgatgaccgtgaccttggcatcgccggcgatcggaaggatggcatcatcgttcttgagcagcaccatggattcaatggccgcctgatgtgcgacttcgtcgtgagcttcgatgtcgaaacgatagccttcgatgctcatggctgcgcgcgtcttgttgaccaggtcgatcatgccttgtgccatgtggtcgagctgtgccggctggatgcgaccgtcgcgtgccgcatacacgatttggtcgtcggtgtagcttggcggcatttcgaggttgaggcccgcgttgagggatgcgacgcgatcatggtcggcgccccagtcgctcatgacgatgccttggaaaccccattcgtcgcgcagcacgtcggtgagcagccagtggtcctgggcggcatgcacgccgttgatgcagttgtatgcgcacatgatggtccacggctgggcttccttgacgatgtgctcgaacgccgggaagtagatttcgcgcagcgcacgctgggagatgttggcgctgatgcgcagacgatcggtttcctgattgttggcggcgaaatgcttgagcgaagtgcccacgcccttggattgcacgccggcgacgatgccgatggcttcatgacccgccaggtacgggtcttcggaccagtattcgaagcaacggccgccaagcgggttgcgcttgatgttcacgcccgggccgaggattacggcgaccttctcctgaatgcactcttcggccatggcttcgccaacctggtggatgagttccggattccaggagctggacagaccagccgccggcgggaagcaggtggcaggcacacagttgttcaggtcgacttcgccggtggtggccgaattggacttgcgcaggccgtgggggccgtcggtgatcatgtagccgggaatgcccttggcttcaacgccctgcagatgccaggcgtcgccgccggaagtcagggatgccttctcttcaagcgtcaggtcattgacggaaggataggtgctttcgctcatacgttcctctttcgcatcgttttcttgagttcgtatcggttaaccgatctgcatgagacctcaactccgaaatctctactaaccggttggtaggtactttatcaaaaccaacaccgcaacacgccaatcttctttgaaaaatcaattaaccgaccgtaaagtaactgcagtatttacaacttgagagaaatgacgattcataagcattgcagcgcacatgaatcgccatcaatgaagggcaagagagggaatcatcatggccaacgaagaagtcgaccgaagggcggagattctcaacgcggccgtcgaactgtttgggacgctcggctattacggcacttccctgcagaaaatcgccgatcgcgtaggactcaccaaggctggcgtactgcattatgtcggcagtaaggaaggactgctcacagccgcgctggacgaagtctacgattccgaaacggaagacattcttaccgacatggtacgtgagccacgaccgttgatcgccgacatgtggcgcagaatcgtggcggtgaacgcacgcagaccgcttcaggtgcacatgttttccacgttgagtgccgaagcgatcgacccgaaccaccctgcacacgagtacttcgccaatcgtgagctgcataatgccgataccgcgctcaatatccgttggcgtgtgcccgaaggcgttgatacgcgtcggctgcttaatgcgggattcgccatgatggatggcgtgcagctgcgttggctgcgcacgcccggtcaggacctgaacgccatgtgggcggaatgcgaagacaccctgttccccctgcccatgtgggagggctaccgctaagcctctgccccggcactgcattactgtatggatgcagacgtagaaggaggcatgtatgcggattttgctggcaccggactcgttcaaggaggccgcttcggctgaagcaatcgcacaggcgatggctcgtggcattaagcgcggcgacccgcaggccgaatgccggcttttgccgctttccgacggtggcgaaggattgacgcacgccttggttcatgccactggcggcacgttgcatgatgttgagacggttgatgcggtcggtcgcccgattattgcgcagttcgggtttcttggcaataagcacacttcccgtaccgccgtggtcgagttggcttcggcaagcggacttgagcaggtctcccctgccgaccgtgatccgatggctgcatccacgtttggcacaggcttgctgattcgcgctgcgatcgacgccggcgcggatcgcattgtgctcggcttgggaggtagcgccaccacggatggcggtaccggattggctcacgcatttggatttcgttttctcgatgcgcatgattccgacattccgcttggtggcggcgctcttgttgatttggcaaggattgacgattcaagagtttccgattccatcaaaaatgttccgattgttctcgcttgcgacgtcaccaatcctttgaccggcccggaaggtgccgcccatgtgttcgccccgcaaaaaggcgcgaccgcaacacaggtcgagcttctcgatcaggggcttgcgaatctcgcgcgcgcaatcatgcaatataacggccgcgatatcgagcacactccgggagcgggcgctgcgggaggtaccggaggtggcatgcttggcctgttcaacgcaacagtacggccgggaatcgaactcgtgcttaatcttgcacatggccgtgaagcgtgcgcttgggctgacgtcgtcatcaccggagaaggttctatcgacagtcaaacgccatacggcaaagtgccaagcggcattgcaaaattggcgcaatcgcaaggaaaaccaaccattgccatcggcggaacggtaacccgtgacccacacaccgtcgaagcgctgaacaaagccggcattatcgcaacattcggcattgcgcccgggccagcagatcttacaacgttgatcgccaacacggaacgcaatgtcgaaatcacctgtgccgcaatcgccagcacattgcgcatcaccgcagctacttcaccctgcgaatcagcatgatgaacaccgcacccagcagcaccgcgaccacagcgatcgggaacagcgccgcataactgccagtggcaagcacaatcgcaccgacaaccacaggcgcaagcacctgaccaacggtgttggcaagattcagaatgcccagatccttaccagcttcttcctgacttggcaacacatcgacgttcaacgcctgatcgacggcaatgtaaatgccataaccggcaccgccgatgcctgcaaacagcatcatgcccaaagcattcggcatgaaacacggaatggccacaccaatcgcgataatcaccgaaccgatcgccacgatgaccttgcggcgctgcagacggtccgacagcggacccgacaccatggacgtgacgatcagcacaaccatggaaatcaccgacatggtggaaatcgtcgccgcggaatcctttacgctcaacccgcagtatttctgcagaatatacagctgatagccggaaatcatgttccaacccaagataagcagcaatctgcccatcaatgccaagtaaaaatctcggcaattcttggtaggaggaatgaacgaacgcagcaactgcttgacgtcgagctttgcggtggcatccgaagactcgacggaagccacagaagcagccgaggagcgttcgcgcggccagatcagcacggtcacgataccggtgactacgaacagtgccgcaccgatcgcaaatccggtgcccatgttttcaatgaatttcgatccgaggaacgttccggcggatgatccgacgatctgcgcaccaccctagaatgcggagaacgtaccacgcacgttttccggaatgcggtcggacagcactgccacagccggagcgatcatcatgttgacgccgacctgcacaatgcaccatccggccacaatacccaccaactgcgcactggagaaggcgagcacatagccggctgccgtaatcagaccacctgccacaatccatggcgtgcgcttgccgaaacgcgagcgcgtgatgtcgcttaacgcaccgaaaatcacgttggagaacagtgcgaatacgcagcctacggaattcatggtgccgagaatcacttcgggcatgcctatgttcagttcggtgaatcgttgcggcagcagcacggccgatccggaagtgcctgcgaccatccaaatcagcgagaagagcacgaagccgacgccgaatcgccatttttcggtggatgtcagtttgcggccgctgtcaggtgcgatatcactcaatactgcggtgcttggctcgcgtgatgcgtttgctgtcatgattccccctttggaagcatgttcttttttgaaatattgaaatgatttgaaatatacgatgaagaaagctttttttcatttttggtatgattgcagtcctgccgacgccgacttttatttgacttcagcttcggcaggactttcgttcatacgatttcacacgattccgtacgattacagcgccatctgcagatgatgcgttcccgcaacaagatcgacgcgctcatggtcgacgatatccacgaatgccgtggttccggcaggtaccgcaaccgtcagatcaagcacattggcgttgacttcccattgcacttccgccttgccatatggggtgatgtgagaggtttcggcatgggtgagatctcccccgatcaccggagcgatacggaaccgcttccagccgggttcaacggcttcaaggccgccgatatgcgcatgcatccattccgccaccgatccgagcgcgtaatggttgaacgaggtcatgccgccggggttcagcgaaccatcggcccgcatggaatcccaacgttcccacgtggtggtggcccccataaccacttggtaaagccagcttgggcattcggtggaggtaagcagcgcgtaggcctcgtcgttatggccggtcatggtcaacgccggaagcacgaatggcgtgccggcgaatccggtgcttaccttgccgccggattcgcgcaccaagcaggcgagtcgattgccggccttcacgcggcgcaccggttcgccgtcaagcagtccgaaggcgatggcgagcgcgtaggcgcactgggtgtcggatgtcatggtgccgtcaaggttggtgaaacgctgcaggaatccatcaatcacacggtcacgcagggcggcgaatcgagtttcatcatcggttttgccgagaatatgcgcgatgtgcgtgccttgcatgcagctgcgtgcgtagaacgcggtggcgaccagttccttttcggtcatggcctgcgtaggatcttccggaggcgcggtcggatcaagccaatcgccaagctgtccgagcggatagtccggcttgcgatcccatacgccatcgggcgaaaggtaccctgccacttcatcgatccaatcacggatcagatcgtaggaatcggcgagcacctgcacgtccccgctttccatgtacagcgtccacggcacttccaccgccgaatcgccccacgtggagatggcttgtggatgcgcccatacgcccaacggcacgaacggcacgtagaacggcacagtgccccacttgacctggtcggcacgcacgtctttcagccagcttttcaggaacccgtatacgtcatacaaataagccgcggtaggcacgaacaggcagatgtctcccgtccaacccatgcgttcgtcgcgttgcgggcagtcggttggaatggacacgaagttggaacgcatcgaccatacggcgttctcgtgcaaacggttgagcagcggattcgatgtggtcagttcgccggtgcgttccatcacggaatggtagacgcggcaatccatgtcggctgcggtcagttctcctgcgaaaccttcgatctgtgcatagcggaagccgtgcatcgcgaatcgtggctcccaccaagcgtcggaaccgttggaagtgtacacatcgcactgctggcctctgcgcaaggttcgcgtggcgatggatccgtccggttccaacacttccacatgacgtaacgtcacgctttgttctgcttcaagatcgcgcatgtgcaggcggatgcgctgcgaacagttctgtccgaagtcaaccagccatatgccacgaccatcttccgtgttgccgatgcgttcgatgctgaccggctcatgcgattcatgcgcgcgcaccggcgatgtttcaggattttcaatacgtgccgggtcatacatgacttccgcgaccggctgccaggagctgtcgtcgaatcctggtttcgaccatcccggctgttccagtcgagcgtcatatcgttcgccttcgcacagatccgagcagacgatcggtccgagcgtcgccttccattggcggtcccatgcgttggaatatatgttctgcatgctgccgtcggcatattcgacctcaagttgcgcgaatacggcaatacgatcgccatagaagttggagtaaccgccatcgaagccgaggcgtccgcggtaccatccgtcaccgagccagaatcccaatgcgttggcaccggactgcagttcgtcggtcacatcgtaggtgaagcattccacgcgctggttgtagttgctccagcctggtacgagcgcgtcattgccgactttgacgccgttgatttcggcttccacaagaccgagtgcgcttagatataggcgtgcgcgtttgggttgttccttcagttcgacttcggtgcgcactaatggcaggtgacgatggtcagtttcggattcgctccacgatggtccgacgaaatcggcgacatgctcatgttcttccaatagtccgacttcgaaatgcagggttgtgctcggtttgcccaatggctggtgacttgccgaaacggcctgcatggtggcgaacacttcttcgcgtgaggcgagcggcgcgaactgccatggaataagcacggaagtgtcagtgggcaggtaggtgcgttcttccacaggttgcccgccgggaacacgtcgtgtcactttgagcaggatctgcgcgtcgattggcagcatgccggagcacacccatgtcatgcgtggggctgcggtggcgatgccgagcgcatctcccgggtagtgttccacggtgaagctgatgatgtcaagatccgaagccagcgtactgggcacaatctgcggatcagtaatggccatgatgacccctttgtctacaaaaataatggatcacttgtttgtgatggtgggaagccaaagtccgagccatgccgcaaggagagagaaacgaacggcgacgatggctgggactttggctggcaatcgcaaggtattgcataactgacttgcgattggagatattgagttgttatgtgattgctgttgctaatcaggctgcgatcttgcgtgcctgacgttcttcgtcggtgccgtacttcttctgagcacggatcatgatggtaccggcgatgccttcgatgattacgatgccgaagaagcaccacatagtggtctgaatggtttcaggaagcaccagagccggggtgatgagcgcgaacaggccacagcacaggcgggagaagccgttgatgaagccctggatggaggcgcgaatctcgatcgggaaggattcctgggtccacaccttgtacagtgcttcgcctgccagcggggatccgaggttcatgaaggctgtcgcgccgacgatgacccataggttcgcaccgcccatggccatggcggccatggcgatcagcgagatcacgatgcctgcgaagaacgccttgttacgatatttgccgcctgcgatggacgcgaacacgatgttgagcacgagcgtcacgaagttgaggatgatgcccaagccggtggccagggactgggcggctccggccttggagaacatgtaggtctggaactggccccacgtgttggccagcaggttccagccgacgtagaagatcacgatggcaaggaagtaggtgagcagcaccttcttgtcggcgccgaacagcaccttggtcacggaaaccttgccgttgactacaacagccggacgtgcggcgtcacgaacgtcggcagcttcatggaagcggcggaaggtcggagaaagcagtcgccacagccatgcgatcacagcgaatactgcgaggatggcgaacaccacacgaccaccggtgacaccctgcatggcggaaaccaggaacgcgcaaatgaaggagatgaacacacccacctgccagaacacctgggtggcggagacgagctgtgcggcggtggcctcgtctggagcatcatgggagacgatggtcatggaaaccggcagatccgcgccggaagccaaacctgcaatgatcaggccgatcagcagtacggtgaagttcggggcgaacacgcagatgacggcaccgatggcgtagaacaggttgatccagttgaaaaacagcacgcggccgatcttgtcggccaagcggcctccgaacagcgagccgaaggcgatggcgaaggtcagaataccggaaagcaggccgacctgcgtggtatcgagtccaaggccttcctgccagaccacaatggttgccgacagaccgacgatgatgccggatcccagcatcgatccgatgcctgcggcgaaggcgagcggcatgtattcgcccaatcctttgcccttcttggttgaagtattcattgctctttccttactttttcatacttgcatgcgtttttcacacaagtatgtccttcttttttcaaatggttttcactgcgttttcaaattgccgaggcatctcctttgatctgtccagcattcagaaaacactgcgattccattgttttatacaccagaacatcctgccgtcctcagcagcacctccagtgatgttgtagttgaaacactacattcgtttttgaaaatttcaaaatcgtcgcgcgtttttcaatatacaatttcaaaagagagcgcgtagactattgatacatcaaggaataaccggtttatgtacgaacaggagcaatctcatgccagcatcaaaacgtgtgggcgtttccgacatcgccaaacatgccggcgtctccatcggcaccgtatccaactatctcaactaccccgaacgcgtgtcggacaccttaaaagagaaaatcggcgcaagcatcaaagaactgggctacaccccccgcagaaacacgcttctcccccagcgagagaacgccggaccgcgcctcatcggctatatcatgaccgatatcgaacattccctgttcaccttcatccatgaaggagcgcaggaggtctgcgaagaaaacgacctgcagcttatcgccttgaacgcatcatccgacgcgcaacggcaaaacgaactggtgaaaacactcatcgacatgaacgtggccggaattctgctcagcaccatatccgactcccccgaagacgtggccgcggcacgagcggccaacattcccatcatcctgctcgaccataccaatccccgtcacgccgatcaggtgtgctgcgtgcttgaaaacaatatggcggccgggcagatcgcagccgatgaactcattcgcatcggatgcagccgcatcgcgttcgccgcacactcattcgactatgaatccgtacaagatcggcagatgggcgtcgaaaaaaacattgcgcgcacgcatggaagcacgcaattggaactcatcaattccaaaggtctgatgtttgaagacggttaccagcttggcctggacatcatcgacacaatgaagcgtagcggcctggacgccattccagacggcatcatcaccgtctcggacgcgcttgccgccggcgtgctgtcggcattccatgaccataacggcccacgggttccagaagatgtttgcgtcatcggcatggagggggcacggttggagaccaaatgccccatgtcgctgaccgtagtgaacgcgcccgctatcgacatggggcgcaaggccatggcgcagatgctcgactacatcgacaatcccgccgcacacgtgcacagcaccacgcttatcgagccgactctaatccgacgcgaatccacacgcgcataatcgcatgcggaacactgctagcacagcccaactcgacgcaacacaacggtaaggtgggtctccttacctggcgaaacccacccttactactattctgcagcgtttgaaaatttcaaaccatcagactgcggcacgggacttgtcttgcaagtcaccgaataccggtgtggccgaaccaagtcagtcgcgctgttcctcattgcccatggcattacctcctaccgccattcatcgtcgaagcggcatatcattcaggctccgcatcctcacggagcaacctcacggaatgatagactttgtcccgagggcaaggtcaacacgaacagtgaagcccacgacaaggagacaatacgtggccggcgatgatgacgagctgctgacgattggcgaagtggccaaattggacggcatcaccgccaaggcgttgcgctattacgatgcgcataacatcttgaaaccagccgcggtagacccggctaccggttaccggctaccggctaccggctaccgactaccgactaccgactaccgatactacacccccgatcaaatgcttgacgtcgatgtgatgcgtatctgcatcgccgccggcgtgccattggattcgttggagaaattccgtttcgaagacggttcgcttgattggcgagcgttacttgccgcggcgcagtcgcaggtggatgagcgcattcagcaattacgacgattgcagacgtcaatcaccgattattccggggaattggtacgcaaggccttctcccccgaagatgggttggtgcgtgccgatttgctgccgacttggctggttgcacgaccttgcctctacggtaatgtttgcgatataaaacgatatttacgcataatgacgtcgttgcgtaccttgattcgcgatgcgcaggcaccgcatttgctgcgcagcggcatactgttggatttggtggaatgcaaggcgttcgcttttcaacagttcgcgccaacgtagcgcatgcttgatattttccattccggcgatcgttcgcaagtaacctacgattaccactttcccactggaaccgttgttatcaatcctcccggaggtcctgcggaaagtcacgtaatcgagcgtgaatcgttggcgtaatgctttgaggatggcatggcgttggctgaatcgctcgacgctgaggattggccgcatgtcaccatgactgagatttggggcagtcatgccccaaatggttcggcttgcaggctactcctgagcacgcttcaccgagaagcggaacatgagcaacgccagaatctcaccgcatacggccatgccgaagaacacccacatgctggtggagaagccagccacataagcgtcagcctgctgcatgccggcattcacgttggcggccgagaattcggaaatcaacgtggatgccacagccgtgccgatggcgcctgcgagctgctgcatggtattcatcaccgcggaaccgtcggcgttcatggaagacggcaactggttcaacgcatgcgtctgatcgggcaccagcacgaatccggaagcggccatgaacagcgcgtatgccacggcaatggctccttcgtgcgagccgccaagcatcatcgccacatccatcaccgccacgccaacaaaaccgcaggcgatgaacttcggcgggaaatgctctttcaacgcgccgccgatcagtggagccgacaccgcgccaagcacagcgcccggcagcaaaatcaaagcggccgccatcgacgtatgccccaatcctcgctgcagcagaatcggcagcaagaagttcacaccaagcacaccgccggaagacatgagcagaatcaccatgccgagcgtgaatcccgaatatgcaaacgtacgcacttccaccaacggatgagccatacgcaactgcaatacggcgaacaccgccaacaccacaatggcaccgataagcacactccagaatcgccaatcgccattccattgcgcgaagaaactggccgcaacaataatgccggccaagccaacagccaccaacagcagtgatggcaccgacagatagcccttctcaccgtgacggatgtcaggcacggtagccgcgccaagcacgaacgaaatcaccaggaacggaatcatggcatagaaaatccaatgccagttcaggaattccatcaccaatccgccgaacaccggcccgatggccggagccgcgcacgtcaccaaactcaccaacccaagcatcatgccgcgcttgtggaatggagccttgtcgagaatgatgttggtcagcagcggcagggaaacacccgtgccgagcgccatgatcagtcgtgcggcaagcagcatcggaaagttcaatgcgagcgcgccgacgagcgttcccacggaaaacagcgcgatggccataacaaacaacgctttggtcgggaatttgcgcaccatgaacggtgacgtcggaatggccacggaaagcaacagcagatacccggtggtcagccattgcaccacgtcggcggaaatcgcaaactcttccatcaacgccgaatatgcgatgttcagcgaagtttccgacagaatgccgaggaaggtgagaatggcgagcgtcaccaccacgatggtgagtttgccttcgctcatacacttgtcgttgattgcgccgctttgtacgccgttggtggcggaaaccgtgccgttttcggcatgttcgatgggtatgtctgatggtgcgttcctcttatccgtagacattctgctccttcgatagaaaggttgtgtaatagtttttgcttcgaaattgtcgacgatattcgcatgccggcgcggctacagtttgcgccggcacacaccacacattacgtaaggcagaacattatgtaaggcagaaatgttacgtgaaattgcatgagccgcctacgatcagcatttcgtaggcggctcatatcagtctggcgtgtcgattatcgagttctgcgacacggtttattttggttgcttatgcgacggtgaaggtggtgcgcttcaggtcttcgcgacggctggagtgaccgataagcacttcgaattcgcccggctcaacgattcggttagcttcagaatcgacgatggtgcaatcggaaaccggaatatcgaaggcaacggtctcgctttcgcccggttcgagttccacacgctggaatgctttgagttcacgatccgtccagctgtaagaggtcacgatgtcgccgatgtagagctgcactacttccgtgcccttgcgatcgcccgtattggtgagggtgatttcggcatgcacggtgtcggtttcgccgaatgcgccggattccggaacgttggtgaccgtcggttcgccgtattcgaacgtggtgtagctcaggccttcgccgaatgcgaatgccggatcctgtgtgaggtcggcgtagcggttgccgtgctggccgcgaatctggttgtagtagaccggcagctgacctgcatggcgtgggaaggtgatcggcagtcgtccgctcggctcggtttcgccgaggatgatttcggcgatggcctggccgcccttcatgcccgggcttggagcccacagcagagccgaagtgccttcggccggtgtttcgtcaacaatcacaccgttggtaccgatcacggatgccggcagcacctgcggcttggagctgacgagcaccaccacgaacggcttgccggtttcgcgagccacgttcgacagcgcgtcgatcagtgcattctggccgccgagcagttcaagcgtagcggtggagcagccttcaccaatggcttgaatcacatcacccaccacggccacgatcaggtcgctttggcgagcgttttccacggcttcatcgagcagtgcgcggtcgagcttggcggaaacgccgatcttcgggcgaggctggccatccgggtagaactcgccttccggatcaggcaccaaatccacgatattggcaccgcgggagtacacgacctcgcagccttccggagagagctgcttgaagccatcaagcacggtggtgatcatctcgcgcgggtggccgtcaggcatccagttgatctgaccggagctgcccgcccagtcgcccagctgagtttgcgcatcgtcggcaagcggaccaacgaccgcgatacgcttcgcgccagccgcattgaacggcagcgaaccattgttcttcagcaatgccacggcttcgcgagccacttcgagattgagctgctggtgttcttcggagccgatcaccgcattgatgcgttcctgatcaggcagacgcggatcttcgaacagtccaagacggaactttagtgcgagaatacgagccacggcggcatcaatcaacgattcgtcaagcagaccggtcttcacggcttcgatcgcaccctcgtagaacttcggggtggtcatcaccaagtcgttgccggacttgaccgcgtcagcggcggcctgcacatagtccggcttaaccttctgctcccatacggaacgtccgacgttgtcccagtcggtgataagcgtgccctgatagtcccaagcgccacgcaatttgtcggaaagcagccacttgttgaaggtgaccggcacgccttcgatggattcgtagccaagcatgaaggtgccacagccttccttggccacgcgttcgaacggcggcaggaaccaggattccagcttgcggtggctcagatcggcttcggaagcgtcacggcctccctgggtttcggaatagcccgcgaaatgcttggcgcatgcgagaatcgcgtctttggcaagcggctcgcccgccttggcaccaccctgatagcctttgacgatggacgatgccatttcgccgatcaggtacgggtcctcgccaaaggtttcgcccacgcgaccccaacgggtgtctcgcgcgatgcacagcaccggagagaacgtccaatgcacgccggtagtcgacacttcctcggcggtggcacggcccgcggcctgcactttttcggaatcccacgtggtcgccatgcccaattgttccgggaaaatggtggctcccggccagaaggaatagccgtgaatgcagtcgtcgccgatcaccagcggaatgccgagacgagttttggtgttcaccgtttccacggctttcggcaggtcggacggtgaggtgtgcagaatggaaccaacatgcttgttgacgattagatcgtccaagtcgccgcttcgcgcgtcaagttgcatcatctgtccgactttttcctcaagggtcatacgaccaagcagatcggcgatgcgttcctcagtgggaagttccggattcttatagggcagatttaccgtattttcagtggtctcggccatggattgctcactttcctcattgaagcgatttcctttaattaccaattggtagtttaacacgatgcaggcacgcacgcaactcaacatgaccataccaacacagaaggcgaaaagcccgtcagccccctcgccttctcacacgaatacatgcaatgcaatcttaaataatcagcgatatgcatcccataatggagcgggaaacagcatgttttccatctgagcccactctttgcacaaatcaacttcaggttcgcgcaaccaccataattgcacgccatccatgatttccatggccttacgcaccaccggacgcatgctcgacttccacgaacccaattgcggaggaatcagccaaggatatcgcgaataatgctcccaaatatcgtccatacgggcagtgaattcatcatgcaacggatgatcaggattcaacgactccgcagaaagcacggtaaacaactgcaccatcatgcgacgacgcgaattatgccgcaccaaataacgcaaatacgcaggaaatagcggcgcagtaggatcactgccaggcatacctgatgcaaagaaatcctcaggagtgcccgtctcaccgtaatattcgttgaataccatcgccagcatattgtctttattgcccacgtaccggagcacaccctgcttggagatgccaacacgatcagccacatcctgaatggaaataccgttgaacccacgctcgctgatcagctgcaccgcggcatccagcacttcctcacgccgctcctgcggtgattttcggatacgtttcggagtctcttcctctgccatgattccgagtctaatgcaccttatgtcgattgccgttgattgactgactatggcatgtcatcgtgagaggtatccgcccgaatccatccatgacgccatacgcgagtcagatcccacgcctcaagattgccgccgttgcgaggatcccgcggcggtttcccttcgccactacccggtttcgcggagcgcgcaagctggtagctccaatagatctgtcccgccgacacgtcccatgccgcgcgttgcaatcgtgacacttggcggtatgcagccgatcggttttggctgtgtagggcccactgattctccacgcaccactcgcccaccagcacgggaatacgacgagccgccgaacgaatggcgataccactcgcgcccaccagcatccggtacagccatggcagtcgccgcgatcgcaggtacagccggcgtgccggtcccgaaaacaacggatcctccatcgcgatgagatactgatgggtgtcgagcatgacgttgcgcatgccagcacgacgaaaccaaccgccccagcggagtagtcggaaaccgtcatggaatacgatcacggtttccggacgcagcacggcgcgcaaccgggcgtaagcgtcgcggtagaaacgcttcagaaaccgcagtgagacatacgtgctaccggaagcctcatgagagtctttcgccgtgttcgacgtgctatggaacaccgaccagctcactggttcgttgagtacttcgatgctgtgcagggccggttcgtcgcggtatcggcgagccaatcgctccagcacgttcagcgtgtactccaccaagtccgtattctgcgcccatttgcacacacccgtcagaccgccgttgtcgaaaccattctgcgattcgggaacggtatgcaggtcaatcataatcttcaatcccgtctcccgcgcccaacggaacgcgcggtcgaggtacgtgatgcagcccggatgcccgggccagtcgccgaagatgaaatacggtatgggaatgcgtacgaggttgattccgtgaccgacgataatacggaaatcctccagggtgatgtaggtttcgcggtgccggcgcagttcctcggcgagattccgttcggaccagagggatacgtgcgtgcggtgcatccagatttcatcgtcttcggcgctgcgggtgaacggtttcggatccatccatttctccagcaccagccagttgccgaggttcacgccgtcgattcgctcatcgatgcctagcaccatgcgtctcaccgcccttacgctcgggggttgcccgacttttcgtttccgtccatcacaacccatggcaaaacccattcggcccaatgggccaaggaaccgtgcgtcattcgcaacattccttggtccattgtatgtgccccgcgagcggccacacggccgcccggaatcggatcacgaccggatcagggtcgttgaatgatcgtggtggccgcccgggcgggatcagtcgacaggcttcgtttcgtccgcctcataatcgaagaaatcaaaatcggcggtcttctcatgcagcgaagcatcagtgacggcaataccgaccatagtgccggtgaactcaccgaacttgcagtattcgtcagagaacgtggtggtatcgaaatccggaccgatcttggtccaattctcgccatcataaccccattcgaaccaagtgcgacggccctcaatgttcaaacggaagtaaatcggcttatcttccacggcaacacgagtgtcaagcatttccgtcttttcgccgttttcgagacgcacgatcgaaatcgcgctgccgccaagcgtctgcgaataatacttgcgcaggaaaatgttattcatgttgtcgtagtagatggtcaagccagcgctgtgctggtagacttccggctcgaactccatcttggtggtcaccgtggcatacacgctcgtcagcttgcgagtaagcaggctcgtacgattcagcgaggcaagcgattcttcaccgcgaacacgcagccagcccgggcgttccgtagcattcgcaaacgtgctcggcatctgacgcggcgagtaataccagttgcccaattcgccgccatcaaagtcatcaaagctcggaatctccggcatcggcacatccggcagattcggtccctcaacctcaatcttcgccagattggaaccgtcagccatacgcagccagccatcaggcgtccactgcatcttctggatagcggtttcacggccaagcgtgcaacgcaattccggcacaaacggacgactggtcaaatgcaccagataggtttcgccattcggcaggtcaacatacgagccatgcccggacttttgcagcacggaatccgggttgaaatagcgcggcttcagatgatcgtcatcggcacgctcgttcgactccttcggctgtgacgtaaccagcgggccattcggatccggctcgtacggaccccacacattgcgggaacgccccatggtcacggaatggttgtagccagtaccgccctcagcgcacataatgtaataccagccgtcacgcttggtcagatgcggagcctcaatgcagccacgatcagtagcaccacgccaaatacgcttcggatagccgaccacatgtttggtttccggatcatattccacgcagcagatcacacccggcttctcgtagccttcgcgggtctcccactccaagctgacgatgtacttcttgccatcatcgtcatgcagaatggacgcatcgaaaccggaggaagtcaaatacaccggctcgctccacgggccttcaatattcttcgacttaataagataattattcacgtcgaaatagcgtgcattcatggaattcataacaccataaatcacgtagaacatgtcctcttcctcacaatacgtgaggcatggagcccaaatgcccttagcgctcggcagcttggtaaggttcggattcgtgtcatcggtaagcacatgggtaagcagctcccaatgcttcatatccttcgaatggtagatcggaatgccagggaaccattcgaatgtggaaacggcaacataatagtcgtcacctttacggcaaatggccggatcaggattgaagcctttaacaataggattctgcagcattatctctcctttgatttctgcttttcttttttcgttttttacttattgcgattttgctttagttattgcggcgcccgccgcttactgcagtgttatttggttactgcagtgtccgccggagtctgcgatgctctattgctgacacgctccaaggccgctctggccagtctttacggtctcaacagagcatcgcagactccggctcgtaacgcttttgcgttacgttgcgttgcacttacgttgtgttacgcaagttgatgtttttagtgagtttttccttttttaaaggatgggagggagggggaaccaggattgggctatgcagcggcctaggtcccaagagtcccagccgatccagccaggggtgttgaccgtgtcggtgagcagcttgtagttccagtagtagaagccgctgccgttgctccatgcttcaagctgcgacttggcaacgccttggtagagcgcacgcttttcttcggcactgagcgtttccgcctgcgcaccttcctcgccgttgagcacgctctggccgccgtgggtgtccacaccacagccgaccgagttgaacaggcaccactcgcccacaatcaccgggaagtattcgctcatttcggcgaccatcggagcgtacgtgttgcgcacgaaatcgtcgtagccttccacggtctgcgggcaacccatcatttccgcggccatcaagtactggtgggtgtcgaggatcacgttttcgaactctgacgcaagcttgccatctgcgccacgcatgaagtccttccactgttcgatatcgaatccatcatggaataccacagccttatcagtcggcaaagcacccttgtcgacgtcgcgcaggcgacgatatgcggtgatgtagaagttcttgagccagtcgaattcaatcggaccggtgccttccgcaagttcggcatcgacggccttgtatcgttcggtcacgttcatcatcggccaagacgtggtggtgttcggctcgttgatgatttcaatgcccatcagcgcttccctattgccataacgcttggcaagacgctcgagcacactaagcacgaattcaacctcttccggcagttgtgcccacttgcacacaccggagatgccgccgttgtcgaagccgttctggctcatcggcgcggtgtgcaggtcgatgaggatggtcagaccgtatttctcggcccagttgaaggccttgtcgagttcgtcgatgcagccgatgaacggcgcgcggtcgccgaagatgaagtacggcacggggatgcgcacggagttcagtccccacgatttgatggtggcaaagtcgcgctcgttgatgtattcggcgcggtgggtcctgatgcgggcctcgtagacggccggatcgagttgcgtcggcagatagtattcgtcatcggcagtggttccatcgaataatgccgggttcatccacttttccagaaccagccagttacccaggttcacgcccttgatgtaatcaagatccatatgcactccttcgtacgtcatgcagtttctattacttagtaactacttagttatatcgtaatacatttccgttccacacgcaacccaatctcgtcggcatcccatctccgccatcgacctttatatttgaatatataagatcgattgatggaggtgccggaatgcgatacgtgatgcggatcttcgacactccgctgctggagttcgaggcatcctacggcgaggggctgcaggccggctgagaaggaacgcacgacttccccatgccgtcgattcccacaagataacacgccgatgaggaactttgaaacagacacccccaagtacgtcaaaaccaaacacccctacatctggacataccaatgaacaattcccatatgaccactagcatgaggggagacattatttataaagcataaaagaaggtccgttcagatggagaagccgagcgatagtaagaatagctccatatcagtgaattattttttgaatagtgctgcatatagcggacttttctcccttctttcggttatccttaccggtcaagtttctgcaacgtcatcactatgtgttggattagcacttggagttttatcccttttttctaggggcagtactgtttttataggtggcttgattgagcgttcatcaacggtatccctcactgagaccggtttcggattcatagttttttcacttttgctgctgcagccggcaatgggtggttttatcggcttcctttttttggatttggctttgctgggacttggtctctcactggttaattttgctctcagagggcatatcatcgctagagtaaaggataaaaagtctcaggccgctttgtttgctttagtgaccatgacagccaatcttggatccgcaattgggcctctagcttcaaattacatatataaggctttcggacaaacgctctttgttatagtcatcgtcggactctatgttttttctgctttactaactccaatagtgctgactcatcatgtcttcatacgcaatgagaaaagcagcaaagaaaatacctcttccatcgtgaagaccattacagactcgttgaaaagtcccggtacggttcttgccatcctggcggtgtttgtgggcagcataatgaatggtcagctttttgcgggaatggcattggaattccactcgttatccgatagcccagtcataagaggattgttctattccattgatgccatatcggtcatagcactgcaaatgcccgtgagtaaactcatctcgcgaggcatggctaatgggcagaatgccacctcattcatcatcaaaagcctagggatttatggaatttccttcgcactattcgcctgcggagtctcgtcgtactggtggatatgcattatatccttggctgtgttctccattgcagaatgcatctatgcgccattaatcaatattgctctggtagaggcacagccagataaacctttggtggacattttgaactatcggctgataattgcagccattggcgaatcggcaggctcattccttggcggttggatcgttccggcactacgtcctgcaggaatgacagcttggtattggtgcgcactggcgttggtgggaataatacccgcagtcgtcactaatcaaattggaaaacgcgggcaaagaatcatccgtcactaaaggagaagtcacatgcatccacaaagattattcatacttgagaagatattgacaaatgcccttaaacatcccaatagcgaggctgttaaggatagcaatggaacttttacatactcgcaattagttgaacaagccaaacgtatatcaacacaaatagaagagcagcatctttgtggctcagtgataaatgtagatgtcggtagatgtaaagaacgagtggtcgttctactgggaattttaatgtcaggatcattctatctcccattagaagaagaatggcctgaaaagcgtaaacaagtagtctgcgaccaagcacatatcagcgcaagtgcgaagttaaccgaagactctactcttcgaatagtcccacagctcaacgatggaagccgccctaaaaaagaccctgtaccttcaggtggtggatatcttatttttacttcaggatcaacaggaactcccaaaggcgttgttattaccgcatcctcattggattacgtacttaaaaacagtattgaacgttttaatgtgtccaatagtacaaaattactagccgtagcatctcccgcattcgatttctctattttcgagctgctactacctcttgtagctggcggcactgtttgtatcgccgacaaatcaatacccaaaaatccagattattttgaacagactactaaaaaatggcagattaattgttttaccggaacaccaactatgtttacgatgatgacaatgggaggttggataccccaaacggacgccactctgatattaggtggcgaaaatgtgccaaatctactactcaaaaacttgagcacagccaatcaaatatggaatatttacggc

SEQ ID NO: 877 - DNA, 940 bp, Unknown
  gut microbiota DNA sequence
agcgtactggggagctatatgtcgcgggccctagcgttggatttggttatataaataatatcgaattaacaaaaaataaattttttaccgataactctactggctttcaaagttatagaacaggcgatctcgtatcactaacacctgctggggagatatccttcatcgggcgagctgacaatcagataaaaatccatggctacagaattgagacagaagaagtcgaaaaccatataaacgcttttttgggtggtcatgaatcctgcgtgagcgcgattaagtcagattccgaaacccggcttgtagctttcttgcctaaaaacgctctccaatctccgattgatagtatcgacgccctcagaaatcgcttaaatcttgtactgccaaactacgcaattccctcaaatattttactgctggacgaactgccaattaacagcaacggaaagattgatagaattttacttaaaaacaattatttgaaaaaaatgagcatacgtaattgcaataataaacttgcacagttacgagaattgaaaaaacctacaatgactcaggttttatctaatttattggacgaagagattgatggcgatgacaatctttttgcccatgggttgaatagtctcaaagttgtacagttcgtttcgaggatgcgtcgcttaggccaatttctaaatgtacgagatgtttaccaaaatcctaccgtaaatcagctgaaaacagtcattattaaaacagataacgcatttagcatacctaaaacctgtacgcccggtcggaaggagttcagagtccttccatctcaaagacgatttctgagccataacataactacttcacatagctttgtagaaagtgttgcagttagcgttcaaatgaacaaaataattaatctgcaagtttgtactgaaatgctgataaaaaagttcccagaaat

SEQ ID NO: 878 - DNA, 16375 bp, Unknown
  gut microbiota DNA sequence
cgcgccggaacccgtcgtcgtaacgtctccttcgatcctcacgcatacgaaagaaccgcacctccgatcatcgaatctgaatttcttcagtccaacaatcggggtgcggttcactttcgataaggcaagacgggcatcatattttttgaggatttttcgggggtatattgccgattactcgccaagacggcgataatcccaacggtcgaaatgctcccaaaccagcatgagcacgccgatgaccgtacccgcttcgcagacggtttgcgcgcgttccgcgtcgatgccgaatgcgataagtacgatgcagaccaccaaagcgatggcccatagcgcggtgccaaacatgaataccttgcgtaggtcgacgcgcaccggtttcggcgaaggtttcctcacgctgggatcaataatcggagcaatcttcatatcgccacaccttaccttgcatcagagatgttccaccacgtagtcgatacagcgggtgagcgcatccacatcgctgggttccacggacgggaacacgccgatgcgaagctggtttcggccgagcttacggtatccgttggtgtccacaatgccgttttcgcgcaatgccgccaccacttgggatgcattgatgccatcgttgatatcgatggtgaccacggcgttggagcgcgcgttcctgtcgtttacgaacggggaggcgtaatcggacttctccgcccactggtacagcagggacgcagaccttgcgcagcgggccgaagcccaggcgagcccaccgttgtcgttgagccaacgaacctggttttccagcatgatcagcgttgccactgccggcgtgttgagcgtctgatccttgcgggaattctcgatggccgaagtcagggaaaggaacggaggaatccagcggcgtgcgcccggaagatccacgcttttggcgatgccgtaggcgcgttcgattgcagtgggggagagtacggcaatccatagtccgccatcggatccgaaagctttttgcggcgagaaatagtaggcgtcggtctggctgatgtcgaccggcagcgcgccggcgccactggtggcgtcgatcagcgtgagcgcaccctgctccttggtgcctgcgatgcgtttgatcggtgcggcaacgccggtggaagtctcattgtgggcccagcaataagtgtccacgtattccgtgagctcaggcaggcgatatgttcccggctctcctgcgaaaatctccggctcctcaaggaacggtgcggattgcgctgacttggcgaacttcgagctgaatgagccgtacgtgccgaatgcggccttgcgggtgatcagcgaggcgcaggcgatatcccagaacgcgctggctccgccgttgcccagcaccacttcgtagccatcgggaatctggaagaattcggacagtccttcgcggattgagccgaccacctgcttgatgggggtctgtcgatgggaggttcccagaagattacgggctcccttatcgagcgcttggatttgctccgggcggattttggtcggccctgagccgaaacgtccgtcttccggaagcacgttggaaggaatggtcacagtgttcgtcatgacaacctagggtagtcagatggtcggattgtgcgtggtgatgaccgcttttcggaaccatgacgtggcgatgatgactgcgatatcccggtgtcggtgtagcctgagcttccgtgacggttctgtaaccacgcggtcataagcctgctgtggttgaagtaatccgcaaggagtgttgatatatgaggcatgcggcgcataaagctgccaaggtttcgaatgagcgtttcagcgttgccaaggcgctgttcacctcgagccgcggttcccacaccgccaaggccgttcgtatggtccagctggcaaatggtgggggtgccgttgtaggtcttgagcctgcggttgccgaaaagctgaatgaagtggctccgatgagccgccgcgccatgcgtgaagccgctcgtgcggccggtcgtcgctccgcattcatggcttccgcatcgctggccgcgctggtcggcaccgcggccactgccatggcggtcggccagcagaatgcgtctgaaatgacttttgccgacaatgccgccactaccacgcagatgaagcgtgtctttgacgatgcggcatcccgttccgagtcccgtagcgatctagacgctctggcctccaccggcaatagcggtgattggcagcttggcgaaaccagttcctccatggacacgaatcttctgtcaaagtccattgccgacaatcccaatgtcgccgttctcatggatcaggacgccggtcttcttccttcgggcttcaatccgaaccacggcaccggtgataccggcaatgactatccatacggtcagtgcacatggtgggcgtatacccgtcgtgcacagcttggcctgcctgccggaagccattttggtgatgcgcggagttggggtgattccgctcgcgctctcggctattgggttgacaatacggcacgtcacgttggcgatattgtggtattcgctccaggccaaatgggcgcggacagctattacgggcatgtcgcgattgtcgaaggagtgaatgccgacggttcgattaagatttcggaatccaacgtcaagggtcttggcgtgatttccgatcgtacgttcactgcgcaggaagcttcgcagttgacatatatccattactgatttctctgttttcgttaatctgcgcttgccgtcacttttttggcgtagcgtgattgcgtcggcgtgtcgcgtgatatgacactgttctggttatcttgctgttctgctgcgggggaacgtgtatggtagcttcagacacgatgaatattgctaaacgtttcacgagtatcttcgccgttgttgctgtatctgccttgttgggtgcggcggttcccgccgcaagcgcaggcggtgctatggctgataccacggtaaccgctacacgttctttcccgaagaccaccgcggccaagcgtgattttctcgccgagcacacatccacggatgttgaatctaacgccgattggggtggcatcgaaagcttggatgttccccagaccgagtctcaggcggaaaaggaccagaaggctcaggagcaggctgaggccgaagctcaagcacagacggcccaagctcaggcacaggctgaatctcagtctgccagtcgttcttccgatcgtgcttccatcagcgttcctacggctcccgcgagtgccactgggcaggctctggccgactacgctctgcagttccaaggttatccttacgtggccggaggcaatactccgtccggctgggattgctctggtttcgtacagtgggtgttcgcccagttcggtgtaagcctgccgcattattctggtgcccagatgagcgttggaacggcagttggaagcattgccgaagcagctcctggggatatcatcgtcaatactcagcatgccgcgatctatattggcaacggcatggtgatcaacgcgctgaatccggctcagggaacgcaggtcacttcgctggccgtgttctcaggtggctatgcgattcgtcgtgtgctctgagcgaacatacggtttgattttttaaggcgtatcctttcggggatacgcctttttgtatggaaaagaccgagtcgttgctgacaaaaccgcatgtcgcgcggtatggtggagcctagaggcaatgcatggtggcgttgccgaggtgattcaaggaggtcgtccatgattaacgacaaggcaatcctcgttggtgttgatggatcccacgccagctacaaggccacgtggtgggctgcgaactatgcgaagcatgcgggactgacgctgcagatcgtctgcgcatactcgttgccgagctatgccgctgtctcctttgacgcgacatacaccgccatgggggatgacaatgcggcccatagcgacgcgcaggagattctttcgaaggccaaggccatcgccgacgagcagggtgttgaggctaccacgcttattgttacgggcgatccggcttccgtattcgtggaactgtctcgtaactacaatctcatcgtcatcggcaatcgtggcaaaggcggtctggcggaacgtctgctgggcacgaccagctccagtctgccggcgtatgcatactgcccgatcgtagtggtgccgtacaccgacgatgacggcaatctgatgcacttgaacaacaccatcaccaaggtggccgtcggctccgacgaatccaagtggggtttgaaggcgctggagatcgcggcgaatttcgccgccgcatgggatgccgagctggatgttatttccgcggtgccgaacatgaagggttccgacgacgaaggtgtgatggcctcgttcaaggatgatctggaagtgcgtatcaagccgcttgaggaagcccatccggatttgaagatcaacaagcagatcgtgcctggcccggcggttggcgcgctgaccaaggccagctatgatcacgacgtcgtcgtggtcggttcccgtggtcgcggcggcttcactggcctgctgctcggctccaccagccagggcttgctgcagcacgcggtcggcccggtgtatgtggtgccccgcaagtatgtcgaggctgcggaaacccgtcttgacacggttccgagctcgccggcggaagtcaagccgaaggctcttgacgatatcaagggtgtcgaggaggtgccggtttccaaggccgagccggatgtggtcgaagccatcgaaaccaagatcgatcccgatcgtcagtaaattcaacaggtacatataaaaaggcgattgcaacactgcgaaaagcgttgcaatcgcctttttttttaaaaaaagaaaacgtcagtgcttgatggtgacgtccatgcggaccggagtcttctccacgtacgtatgcttcaccgtgcagcccttgtcgatatgacgagtgacgcgttccttaagctttgccgcatcctcatcgctcagaccggcgtcggtggcgtcgatgaccacctgttcgtcgaaaccgatgtatgcgtcattgtcggcgtcataggtgccgtccacaacgattttcgcgcccttgccctcgcccagcgtatgctcgatggcgaactggcttgacagtgcggcgcaaccggccagcgcgatcttcatcaggtcgcccggcgtgaactgtccacgacccttgccgaacttgatatgcgcgccatcctcgccgaaagcatcccaagaaccgtctttgttacgctcgacccacagccttttgcccatggtgaactcctcatcgtcttgccgggagcgccgttcgctcctcgcctacatacctaatgtaatccattgatgcctgttcgctaggaggcattccgaaaagcgtaaacaatcaacgcgcgggtggcatatgcttgacctgccgttctgtactgttaagcttgcaaccatggctttgacacctgaacaacttgcagatatccgtacccgtattccggcacgcccggaaaccgacattcccatgccatatgaagaccttgtgcgcaagatcctgacggaaggcacgttgaagtccgatcgtacgggcactggtaccgtcagcctgttcggccagcagatgcgattcgacctgagcgagtattttccgctgctcaccacgaagacggtgtttttcaagggacttgcctatgagctgctatggttcctgaaaggttccacgaacgtgcgttggctgcaggagcgcaatgtgcatatttgggacgaatgggccgatgagaacggcgatttgggtcccgtatacggcgcgcagtggcgtagctggccggcgcccacgcccgatgatccgaaccgtaccatcgatcagatcagcaatgtgcttgatcttgtcgagaatcacccggattctcgtcgtatggtcgtgtccgcttggaatcctgccgaagtggagaatatggcgttgccgccatgccacgcgctcttccagttctacgtggcggatggcaaactttcgtgccagctatatcagcgttcctgcgacatgttcctcggcgtaccgttcaatatcgcatcctattcgctgttgacgttgatgattgctcagcaggcgggactgcagccgggggagttcgtgtggacgggtggcgactgccacgtgtacgacaatcacatcgaccaggtgttggagcagttgagccgcgatccatacccgtatccgcagatccgtattaacaaagccgattcgctgttcgattacgattacagtgattttgaaatcgtcggctaccagcaccatccaaccatcaaggcgccggtggcggtctgagagtcgtcgccagacgttagactactgaccctagttcgactgcaaggagtgagtgaaatggagcatgacagtagccgcagtggctatcacgaacccgagcccggacttgccgggcttgaggacgaggaggattggggcgatgatttccccaagacgttctcggtgaatctgatttgggcgcaggcctgtgacaaggaaggtcatgacggcgccatcggattcgagggtggcatgccatggcatctgcccgaggatatgaggcgtttcaaggagcttaccgtctcgcatccggtcattatggggcgtaagacgtgggagtccctgagcccgaagtatcgtccgctgccgaatcgcgacaatatcgtggtttcgcgtgatccggcttacactgcgccgggagcgaccgtggtcgacagtctggatgatgcgcttgatctggcacgacaggaagccattccggatgacggtcttgaccgcagcgaaatctggattctcggtggcggccagctgttccgcgaggccatgccatttgcggacaaggcgtatgtgacgcagatcagcatgcatgccgatgccgatacctacgcgcccgacgtgaagtcgctggtggaatccggcgcttggaaggtgcttgaagagggcgtgtggcagaacacgcagaagggttccggagatatcgccggattccgtttcatgacgtatgcgaagaatcgcgaggagtaaccgtatgtataccgtgatgaccgtgtgcaccggcaacatctgccgttctcccatggccgaaatcattctgcgcactgaattcgagcgtcgtggccttgccgacaaggtcaacgtcgagtccagtggcgtgagcgacgaagagtatggcaatccgatcgatcgtcgtgccgtcaaggtgctccgtgagcgtggatatgagctgccggcacatcatttcgcccatcgcatcacccgcgatgagatcgagcgtaccgacctgtttctgccgatgaccgcttcgcatatgcgtgcgctactgcgtcagctgcctcaggccaagcgtgagaacgtgcatatgtaccgtagtttcgatccgaatcttgccaagcctgtcgcaggctacgaaagtgagattgatttggtcgatccttggtatggcggcgcccgcgaattcgaagtggcgattgaccagattgaggaagtggccccgttcatcgttgattgggttgagcggcagctctgacgattgcatacgatttttccgtcgaaaagcccggttcgcaagagccgggctttcttgtatccgcatgatttcaatgatgtcgaaagatcttaagaaatcgcaagagattgcaaaagtaatattgcgcaattgatgtaaatcagagaaaaatagaaatgaaaaataaaaaagcgaccccggccggacttgaaccggtgacctccgccgtgacagggcggcgctctaaccaactgagctacggggccgttgtttcagccttgcgactggcaacagatagatatattacggcaaagtcgctatcgtgcaaatttcggcgtgtcatcgatgaatattcgtatgaattgctgaaagaaagtatttgcttaaactgcggcagtagtagggaagaaaagcaacggccggtcgcatatgaggggaaaacttctcatatgcgaccggccgttaccgttgcggtgccgtgttgtcgctcacgacactacgaattgctggtggaatcagtcggtctgtttccaggtctcgacgtcgatgtggtgttccggattggcctgccatgcatcccaagcggacttcacgatgtcttcgacgttgtactgtgcgtgccagcccatctcttcgttgatgcgcttcggggagccgatcaggtgcggcggatcgcctgcgcgacgggccatgacggtctcttcgaacggcaggccggtgaccttcttgacctcatcgacgatctgacgcacggaggtgccttcgccggtgccgacgttgaaggcgtcgtacttgcgttcatcgcggtccagatacttcagggcggcgatgtgggcgtcggccagatcggagacgtggatgtagtcgcgcacgcaggtgccatccggagtcgggtagtcgtcgccgaagatcgcaggggccttgcccttcttcagacggtcgaacagcatcgggatgaggttcaggattgccggatcctcaagctcgaccgggccgcagccggccacgttgaaatagcgcaggccgcagaagcgaatgccgtacggctcttcgcaggcgcgtgccatccactcgccgaacagcttggtctggccgtacgggttgatcggcagcatcggaacgacgtcttccggaaccacgtcgaccggcggaacgccgtaagtggctgcggaagaggagaagacgagcttcttggcgtcggagtcgcgcatgccgatgagcacgttgagcatgccgttgatgttctgctggtagtaccacagcggcttttcaacggattcgccgacctgcttgcgggctgcgaagtggatgacggaatcgacgccttcggccttcatgatttcggcgaggcgttcgccggcacccggtgcggcgatatccatgccgtacaggcgggagccttcgatgcgggttggcttgccgtagctcagatcgtcaacgacgacgacctgttcgccggcctggtgaagagcgtggacgacgtgagcgccgatgtagccgcacccaccagtgacgagaactgtcatgttctgtcctttcctccaaaatgagcgttaaagcgctttggttcgaaaaacaaacgtccaacgaacgttgttcacttttgctctagtttgttaccttttgaacaatttgagtataacacatgaacaggaacgcacataatcgaccctttcctgcgtttcctctataaattagggtatgcaagaagatgtgaacacgccgactgaaaatcaagtaaacggcgaaaacgaacaaaatatgtcaaaaacgcaagatgaacaacgggctgatgctggccagcgtcctgccttgtatgggcgcaaggtgttgtccttcgtgcgtcgttccgccaggctcgacgcacgcttgcagcgtgcatgggatgcctatgcagatacgtatctgctgaaaatcaacgcgggcgaggggtcgcttgatgtgcgaggcgatctggtgttcgatcgggcgtatatcgcggatgtgtggggcaatgtcaatcctctgattgtggaaatcggtaccggccagggggaaaacgttgttgcggccgctgctgaacaccccgatatgaactttctggcgcttgaggtctatgatccgggcgtggcgcataccatgctgctcgcaggcaagcagggcctgaccaatctgcgcatcgcgcaggtcaacgctcctgagctcttcaaagccgcggcggatggctcgatcgctgaagtatggaccttcttccctgatccgtggcccaagatgcgccaccacaagcgtcgtatcgtgcagccggagcttgccggcgagattcatcgcacgttgcgggatgggggaatgtggcgtatcgccaccgacatcgaagactatgcattgcatgtgcatgaggtgatggatggtcttgaaggattccataatgacggcatgcttacggtgagtttgccggtcgagcatgttggcaagggaaatgccgacgaagcggccggtctgcgacacgccgatttcaccgaatccgagcgtttttccggacgaattctcacgaattttgagaaaaaaggacttgctgccggtcgtgtgattcatgacctcacctatcgctgcgtatagtgccggttggtctgttgttgaagtgctgaaatggcttgatttcaacgattttcagcactttggcaacgggttgatgtcgattttgcaacgttgcgacacgccgagatttgcatgttctgaggattcgcgtatagttaagcgagttgtcacgcggaaacgctgaaagcgcccccttcgtctaacggttaggacaccagactttcaatctgacaacgagagttcgactctctcagggggtacttaccttggtaacaaggtggcaatggccccgtagctcagttggttagagcgccgccctgtcacggcggaggtcaccggttcaagtccggccggggtcgctcgaacagattcctgttcatggctctgtagctcagttggtagagcgaacgactgaaaatcgttaggtcagcggatcgatgccgctcggagccaccatggctttgaaacctcggaaacatccgaggtttctttgtttttgcccacacgtatgacgattgcggccgtatgtctagcgccaagccactgatgccggctgttggttgaatacgcgctcgcattgcgggtaagccccctaaaatggtcgacgcaagtcatgttgacttgcgagttactgagaaatgactaagaaaacctccgttagagggggagtctgtctgctgtttggctacactggaacaccgtaaggcagtaacaatgggggtttgtgggcagagttatgccgtaaccccgttaagggagtattcgctggggtggcggcatggaagtgcttctggtcggcaacaccgacttcattaccaagcagtggattcagcattcctttccccgagaccatgtggtgatagcggaacgagaaggcaccgtagacggcaatgaccgtctcagaatcgtcaacatgtctgacgccaacacccttgccgaaactcttaccacatacgaattcgatcgcatcgtattcttttccgaaggcctcaccccgcgaagtgagcgtgacggcgatctcggatatcttcgcagattgctgcacgccatacgtaacagatccacgcaaatgctgatggtatgcggaccggaatccgaattcacctatccggaaaacgccgacgtacgtgataccagcaaaagtctgatgtctcgagcgtcggaagaactctgcctgtattacgcgcgcacctaccgtctggaagcgaaaatcattcgctgtccatacttgtatgcacccgagcgcaatggagcaaccgcatatttcggcagactgttcgaacaggcatcggtagggtcgatctcattctgcgaacgcaaacagcaacagacatgctttctctgcgccgacgatcttgccgaactgatctaccgcatgttcgacgattggaccgccgaaagcgaaatcttccatgtgcccaacgtgttcgacttcacatacggtgatttggctgatgcgatcagcgcggcatttcccggattatcggtgacttttggcgaagacagaccccaacattacccagcagacgatcatgtgctgcgattacgctatggctggtcgccgcgatattcgctcaaacaggatcttccccctgtgcttcagcgctggaaagaagcgcgtgctcaggaacaatccaagaagcacccggtctgggattttctacgcaaccattcaaaaccatggatcgcaatcgaaatcttcatcgcgttcatattggaagaactgcttcgcaccgcggtacaaggcaacagccagttgggaaccgtggatttgcgcctgtttttcgtggtgatcgtcggcacgatgcacggactgaacgcaggcgtgttcgcggccgcgctcgcatgtgtcggcatggcgttgtcgtatgcatcgaagggcgcttcattcgctccgctgttttacgacacgtcgaactggcttgcgtttgtggtgtatttcgttgccggcgcagtatgcgggtatgtgcagctgcgcaatcgcgaaaacctgcgattcatgcgtgacgaaaacagtttgctgcgtgaacgacttgcgttcctgcgtgacctgtaccacgatgtgctcgatgatcgtcgtatgctgcgcgggcagattatcggcaggcgtgacagtttcggcaaaatgtatgcgatgacccgtgaattggacgaagtgcagccgcaaaagctgtatcacacgaccattcgcattatgcaagacacattgggcggcgatagtttcggtgtttaccgcattgacagcggcggtcgattcgcgcgtttgatggctgcgagtccgcaaaccgaatccctgttcagcaagtcggcgctgcttgagaattatgccaacattattacagctttggatcatggtggattgtgggtaaaccgcaatctcgaaccggaccttccgatgtatgcggcaggcgtgcatgccgatggcaagctggccgtggtgattgtgcttgccaaagcgcagcccgaccaaatgaatctgtacttccagaacctgttcaccatcatatgcggcttggtggaatccgcgatggtgcgtgcgttcgactatgagaatgtggcgcgtcaggcgatgctggtgccgggcaccgaattcctgaacactcgggcgtttctacccaaagtgcttgccgccaacgaactcaagcacgaccatatgggcgatcacctgctgctgcgtgtggatgatgcttggcaagacaatggcagccgtctcatgggggccattcgtcagacggacgaggcgggtgtactgcaagacggcaacgtgtatgtgttgatgaaccaggccggcaagcatgagctgcctatcatcaacaagcgtttggcccaagctggattgcatatgacacgcgtttccgggcaagaggaagacgcgctgctggatgaggcttcggaacaagtggccgccgaatcgcacgaaggcggcacggcatgaacacaacggtagtgacgatgctgcttatcgtcatacatgtgctggtatgcgtgctgatgtgcgtattgtctcgttttggcgtgcttcgtgtggaagggcgtctgcttccttttatgctgttggtgccgctgtgggggccgttatgcgtgctcttgctgcatgtgcgtacgctgattcgtgcgggcgagcatacggctccagatctcgaacagatgcgcgtggacgatgaggaacgtcgaagcattctcgttgaggaacgtaccgatttcgtcaataccgtgccgctggaagaggcgttgatcgtcaacgattcgagtcagcgtcgcagtctggtgatgtccattctcaacgacaatcccagccattatatcgatgtgctgtcgcaggcccgactgaatgaggatgtggaggtcgtgcattacgcggctaccgccatggcacagatcagtgccaaggaagatcttgcattgcagcgctgccgcaacgattatctgcagcatcgaaattccgaaacgatgttggaacgctattgcgatgcgctggaacgatatatcaattccggtattgcgcaaggatacgcattgcagttgcagaagcagcgatatgccgaagtattgcaggaacgacttcgccaacatggcgattattacgttgcgtgccgtcttgcgcaaatgcaaatcgatcttggactctttgatgatgccgcgcacaccattgacggcgctatggaacagtggccggatcaaggcgatgtatggctgatgcgtctacgactcgatgccgcacgcaatgatggcgatgcgttgcgccacactgttcagcagatcgaaagcaagcatatttatctcggtggccaaggaagacgtgtgctgcggttctggaccggaaccaaggaggctgaacgcgcatgatcagaggattcctgtcagacgtgttggccaagtggaaacgattccgctggcaaggtttggtcaaagtgtgggccgtgttcatggccatcgcattggtgttgctggtggaaagcttgggcgtgcattacggtgtcacgcggttcgacatcacgtatttggaacgaaacaaagccattcctgcagccaatgccatcgctggcgaaaaagctacgaatctgttggtggtcgacagttcgcaggagggcgtcagcgatgccgaagccatgctcgaccagattctgcttgatatgaaagtccccaccactacggttgacgtggctgacgaaaacgctgaatttccagcgttgactcactacagcaccatagtggtggccatgcctaatctcgaccgtctgggcgagcatgtgctgcaaatcatgcaatgggccaaaaaaggcggaggagtcatgtttgccatgactcccgaaaaaaccggctatttggatgtgatcggcccgcagatcggcattgaatcgtccgcatacgaatatgtgctgactaagggcattacaccctccaaggatttcatgttgggcggcggccagacatacacgttcagcgatccgtttgaatcgtcgctgagtgtcgcattgaatgatcgcgcacaggtcaaggccgtcagcagtaatgggcgcacaccgttgatttggagcacgttcgtgaattcaggttcggcggtggtgtgcaatatcggtatttacggcaaggtgcttcgaggattttacgcttcggcgttcagcctgctcggttctgccacggcctatccggtgatcaacagcgcggcgttctacttggatgattttccgtctccaataccgtccggcaatggcaaatacatcaaacgtgactacaacatgagtattgctgaattctattctcaagtatggtggccggatttggtgcgtcttgcggaacggtacggtattcgtttcaccggtgtgatgattgagaattacggcgatgacaccaaggatgatccggtacggcagacggacggcgcacaattcgagtattacggaggattgctgcttcggcaaaacggcgaaatcggatatcacgggtacaaccatcagccgttggtgttgccgaatacggattatggtaaggaatacgcgtatgtgcagtggccgaatcgcaaagccatcgtcgattcgttgaacgaactgatcgcattccagaaagacgtattgcctgccgcaacatcgtcggtatacgtgccgccgtcgaatatcctctcccaagaaggacggaagatcataggcgaggatgtgtcgcagattcgcgccatcgccagtacgtatatgccttccgacagttccttgacgtacgtgcaggagttcggtgttgcggccgatggcgtggtggaggctccacgtatcgtgtccggcggcatggtgggcgacatgtacatgcgtcttgccgcggtttccgaactgaacatgcactatgtgagcacgcacttcatgcatcccgacgatttgcttgatgaagatcgtggagcgaaagaaggatggaagaagtactaccagggattggaaaactatcttgactggctggaatcgtcggcaccgtccattcgtatgcggacaggcacggaatgtgccgcagccatccaacgtttttcgggattgaccgtttcgatggaaacgtccgacgatagttgggatctgaaacttggcaacctcaccgatcaagggtggctcatgttccgtgccaacaatggcacgcctggcagggttcgtggcggaagcctcaccaagctgaccggcaacttgtatctgctcaaagccacgaacgccacggttcatatcgaacgcaagactgggggagaggcatgagaatctgcctggttttggaaggatgctacccgtacgtgcatggtggagtgtccacgtggatgcacagttatatcgaagcgatgaaagagcacgagttcgtattgtgggtgatcggcgccaaagccgaagaccgcggcaaattcgtatatgacctgcccgacaatgtggtggaagtgcatgaggtgttcctcgacgacgccttgcgtctgagcggtgaacgagcgcaagtgtcgttcaccgaagaggaattgcggtcattgcgcgaactggtgaatctgggcagcccggattgggatgtgctgttcaacctgttccacaccagaggcgtgcatccgctgtcgttcctgcaaagccgtgaattcatcgacttgtttacgcaaatctgcatggaagaatatccgtatgtggcctacgccgacgctttccataccgtgcgctccatgttgctgccggtgttgtacttgatgggcagcgaagtgccggaagcgcagatctaccatgcgatttccactggatatggcggattgttggcttgtttgggggggggg

SEQ ID NO: 879 - DNA, 45131 bp, Unknown
  gut microbiota DNA sequence
gttggatccgcttcttctacatgctttcggaacagatctaccatcgtgcgtggcgcatcaccagcttgttcggtcgtgcccgttttatccaaattggcatgggtgcgcccgccgatgcctgccaggtgattcccaatggcattcaatacgaacgtttctgcgatattccttccaaacccgacgacggttgggttgatatcggcgcggtggtgcgcatggcacccatcaaagatgtgaaaaccctgattcacgcgttccatgagctttcctctcgcgttgacaatgtgcgcttgcatattctcggcggtgttgacgatcaggagtatgccgacgaatgctatgagcttgtggaacagttgggtgtgcgcaatcttgagtttaccggccgtgtgaacgtggtcgaatacatgcgcaagcttgatttcaccgtgttgaccagcatttccgaaggccagccgctgtcggtgctggaatcgttcgcagccgcacgcccctgcgtgaccactgacgtcggctgctgccgtgagcttttggaaggcgaggaaggcgacgatttcggcacggcaggcttctacgtgcccccgatgtaccgcgagggcctgagccgagccatggaacgcatgtgttccagtcgcacgctgcgtgagaccatggggcagattggccgtaaccgtgtgaacgcctattaccggcatgagcgcatgcttgacgattatcgcaagctgtatagcgataccgcggatcagttcggattgaatcagttcggattggagcgctgatatggccggtattggatttgagctgaagaaactgttccaccgtagaggcttgatggcgatgctgcgagcctacggctatgccggcgtgatttgcgctggtccgatgctgttgggtgtactcctgcagttcggcgtgctgatcgtgagcagctggtggcaggtgggccgctccgaccgcgatctgctcgtatgcatgatcacctacacgctgcttgcctcgttggtgttgacgagttttctgtcgatgccggtcacccgttttctggcggatatgttgtttgatcacgatgagaagatgattctgccgtcgttctgggggtctaccggcatcatgctggtggtgggtgcggtgttgtacacggtgtttctgctgttttccggtgccacgctgatgcagggcgcgttgtgtttatggctgtttcttgaaatgatcgtcaactggaatgcgatgagctatttgacggccatcaaggattacaaaagcattctgtattctttcgtggctgcggtgttggtggcgttcgttacgtcatgcgtgttgcttgcgttggcctgccctcctgtggagtcgctgttgtttgcagtggtgcttggctatggtgtgatgctggtgtgggatgtgctgctgctgcatcggtattttccgcaaagtcgtgagcatccgtggctgtttctgcagtgggttgaccagtttctgccgttggcgttgaccggattgctgaccaccatcggcctgttcgcccatttggtgatcacttggtgcggtccgctcggcatcaaggtgaagggtttgttttatggcgcgccatattacgatgtgcccgccatgcttgcgtttttgacgattctgatcaccacggtgaattttgtggtgtcggtggaagtgaatttctatccgacatatcgttcgtattacagtctgttgaatgatggaggcacggtcaaagacattaccattgccgaagatgaaatgctgactgtgctcaatcgagaattgcattacacggcgttgaagcaattgttggtgaccgctgccgtgatttcattggaaaaaacagtgctgaacgcgcttcctttaggattcagcgatgtgatgcacggatatttccgtgtgctctgcgtggggtatgccctttatgcggtcggcaacaccgtgatgctgattctgctgtattttaccgattattccggtgcattgacggcgtcggcattgtttgcgggttcgacggttgtgttcacagtaatcggacagttcttcactacgtcgctgttcggtttcggtttcctgatgggggcatcgctgttcgccatatatgcgacattccggctcgcctcatacaccgacaatctgccataccgagtgctgggacagcagccgattgtggcgcaaacgaaacgtggacgtttcaccgaactgggcatactgcttgaacatggcgaacagcgggtcgaccaatcattgcatcgctcagggcatgcacggtcttctgacaaggcgaatattgcagaaacggatgtcataatcgggaggaatcgtaaatcatgacatggtggaaccgacgcaacacaaaagccattaccacgcttgtcaagcaaatagcggcattgacggcaatgctgacggtgctttcctgcgccggatgtgcgacttcatcacccaacgataatgaacaatcgcaatcatcggattcgtcacagacgcatgagcaagtcaagaaaagcgctgaacaaagcatcgacggcgcacacttgcgcgacaacgaatcgttatacaaggtgtatgacgacagcggtgtcgaaaccatgtatttgacggtatcgcgcggtaattcgtcggaaggcaccgaccatagctggagcgaaatcaaccagtattccgttgatgactatgcggccatgggcgttgaccgctacaaggtcaatggtttgctgcaggtcggcgacgaacaaggaccggtttccggtgagcttggttttggtgaaagcgcgccgaacgccaccgtgcagatacgtggccagtcatcgagtaaaaacgagcagaagaactacaagatcgagttgaaaagcggcaaaggcaagtggcgtgggcagcgtaccatcgcattgaacaagcatatgggcgaaggtctgcgtttccgtaacaaaatggcgtacgatctcatcaaaggcatcgaccagatgatgggactgcgcacgcaattcgtgcacctgtacgtgaaagacgagaccagcggatcggattccttcgacgattacggtctgtacacgcaagtcgaacagctcaacaaaaccgcattgcaggtgcacggacttgataagaacggacagctgtacaaagtcaattatttcgaattctatcgagacgaagacgtgatcaaactcgccgatgatcctgactacgatcaagcgaaattcgaagaaaaactggaaatcaaaggcgacaacgaccataccaaactgatcgccatgctgaacgatctcaatgattattcagtgccgatgagcgaaatcctcggcaaatatttcgataccgaaaatctcgcatattggatggcattccaattgctgaccggcaatatcgatacgcaaagccgcaatatgtacctgtatagtcccacgaattcggatacgttttacctgctcgactgggataacgatggtatgctcatgcgcaaggaatacgagatcaggcaacgttccgagggccaaagctgggagaacggtgtcagcaactattggggcaacatactgttccgacgttgtctgcaaaccaagtcgttccgaaccgcgctcggcaaggccgtgaaagacgaatacaagtatatgagcgccgatcgcatcaattccatggtgcggcggtaccgttccatcgttgaaccatacgtgcggaagatgcccgactccatgcatgagcctctgacgtcaagccaatacgacacggtggcaaaccaattgcatagcgaaatcgaacagaactaccagacgtaccgaaccgggttcaataagcccatgccgttctatatcggcaagccgactcctaccaacggcaagctcaaactcagctgggatgtctcctatgatttcaacgatgaggatctgcgctataccgttaccgtggccaaggattacgaaggcaaagacgtggtgttcacacagagcgacctcgtattgccggaagccgtgatggatatgcctggtgaaggccagtacttcatcaaggtgagcgtgcgcaatgcatcaggcgagacgcaggacgcgtttgactactacgtcaccgacggcaacaagatctacggcaccaagtgtttctatgtgaaagccgacggcagcattgtggaggatgccaatgtgcagtgatggtggcaatcgcggaacgtcgctgctgcaacgtatcaaacatcgcgtcggcgaggaattatccgttccaccgcgcacagccaaggaacggttccgtcatgagctcaaatatctgatctcatacgcgcaaaaagccgacttgaacgtgcgtatggcgccgctgcttggcctcgacaagcatgcgaaaaacggcggctatatgattcgcagcctgtatttcgacgattattggaacaccgcatatcaggaaaaagtcgacggtgtgctgctgcgtaagaaataccgtattcgcatctacgattacagcgatcgtgtgatcaaactggaacgtaaacgcaaaagcgacagttggatctacaaggaggatgcaccgctcacgcacgagcagttcgaccgtattcttgccggcgattacgaatttctgcgtgacagcgagtatcagttgtgccgcgagttttatgtggaatgcatgtgcaatgtgatgcgccctcgcgtgatcgtcgattatgagcgcgaaccgtggattcttgacgccggaaccgtacgcatcaccttcgatatgaacgtgcgtgcggcggtcggcggattcgatgttttcgactccacactgccggtactgcctgtgcttgagccgggcaagctggtgatggaggtcaaattcaccgagttcctgccgcaagtggtgcgtgatctgctgcccggcaaggcgcaggagttgacatcggcttcgaaatacgtgctctgctacgacaaagcctcgtatttgcggggattcgactactggcaggaaggctggagcgtgccaagcctgtaaagccaagcctgtaatcggctggcatgttgactggcattccagcaaaaacaaacgttacgaatcaaggaagcaggagagaaagaaaccatatgagtgtcaatgacatgatcaaaaagtcggtgctgaaatccttcggccaatacaatgtgcccaaaatggcgctggcgttgctggtggcgttgatcgtcggcatcgtcatttactgcgtgtaccgccgtttctacacgggtgtggtgtattcgcgcagttttgccgttacgttggtgggcatgtgcgtgctcacctgcatggtcacgctggccatcagtacgaatattgtgatttcgcttggtatggtcggtgcattatcgattgtgcgctaccgtaccgcggtcaaggatccgatggatctgttgtatttgttctgggcgatcacgtctggtattgcggcgggcgccggcatgtatgtgctggtgattgttgccggattggtgatgatcggcatgctggctctgttctactcgcgtcaagacaaggggcgcgtgtacattgcggtgatccactatgtgggcgatgtagtgggagatgagatcacgcgcgcgttcggacgcaccaaattcttcgtaaagtccaaaaccatgcgtggcgaacgcacggaaatggcggttgaagtattctgtgatgataaggacatgacgttcgcggaacgcgttcgcgccattgagggtgtcgaagacgtgacgctgatacagtacaacggtgagtatcatgggtaatcaattcgatgttgccgcaggcgcgcggctggaatccacgggcagggcgcccagcaacgacgaaatcgtacccagattctctcttgacgacatcaaccaggcgtttgacaacaacgaattctgcttctacctgcaacccaaatgcaatgctgaaaccggcgcaatcgtgggtgcggaggcgttggtgcgttggaatcatccggaatatggcttggtgtctcccggcgaattcattcctctgcttgaacgtgagtcaatggtcacgcggttcgatttgttcatctggcgttccgtgtgtgaaatgctgtcgcgttgggatggggaggggcgcaatctggtgccggtgtccgtcaacgtgtcgatgacggatatcgagtcgatcgatgtggcgcgagtgcttggcgacctgctcgatcggttcagcatcgatgctcgcctgctgcaggtggagatcacagaaagtgcgatcgcacataacatggatgtggtcgaagagaccattcgggacctgcatgcgcgaggtattgccgtgctgatggacgattttgggtcggcgtattcgtcactcaacatgttgaaggacatcaacgtcgatgccatcaaactcgacatgaaattcgttgacctgaatgctgacaatgcggcgaaaggtttgaaaatcatcgaatccgtgatcgacatggcctaccagctgagactgtcgatcattgcggagggtgcgcagaccgccgaacaggtgagcaagctgcgtgagctgggatgcatgtacatccaaggatattatttctaccgtccgctcactgtggaaaagatggaggatttgctggaacaccgcccggatgaccagcatttctggaatatctccaaagatctgatgcatcgcgactaccgcatgtcgacgaacggccgcagcatgctcgaatcgtcgtcattgtcggcgcatatttttgaaatccttaacaagggcgttgcggaactgtcccgactgaatctcatcacgggagaatatcgcaccatcaaacgcgatccgaaacttccggacgtgtatgcggatgattttcatgattactgccatgcattggtttcagaacggatcattcatccagatgatgccggagaattcctgaaacacacgcgattgtctgatttgcgcgaccaactattcagtaagaaaaaatcggaattcacgtattttagaagcgaggtcgaggcgaaaaccagcgtgatcgcattcggtatgctggtaccccctgattgcagtgaggccaatccgtgggccgtggtgctgatcggattcgacccgtcgctcgacctaatcgccaagaacatgaaggaaatctatcggcaggactccttgacgggattgctcaaccgcaatgcatacgacagcgatgtggagcagctgcggagcgccgacatcggggcggtggtgtgcgtgtatgcggatatgatcggcctgcacgaggtgaacaaccatctcgggcataagcagggcaaccgcatgttgtgtgagttcgcggacgcggcgcgcgcgttcttcggcgatgaccggttgtatcgcatcggcggcgacgaattcgtgataatcagttccgcgcatacggaagcgcagacacgcaagcagctgaactacatgcgtgagcgcttgcatacgcaaggctgcgagatatcagtgggcgtagcgtcgagcgagtcgacttccgatctgccgaaaatcatcgaacaggccgaaaacgagatgcgccgcgaaaagaaggaatactacgtgcgaggcggcagcaaacgccagctgcgcgggctcaacaaaaaacttgaggacattctggtgcgtaatcaggatatggaatcgttgctgcggcatttgaacggacgctattcaatcgcatgcatggtgaatctgcgtactgactcacagcgtgcgatcatggtgcccgactatttccagaagatgcttgacgcgcatgacggttcgttcaaaagcgcgctgcatgactattgcgaacgattggtggcgccgttctgcaaagacagtttctccctgcttatggattacgacttcattcatgcccgcgtcgagtcggtcggcgtgttgcagtacgggtacacgcgaaacgacggagagaagttcctgcttacgattttcgccgatcgacgttccaaagacgagaccatgtgggtgttctccaaggatgatctgccgcaggtcgagctggaattattcgagtcataaggccgtattgtctggttttatgcgtttttgtgtgatgcgttcgcatattttgtgagaacgctcacagaaaaggttgtgtcgatttccagccgaatcgcaaaatggggtctatgatgagaatcgttggtcatggcaacggttgctatgacacggcgaacaagcacagtcgcttaaaggagacatctatggtctatcgcatgattttcaaccagactgcatacttcggtcgcggcgccatcaaggagatcccgggcgttgccaagtcccatggcttcaccaaggcgttcatcgtcaccgatccggtactgctggaaaccggtaccgtcaagaaggtcaccgatgtgcttgatgaggcaggcatgccgtacgaggtcttcgacaacgtcaagccgaacccgccggtcgaatgcattcaggatggcgttgccaagttcgccgcatccggtgctgatttcctgatcggtctgggcggcggctccccgcaagacacctgcaagggcatcggcatcatcaccgccaacccggagtttgccgatgtgctctccctggaaggcgttgccgacaccaagaacccgtccgtgccgatcttcggcgtgccgaccaccgcaggcaccgcttcggaaaccaccatcaactatgtggtcaccgataccgccaacaagcgtaagttcgtggccgtcgacccgcacgacattccgatcgtcgccttcgtcgatcctgatctgaccgactccatgccgcgcggcctcaaggtcgccaccggtcttgacgccctgacccacgccattgaaggctacatcactccgggcgcctggagcctgtccgactgcctgagcatgcagaccatccgcatgattgccaagaaccttgccaagagcgctgacggcgacgttcctgcaggcgagcagatggcctacgcctcctacatcaccggcatggcctactccaacgtcggcctcggtctggtgcatggcatggcccacccgctgggcggccgcctcggcgttgcccacggcgttgccaacggcattctgctggcaccggtcatggaatacaacaaggacttcaccggcgagaagtatcgtgacatcgccgacgccttcggtgtcgaagatgcctacaccggcgatctcgagacggttcgcgaagaagccgtccaggccgtgcacaagctcaccgtcgacctgaagaacccgaccaccatctccgaagtcggcgcaaccgaagccgatctggaagcactggcccacgacgccttcaacgacgtgtgcaccccgggcaacccgcgtcaggccaccgaagaagacatcctcgccatctacaagagcctgatgtaatgcgaaaactctcacgaatcggcaatcgcatgcagcgaatctgcagtgaaacccgattgtgagagaacatcgctgaaagcattaaaaatcgtggtgcgaaacttcacaaagcattcgcaccacgatttttatatctgcacataaattacggattaatcgaaataatgtaaacaataatccgtgattatcaatcgcaagtattggaattactcgtgcttttcgctccactcctcatcggtgggagtgtcatcgtaccattcgcggccttcctgctcggccaattccatctgctcgttgatccacgccgcctccgcaggattgatatcggcggtgtcaagcaccttctgccataccggatacagcagatgcatcaccggatatagcgcggtgagcagaatctccggcttatgcttgcgcgaatgctgtggatgcgcgtcgaacgtgttcttgaaacgacgcatgtaattgttgaacgacgtgagcgacgtgtccatacggcgggcgctgatgccggcgatcatacgcgggcagtacacggttttcagatccttgcccagcagatgcagcgaaatatcgatatcctcatgcatcacatcggccttgtctcggcacacttcgtcagaaatttcgcgccaagctgaagcgcggaccgccatattcgagccaaacaacaacggctggccgccatcggccttgtaaatacgcttgcgtgtggaattatccccacgcaaaccaaaatggcggctcggcagatcgtaatacatcaccggaccagtggcacccatggcctccgggtcctcagtgaaaatgccggacaccacttcgacccaatccgggcgaatcatgcaatcggcgtcgaaacggcccagaatgtcgccggtggcgtggttcaaaccataatcgcgcgtcggaatcagcccctgctcctcatcctgatgcagcagacggacgggtgcttccgggtggtctttgatgaactgctccaccatggccaccgtcgaatcggtggaacgattgtcgacaacgatcacttcatggggcatcacggtctgcctagtggcattcaacaggcaatcgttgatacgctcctcttcattccaagcggggatgacaattgaaacgttcagcataactaccacaatagctcagcctgtacacgacgcctatcgctacaatagggagccatgagcgacagcgaacagcgaatgaacaatacgcagagcgaaaacggtgcgaacaccagcgaacagcgatgggacctcggcaccctgtttccagccaaaggagatccccgaaaaccaccggaatggctgggacgtgcgctgctatacatcgccatagccattgtggggtttactttctgctggcgcagctggggcaaaatcgaatatctggtgatcgacatcatcgtctcgctgttcatcgcgctcgcggtggagccggtggtggtgccgctggtcaagcatggctggaaacgttcgttcgcgtcgctgttctcgctgctgatgctggccgtgatgctcggcgtgctgttcacactgttcggcaacctgttcgtgcagcagatgatcgccttggtgaacggtctgcccgacctgtatgagcagatgtgccagttcgccagtcaatacgcgaatttccagcttcctgagatcaataatctcggcaatgagattctgaagaacattcaaacgtcgtgggtcactgatttcgcgggtaccgcgctgaatacggtgtcgggattgttttcgttcctgattaacctcatgacgataatcatgaccacgtattacatttcagcggctggtccgaaactgcgtcgtgccgcatgccagtggatggctccggcggctcagcggcgattcctgttcgtatggacggtgagccagagccagatctcgtcgttcctgttctcccgcgccattctcgcgttgctgaacgcgttcttcacaggaatctgtctgatgctgctgcacgtgccctattggctaccgttggcgctgttctgcggtgtggtttcgcagttcattcctatgttgggtacgtatatcggcggcgcgttgccagtgctgttcgcatggggtagctgcggattgtggcaggccgtggcggtgctggtgtttatctgcgtgtatcagcagatcgagaatctgattttcgcgccgaagatctcccagcgcaccatggatgtgaacgatgccgtggcgttcctcgcggtgctggcgttcacctcgctgttcggcgcgttgggcgcgttcctcgcattgccggtggttgcatccgtgcagacgatcttccgcacctatacaaagcggtacgagctggtcgattccccgctgatggacgatccggtgcctgaaaagaagtcgaagctggtggaaggtgccgaagtactcagcgagcatctgcacaatatgcctcgcgcggtgcagggatccagtgcgcatgtgcctattcccgacgaagtgcggcagttgcaggagcaggcgtacaatatcacccgttccgaggaatcgctggaatcggacgaaaccgtcgccattccgaagcacgtgttggacaaaacggaacgcaagccattgcagggtcttgagagtgaaaacacatctcaggaatccaacgaaaatccggaatccggcaatgaacggaagaacggcgagtcgcgggaagctgaaggaagtacgaaaaacgcggatgacaatccaagaagtaggtggcgttaatggtactgctgagcgtacttgacattctgctggtcatcgtcggtggcgcaggggtggtctatcaggcggtgtgcattctcatctccctgttcaccaagccgatcaaatttcccgacgcgccgatggacaagcgttacgcggtgctgatttccgcacgaaacgaggcgaacgtcatcggcaacctcattacctgcatccaaacgcagacctacccgaccgaactggtcgacatttggcttgtcgccgacaattgcaccgacaataccgccgaagtggcgcgcaatatgggctgccatgtgatcgaacgcttcaacaaggagcttgtgggcaaaggctacgcgctgacgtatctgctcgatcagatgaacgattccggtgcatccgacccgtacgatgcgttcttcgtgttcgacgccgacaacaagctcgacaagcattacgtcgaagagatgaacaaggcgttccagtcgggattcaagattctcaccagctaccgcaattccgtgaatttgtctgacaattgggtctcttccggttctgcattgtggttcatccgtgaatctcgattcctgtcggcctcgcgcatgtggctcggcaacagctgtcatgtagggggtactggcttcatgttctcgcaggagatcatgcgtcgcaataatggttggaaattccaccttttgaccgaggatttggaattcaccatggattccttgctgcacggcgaccgcatcggctactgcggtaccgcgattctgtatgacgagcagcctgtcaccttcgcgcagagctggcgtcagcgtttgcgttggagcaagggcttcctgcaagtgttccgttattacgggccggctttggtcaaacgcgccatcagggaacgcgatttttccgccgttgatttcacgctgttgttgtgtccgttcacggtgatcggtattgcgcgcgttctgctgggactgttgttcgcgacctgcggattcgtgacatggcagagccagttgagctcgttgaccggttggacgtccggcattgtgacgtcggtgatcggcatgatggcgttggccgcgttgacgattattgtggaacgcgatcagattggcgccaccaacaaggagctgttcgcgtatgtgctgagcttcccgatctacatgttcagttatgtgccgatctcgttccaggcgatgttcgccaagtccgaatggaagccgatcgagcataagggatgacgttcgttcgctggcttgcgcgttcctgccttttcgttttcatttcgatttcctcttatgactggagtgttgttgttccatggatgattcggctgaataccggcatgtgaaacgccgtcgatacatcacggtggcgctttccgtgtcgctcaccacagtgttgtgcgtcggctatgtcgtggccgacattttcgacaagttgccgggtgttctcacattgcaggaagtcgagcatgccacggccaaaacgccgggcaatgccattgcggccgcgacgatggtcggagggcttgacgcttcgaaaaccgtggatgccgttgcggcaaaggctctgatcagccagtttgagacggctgcctccgattttggcggtgaatacgccatcgccatcgccgacgcggctggcaatgtggtggccgagcagaatctcgacacgccgtatacgccggcgtccaccatgaaaacgctgacggcgtatgcggctgcggccacgctcgacatggggtcgacgttggagacgcagacctatttggagcagcgcgaagatggcacttcgcgattggtgctcaaaggcaacggcgacatgctgctcggcgtcggcgaatctgattcggcgcacatcaatgggcgtgccgggctgggaacgcttgcggcaaacacggcccaagcgttgcggcagcggggcatcacttccgtgacgctcgtctacgatgattccctgttcggcaacgaccgttggcccaacggcatcgccgaactcgatccggaccacgtgtactacgcgccgaccgcatccatggccgtggatggcgggcgaaactggaacggtgctaatcctacggatcccgatacgttcagcacatatcccgttttgagcacgcagccggctcgcgaggccgcgctggtgttcgcgcaacgcctgactgagcggggcattgcggtgaacggttccgtggaacagggagccgttcccgacgggaccagccccattgcgacggtgagctccgcatcgctgaacgagatcatggcgttcatgcttcggcattccgacaattcgctggccgaggaattcggcagactgctggctttgcaccttaacgccggcaattcaccggccggagcggtgcagtcggttgaacaggtactggctcagcgggggatttccaccgaaggcctcaccatggttaactgctcgggactggctgaggattccaaactcaccgcgcataccctgcttgacgtgcagcagcgtaatctgacgagcggatccggttccgccgccgctgaggggctgtcgattgtaggatttgtaggcactgctgcgaatcgtttgaacgatgctgacgaagctggtcttatccgtgccaaaaccggcagtttgggagatgtgacttccatgaccggcaatgtgtcgcgccataatggcggtgcgttgagttttgccgtgatcgtcaacgatcctgatgattccgaagccgcgaaatccgctatcgacacatttgtggcagcactaccgaagttgtgacgccatggtgtattcgtcacgtttgcgcaagggaatcggcgaactgcgcgccgcgttggaatcggccggtttgggattgcaggatgcccgtttcgcccgtcatggcgagcacgcgcccgacgtggacgctccgctgattatggtgtcctgttccggtgggcgcgattcgatggcgttggctgcggttgctgcgaaaacgtgcgcttcattgggattgcgatgcggggcgattatcatcgaccaccagttgcagcaaggctctgccggtgttgcgcgggcaaccgccgatcgttgcgttgcgttgggtcttgacccagttcgcgttcgtgcgattgacgtacccgactcccgtggcatcggtgttgaggcagcggcgcgtgaagcacgctatcatgcgattgtcgacgcatgctccgacgcttcggccgtgcttctggctcatacgaaaaacgatcaggcggaaaccgtgatcatcggtttgttgcgttccgcgggcctcgatgcggtttgcggtatgaacggttccttcatacgagacggggtgcgttttctacgcccatggctgaatgtgacccgcgaagaaaccaccggcatctgcgaggatctgcggcttgcctggtgggacgatcccacaaatgggccggatgtgggagattcgggtggaaatgagcctcttcccgcgaactatccgctgcgatcccgaatccggcacgatctcatgccatatcttgaatcattcgcgggaagcgacgtcgtgtcgaaacttgcgcttggagcgaggcttgccgaagacgatcgcgcatatcttgacgatgtggcgcaacgcgtgtgcgagcaaggcgtaaccgtgaacaacggcgagataatcatcgacgtgcgtgcgttgcaatcgcaagacattgccatcagaagacgggtgattgtgcgctcgcttgcggaagcaggcatttcgtgcatggcacggcaggttgaagggatcgacaggctgatctgcgactggcacggccagaaaggtgtgaatcttcccagcggatattcagcatatcgccagaaacacgtcattcgcgtgtgccaagatggtgggcatgcgaatcgctgacgtacaagaagatattgatcacgagctgatcagtaaagaagagattgccgacatcatcaaccatgctgcagcccaggccagtgaagactaccgtggcaagaacccgctgctggtttgcgtgctcaagggtgcggtgaacacgcttgcggcgttctcgcaggccatgagcatccacgcggagatggatttcatgagcttgtcgagctacggttccggcactcaatcgagcggcaagatcaccgtgcggcaggatctgtcgaccgatgttcgcggtcgtcacgtgcttattgtggaagacatcatcgattcgggcgtcacgttggcgtggctcgtcgatgagctcaaaagccgtggtgccgcttccgtggagatttttgcgctgttggaaaagccggcgcgccgtaaggtggatgttcctgtgaaatataagggacgtgagattcccgatgaattcgtggtcggtttcggcttggattatgacgagcgataccgcaatcttgattcgatcgcggtgctgaagccggaagtgtatgaaggaggtcaggcatgagttttcctggtccgggccagtcgccgaataacaacggcggcggcaataacccgttcaccaatccgtttggacgcaataataacgccggcaatggcaacgattccaacggcaagggtgacaagtccaacggcaacggatccaatggcggtccgcgtccgttctggcagtccccatggctgtgggttgtggttgtggcattgcttgccgtgaccatgttccagattttcgccggaaccggttcccagaccatcgacaccaaggacggtctgcagattctcaacggcaacaatgttgaatacgcacagatcgtagacaacacccagcaggtcaagctcaagcttaagagcgactactccgctacagaccctgataccgggcgtatgaagaactacggcaaaaacgtgcagttctactacacgtacgcgcagtccgcaaccgtggtcaaggccgtacagaaggctgatccggtcaagggctggacggcgaccatgcagcagagcagcatttggacgtatctgctgacctcgctgctgccgttcctcattatctttggtctgttctggttcatgatgagccgtatgggcggtgctggcggcatgttcggtatgggcggcaagaagaacagcggcaagctgctcgaaggccagaccccgaccaccaagttcgccgacgtggccggcgaagaggctgccgtgcaggaagtcgaggaaatcaaggacttcctgaaggatccgtctcgttacaaggctttgggtgcccgcattccgcgtggcgtattgctctacggccctccaggtaccggtaagacgttgctggcacgagccatcgcaggcgaagccggtgtgcctttctactccatggcaggctccgacttcgtggaaatgttcgtgggtcttggcgcctcccgtgtgcgcgatctgttcgatgaggccaagaagaacgctccggccatcatcttcatcgatgagatcgatgccgtcggtcgtaagcgtggcggttccggtatgagcggcggccacgacgaacgtgagcagacgctgaaccagctgctcgttgagatggacggcttcaataacgacaccaatctgatcatcatcgccgcgaccaaccgccccgacgtgcttgatccggcactgcttcgcccgggccgtttcgaccgtcaggtagccgtcgaagcgcctgatttggaaggccgcgaggctattttgaaggtgcatgccaagggcaagccgttcgtgcctgatgtcgatctgcgtatgatcgccgtgcgtacgccgggctttaccggcgctgatctggccaatgtgttgaacgaagccgcattgttgtgcgcccgcgccggtgcgcagctgatcgacaaccgcgccatcgacgaggccatcgaccgcgtgcaggcgggcccgaagcgccgttccaagggcatggcgctcgacgaactgcgcaacaccgcataccacgagggtggtcacgcgctggtggcggctgccatgaacgataccgatccggtcaccaaggtcaccattctgccgcgtggccgcgcacttggctacaccgcggtgatgccgactgaagatcgctattccatgtctcgcaaccagctgctcgaccagatggcgtacgccatgggtggtcgcaccgcggaggaagtcgtgttccacgatccgaccaccggcgcttccaacgacatcgaaaaggcgacgaacatcgcacgtcagatggtgctcgactacggcttctccgacaagctgggtgccatcaagtggtccgatgacgaacagagcgaccttggatcgctgaaccacaagtattccgcacgcaccgccgaaatcatcgacgaggaagtgctcaaactggtggaaaccgcgcataccgaagcgtggaacgtcatcaacgagaatcgtgagattcttgacgagctcgtacgtcagctgctcgtcaaggaaacactcaacgaaaaggaacttgcggaaatcttcgctaatgtcaagaaggcgccgaagcgtgaagtgtggctgagcgacagcaagcgcccggattccgacattccgccggttccgattcccgaatccctgaagaaaagcgcaggattgaccaactgatgagcgataccgaagcattcgataccctcttcgacgacaaggcccgtgccgcccatgcggccgggcctgtcggctatgacgaggaaggcgtgcgccaggcagtacgcctgtttctgaaatccattggcgaagacccggaccgtgaaggcctgctcgacacccccgaccgtattgggcgtgcctgcaaggagctgttcgcaggccttggacacggccccgaggaagtgctcaaaaccaagttcaaagtcgataccgacgaaatggtgctggtacgcgatattgaactcttctcggtatgcgaacaccacctgctgccgttccatggcgtggcccacgtcggctatattccgtcgaacggccaagtggcgggcttaagcaagcttgcacgactggtggaactgtatgcccgacgtccgcaagtgcaggagcgcctcacccaacaggtggccgacgcgttgatggaaggtatcgaagcacgtggcgtgatcgtagtcaccgaatgcgatcacatgtgcatggccatgcgtggcgtaaagaaggcgcaatcgcgtacggttacatcggcggtgcgtggctgcatgcgagacgcgacgacgcgagccgaagccatgagcctgatcctgtcgcagcatgcgtgatcggcgcgactgcagcaagtcgaatcgtaaataccaataaccggatataggaggggaaaccggatgaccattgatatgaaatcgattcatgatagtgaccgtacgctggtgatgggcgtgctcaacattacggaggattcgttctccgatggtgggttatggctcgatcctgcgaatgcgaaagcgcacggcgaagcgatgatgaaagatggggctgacatcatcgatatcggtgccgaatccactcgccccggagccaaacgtgtcagtgaggaagacgagcaaaaccgcgtgctaggtgctgtggatgcgctgattccggaaggcgcggtgctgtccatcgacactacgcgcgcatcggtggctcgcatggcgttggagcatggtgcgcagatcatcaacgacgtgtccggcggtcagctggaccgcgaagtgccccatgtggtggccgaacacgcggaaagcctttacattgtgcagcattggcgcggttggcttgccggctccgcaggcgacgtgcctgacgctgatacgtccgtgtacgccaatggcgtggtgaacgacgtgtatgacgaactcatgaagcaggtcgacgacgtgcttcaggcaggcgtctcgccgtcacagatcatcatcgatccgggtcttggattctccaaaccgagcgtcgaacataacttcccgctgatggtggcgttggagcggttcaacgccaccgggtatccggtgctgatcggagcctcgcgcaaacgattcgtcggcgcggcgcttgccgatgccggcatcggcaagccaagcatgggcagcaaagacaatgcgaccgccgccatcagcgccttgtgcgccgaatatggagcgtgggccgtgcgtgtgcatgacgtggagaaaagccgtgacgcggtggcgatcggcaatgcgtggcgtgctttcgctaacgcctgatacgcggtgctcgcatacgtcgtgcgttcctgacagcgtaggagcggcaacgcatttccaccattaaaccttgagatatgcaaagaaaggctggcatggatcagattcgattgactggcgttcgcgcggtcggcaaacacggtgtgcttgatttcgaacatgagcgtgcgcagacgttcgtcgtcgacgccacgctgtttctggatcttgcgccagccgggcattccgacgatctgcgggacaccgtcgattacggtgccatcgccaaaggaatagtcgccattatcgaaggcgatcatgtcgatctcatcgaaaaactggccgatcgcattgccagcatgattcttgaatatcctgccgtggcgcgaacgcaagtgaccgtgcataagccgagtgcgccaatcgtcgtaccattcgacgatgtgagcgtaaccgtggaacgttctcgtgaaacaacttcggctgcatcgcaagtgcatcatgccatcattgccatgggtggcaatcagggcgatgtagtggccaccttgcgtgacgcggtgcgttcgatcgacggactggcgtccactcaggttacgggcatttcgccgctgtaccgtaccgatgcgtggggcatgcccgatggtacccccgacttttacaatgcggttgtttccgtgaccaccaagctatcggcaatggagctgttgcgaggattgcagcgcatcgaagccgaacatggtcgagtgcgtaccgaccattggacttcgcgcacacttgatctggacatcatcgattttgacggtcagagcagcgacgatccggacctgacgctgcctcacccccgtgcatggcagcgtgcgttcgtgctggggccgtggctggcactcgaacccgatgccgaactgccgggcgaacatgccggttccgtggctcaactcctccatgaatcgaccgatcgcgaccatatcgacgaaatcgcagatgattggatggtggaaagcccgaccggctacggtaccgacgaccttgcctgcgatgccaataatgcgggcgatgcggatgatatgggcgaagcgtatgatgcgatcgattccagcgatttgccggaaggaaccgccgcagccaaagtggccgcactcgcttctgcacagctagaacccgcatcgaaacgtgcggtgatctcactggacagcccagcaaccgatgccgaacagcagttccgcatggccatcgtcacattggacggcattcccggcaaccaagtcgagggcatctcacccctctaccatgtgagccaactcgacggactccccgacaaaatggccgcggtaatccagatttccacgcgcatgggcgcccatgatctgatcgaagcattaagcaatgtggaagcctccgtcggcgaagacttcgatctcgacctgatcgacatggaaggcgtgacatgcgatgagcctgactgcaaggtgccgtggcccaccgcacgcaaccatgccgcagtgcttgcgccatggctcgacatggatcccgatgcgcgactgggcaaggatccggtatcattcctgctggccatggcccccgataccgcgcaagtgggactgctgaccgacaattggatcatcggaggtacgctatgaaagcgcgcagaaccccttggtggtgctatgttctcgctgccgcattaggattgctggccggtatgggattggcgaaatatggcgagatttcaggtttgccattggtcggcgctccatggatcgtgcccgtggtgttggcgattctgggattcgtcgtgctgtatatggcattgcagatccacaaatacaccaccacggatcccgaaaaacgcgcgcagctgaaacctttggacccgcagaaggcgttcgccacactggtgtcatgcaaagcgttgggcgtggcaggagcggcgttggccggctggtatggtggacagctcatcatgagcctgccgcatggtgaggcgacgttctacagtcaggccatcctcgaatgcgcgatcgcggcaatcgtatgcatcgctgacatgatcatcggcattgtgggggagtggttgtgtcaaatcccaccaatcgacggtccggaaagcccgaaaatgaaaacggccacgcaacgaaaccgttacgcggccgcggcaaccaaatcggcaacccaaacgaaagcctgattgtccttacttcttcaaatcctcctcaggaacacggatcatcgcctcctgagtcatgcaggcaacaagctcgccatcctgcgtatataccttcgcctgccccaagccacggccgtgagccgcggtaggcgtatcctgcacatacaaatgccactgattgatgtcgatatcgcgataccaccacatcgaatgatcgatcgaagcgaacgaaatgccaggcgtggcaatacttaacccggcacgacgcaacaccggctccagcatcacctgatcgcaacccatagccaacatcgcacgatgcatgacctgcggaacgtcaaccgtgccgtcggccttcatccataccagctgcttgccggaatcgttactggcgctcttcttatcggcacccagcatgatcgtgcgcgtcacatgacgaatgtcgaacggcgacttttccgcatagtatttggcatacgaagacttttcggcaaacggctccatcagctgcttcgcactggtcaacgtttccggctccggcacgccttccggcatgggatcggcgaactcaatgccatcctgaccctgctcctggaagctggcgatggccgtcagaatcgaaccctgagcctgcgtgacattcacgcgacgagcggaaaacgagcggccatcacgtagattctccacatcaaacagcaaatcctgacgaatatcgccggcggaaatgaaatagccatgaatcgaattcggcagacgagatggcggaaccgttttggatgcggccatcatggcctgcgcgatcacctgaccgccgtacacgcggccagtggggaaatacaggctttcgccattcacatatgtgtggctgcggtacgtggaaggcgtgcccagctgaagcaccttcgccaaccgttgtaacggagttattgctgtctgcgctgtctgtgtcataacgggcctcgattctttgagtcgcatacgataaacgcttcgttctggaaacgagtctacgcaagggcggtaaatttcgccggattgttttgtaacgaatgcgtgagaagcgtgaacggcaggtaatcgtcaaacgattcacatacggcaaagcgccgcacttcgtaacgaagcacggcgctttgctgaaatttgcgagtaacgttcgcaattatggtcttgcttcgcaaggctcattgttgccttcgttcggctgtcgcctcactcaggccaagcctacagacagtccacaggactgtctgcttaacggctagcctgtggccctgcaattatggtcttgcttcgcaaggctcattgttgcctttgttcggctgtcgcctcactcaggccaagcctacagacagtccacaggactgtctgcttaacggcttagcgcgttagcttgcgatggagacggtgggggcgagccgcgtcttcgccgagacgagcgacacggttctcctgataggcctggaagttgccttcgaaccagtaccacttggccggattctcatcatcgccttcccacgcaagaatatgcgtggccacacggtcgaggaaccaacggtcgtgagagatcaccacagcgcagcccgggaagccaagcagtgcgttttcaagcgattcaagagtttcgacatcaagatcgttggtcggttcgtcgagcagcagcaggttgccgccctgcttcagggtcaacgcaagattcagacgattgcgttcaccaccggacagcacgccggtgagcttctgctggttggaacccttgaaaccgaaggacgccacatacgcgcgggtcggtacttcaacgccggcaacctcaatgaagtcaagaccgtcagacacggcctcccataggttcttattcgggtcaagaccggcgcgattctgatccacatagctgatctgcacggtctcaccgatcttcaacgagccagacgtcaacggttcaaggccaacgatggtcttgaacagggtggacttacccacaccgttcgggccgatcacgccgacaataccgttacgcggcagcgtgaagctcagatcgtcgatcaacacacggtcgccgaacgccttgtgaatatgctcggcttccagcacagtagagcccagacgcgggccagccggaatctgaatctcggagaagtcaagcttcttgttgttgcgtgcctcctgctccatctggtcgtaacgctccagacgagccttgttcttggcctgacgggccttcggcgaagagcgcacccaatcaagttcgctcttcaggcgcttggcgagcttggcgtccttggcgccctggatctccatacgcttggccttggtctccaaatacgtggtgtagttgcccttatacgggtacagttggccacggtcgacctcgcagatccactcggccacgttatccatgaagtaacgatcgtgggtaacggcgatgacggcacccttgtactggtgcaggaactgctccaaccacagaatcgactcggcgtcaagatggttggtaggctcgtcgagcagcagcagatcaggagcctccagcagcagcttgcacaatgccacacgacggcgttcaccaccggagcataccgttaccggagtatccggatccgggcactgcaaagcatccatagcctgctcaagctgagaatcaagatcccaaccgtttgcagcatcgatatcgttctgcagcttgcccatctcatccatcaaagcatcgaaatcggcatccggattggccatctcttcgccaatctgattgaaacgagccaccttttcagcgatctcgccgaacgccatcttgatgttctcgccaacagtcttggtgtcatccagcggtggttcctgctgcagaatgccgacggtataacccggagtcaaagaagcctcgccattagacacggtgtcgagtccggccatgatcttcagcagcgtggacttacccatgccgttcgggccaacaacgccaatcttcgcgcctggcaggaagctcaaagtcacgtcatcgagaatcacacggtcgccgtaagccttgcgggccttgatcatctggtaaatgaattcagccaatgttgtgttccatccttaagaaacgttggaattccagcgtgttgcatgagcggtcaacggaaactcaatcaaggattccggaacgcaacccatgcacaataccgtgcataattatcccataccccatctacacgacggtatgggcgaaagtcgtgcgctcaggcagtaagcggaagcagcagatgctcatgcaaagcaggacgaacgatattgtcgaaatcaccagattccgggcattgaatcgcaacaaccaaaccctgcttcggcaaaaccgtagtaatctgaccgtacgcaccatccgcacgatatgccccctcataaggcgacatccagaactgatagccataaccgcacgtccaaatattgctatacggagtgtcgatctgcttaccggaagcctgcttgacccacgattcgctgacaatgcgcgtgccatgccaagtgccatcattcaaatagatctggccaagtttcaacatattcgcaagcgacatgtagatcccgccgcctgcaatcggatgaccttgcggatcacattcccaaacaggccaaccctgatccaacttggaaaaaatcgtgccatacaaatactcgccaagacgcatgccggcagcctgctccaacatgcggcccgccaaatcagaatccgcagacgaatagcagaacgtgctgccgggctccacctcaaccctgcgagagaacatgtaccgtaaataatcaggcgcaccaacaccactgcgccggtcagggttcatcaaatacgcatgattgaaaccgctcgacatagtcagcaagtgcctcagcgtgatctggcccaactccagttgcgcatcggagggaacatactcggggaacgagtcgaccaatcgcgaatcgagcgacagcaagccatcttcaatcgcaatgccaatagccgtcgaaacataacttttcgtatgggaataaatattgcgatcctggtcgggaacgaaatgacgttccgcgataatggcgtcgccatccgcaatcgcaacggcttcgacgggcagggactcgctttcaatgagtttgacgaaatcgttgaacatatcgatggcacccatgaaatctcctttgacactgccctacggtgcattacggaaactgtaacgtaaggcggttacgtacgattgttacatcaaacgatttttcctaagcctgtcgctagatggagcgcccgaaaagccgctaggtgccatgcctgaaaaagtcgttaaatgataatgccttcgcaatgatcgatctcgtgctggatgatctgcgcggtgaaaccagtgaatgtggcatggcgctcgcggaacttgcgatccgcatacgagacctcaatgcgctggaagcgaaccgtgcggcgctcgcctttgagagacaggcagccttcggaggcgtcgtaggcgccgtctttcgcagtgatcgtcgggttgaacattacgaagatgcgaccgccgaaatcctcgtccacgaatgcaatgatgctcttcgagacgccgatcatgtttgcggccatgccgacgcagccattgcgatgtgcgtcaagcgtgtctttgagatcctgtgcgacggcaagatcctcgggcgtattgagcgcctccgtcgacggctggctcaaaaacggaatggacgtcatgatttcgcgctgcatgtggtgtttcctctcgctggttcctttgctggtctgccaacattgtatggcgttattgtgcgacgccgtacggcgatgggacggatgaccggttcgcgcctattcatttacggaatgtctcgtggagattttgaaatgtgggaccgcaatcgacgcaatatgcttggaaccgtggatgacatgcctcaatatcggaaatacatgacgcaggcgctggaactggcccataggggagccggttgggtgaatccgaatccgttggtcggcacggtggtggtccgcgacggcgagattctcgcagccggataccacgaccgctaccgcggaccgcatgcggaacgcatggccttcgactacgccgacgagcatggtatcgacatgcatggagccacggtcatcgacactctcgaaccttgctgccatgtcggatcgcagccggcatgcaccgatctaattctttcgcacggcataacgcgcgtcgtggtcggttcgatcgatccgaatcccatcgtggccggcaaaggacttcgcattcttgaggaaaacggtgtggaagtggtatatgacgtgatgcgagcggaatgcgacgccatcaatcgccatttcttccactacatcaccacaggaatgggggtgcggatgtttttttggacggtcatgcgaccagtccaaggcttttcctgtattgcatcgggctttgccagcccagtgatttcttgatgcgtgtctcattgtagtgggtcaggtaggcggcgagccgttcgcggaaccgttcgtagcccacgcccctccagtcgcggcagtggaggaactcgttcttgagcccgccgaagaacccctccatggcggcgttgtccggcgagcatctcttggcgctcatggagtgggtcagcccgtgctcctcgcagatgcggatccatccgggccgccggtaatggcacccgcggtcgctgtggatcacgggacgttcgccgttcccgagggtggctatcgcgtcgagcagcatgccgtcggccatggccgcgtcggggcttctcgacagccgccaggagacgatcttgccgtcgaagcagtcgacgaccggggacagccagcacttgtagccgtccatggcgaactgggtcacgtccgtcagccacagcatgttgggacgttcggcgtggaagtcccggttcacgaggttggcgggcgcccggccgatctcacccccgtaagagctccaccgcttcggtttcctcaggtatacgggcctgagcccctcctcccgcatgacgcggcgcacgaccttctccgagacgaccagcggatccgccgggtcccgccgcagcatggcgtggatggtgcggtatccccacacgcgcccgccctcctcgaacaggaggcgcacccgttcgcgcaggacggcgtacttgtcgacggcccgcatggccgtgcgcccgtaatagtaggtgctgcgcctgagccccaccgcgctgagcgcgtccgcgagcccgaactcacctctgaccgcgtcgacgacccgcgccttctcccggctcgtcagcccggagggatccaggcgcgggtcgcctgcttttaaaacattgatggtctctctcatcacggcgttctccaactgcagggcctccagcctgcgtctcaactcgaccgggtcttcgcacccgtcgtccaccgccgggacgcgcgcatcatcgtcgtctggcatgagcccaccgattcctttcctctcgtacgcggcggcccacctccacacgctcgccggcgagcagccgacgtccctgacgacggcggcgtaatgctccccggcggcgacgcgcctggcggccccccaccctgacgccaagcgtatacgagaaccgccggccccgcccatgcctggggtcgcgggacacccatctcgccaggcacgactcggacggataccccaactcggcgatcaccctccccggcgtcatgccctcactgaagtacaaatcgacggccctctgcctttgctccctactgaacacgacggactccaatccggacgctcacgcgtccaacattttgtccgcacccctcctgcgaagaatgttgataaatcaacgtttttagacctttttcctatttgacaaatgatttaactatagttactatgtacttcagtattgttttggcgcatgatggcaacgttttgcgaagatatgagaacgatatgagcagtgaagtatgcaatgaggtaggaatggctctggaatgttccgcccgacgagccgacggcgcgggacggtatgtgcgtcttgatgaatgcggtcttgccgtcgaagtcgactggcacggaggaaacgggtcccccgccgatccgtggcgttgcacggtaacggtgcgcaatgacggctccgttgcgttcgaaggggtcgttcgcatcgatatcccgattcgggttgacggtgaaccgcggttcttcctgccagggttcatgtatgggcgtaatcgtggagaggcgccgctgcgaaccgcgacgaaatttccccggcttcgtgaacggagcgaactgccagcctcatcatggtggatgattcgaggagacaggctgtccaatccatgtgcattggccgtgacccgttcccgtgtcgtcggtgtggtgtccagcccctatctggttgaccgcggtgatgggatgttggtcggacatgaggcatgtgatgaactgcctttcgtccagtatgcgggattcagctgcatgttgccgacgcctggaatcgtgccctgcgacgaccacgcctcggtgggcgtgactatcggctatgagaacgcgccctggttgttcgtcagctcgacggatatccgcgaacgtcctgactcggcggaagggccgattacactggcgcctggaggcgcggcgattatgcgcttggacgtcgtcgacgctcccgcccgggatgaacgggctatcataccggtgctggaaaccgtataccgtcgttttcatgaaccgccgcgtcaggtcggcgctcccgctcgggctatacgcgacattgcagtcgccgttgatagagacgcgtggctggaggacgaacacatgtacgcggggtttgtcttcgaccatcatagtccgggagatgagatcatcgaaggtaagccgtatatgtaccgccggttgggatcgagtagttggaccaacggcatggcctccgcggtaccgatgttggcgtcggcttggcggttgggggacgatgccatgcgtcgtcacgccctcgacggcatcgagcatatcatccaacattgcatcaacccgacgaacggattgccctacacggcggtggaacatgagcggtggagcaaccgcggttggtggttcgacggactgtccaatcccggacacagcgggtaccttgtcgggcagacgatgtactcggcgttgcgggcgtggcagatcgagcggcggttcggcggaatcgatcactcggactggctgaagatcatcgggaacgtcattccccgattggcggcagggcgcaatgcggttggcgaatacccattcgtgttcgatgagatggacggctcaggagccgagtacgaatcgttcggcggtgtgtggtgtttggccgcatccgcgtattgggctttgctgaccggcgaccactcggatctggatgggatgctcctatccgaacgtcattatcatgaccggtacgtggcgcatatggaatgctatggtgcgccgctggatacatcgaaagccgtggattccgaaggtatattggggtatatcaaggcggtcggatgcctatacgccattaccggagacgctatgtatcttgaccggatgcgagaggcgttcgcctatgaatgcagtttccgcttttgctggaattcgcccgttggcgtaccgcctctgaacgaagtcggctggtcgagttgcggaggcagcgtcacttcgaccagtaacgcccatatccatccgatgtcaagtgtggccatcgaggatatggtttattacctccgatatcggaacgacacatatatcgcgtcgcgtttgtgcgatgcggtcggctggagctgccagacatataacctcaaggatggtgagtacggatatgggcgggtcggctggatgtcggaacggttttgtcactgccaggggtttttggacgagaggtacccggatggaagcctgtgcagcacgtggcgttgtctgatgccttgggcggcgggagcgatcttggacggtctgacgggtctgtactgggacgtcatgccgcatgatgagttgccaaccgtcaccatggtatcgcgggcgatgagttgcgtccatgatgagaaaggatgaaacaatgggtgcgggagccatgggtcatatggagaccagcctgttcgaacagtgcggctacagccgcgaggccatccaggcccgcctggagcgcaactggtatgagatgttcgaaggcccggacaagatctactgggagaacgacgaaggcctggggtacgtgatggacaccggcaaccacgacgtgcgcaccgagggcatgagctacgcgatgatgatcgccgtgcagtacggccgcaaggacgtgttcgacaagctgtggggttgggtcatgaagtacatgttcatgaccgagggcctgcaccagggctacttcgtctggtccgtggaccccagcggcgtaccgaacgccgacggtccggccccggacggcgaggaatacttcgcgatggacctgtttctggcctccgcgcgatggggcgacggtgaaggcgtgtacgagtactcccgccacgtccgctcgatcctccacacctgcgtgcaccagggcgaggacggtgaaggctatccgatgtggaacccggagaaccatctgatcaagttcatcccggaaaccgaatggaccgacccgtcctaccatctgccgcacttctacgaggtgttcgccgagcgcgccgacgaggccgaccgtccgttctgggcgcaggccgccaaggcgagccgcgagtacctggtcaccgcctgccacccgcagaccggcatgaaccccgaatactcgaactacgacggcacgccgcacgtcgacgaacgcgaccactggcacttctactctgacgcctaccgcaccgccggcaacatcggactggactgcctgtggaacggcgtcgtgccggacctgtgcgacgcgaacgcgcggctgcagcggttcttcctcgaacacgaccgcacctgcgtctacgcggtcgacggcacgccggtggacgagaccgtgctgcacccggtcggcttcatcgccgccaccgccgaaggctcgctcgccgcgatgcactcgcaggaaccggacgcgctcgacaacgcgatccgctgggtgcgcctgctgtgggacaccccgatccgcaccggcacgcgccgctactacgacaacttcctctacgccttcgcgttcctggcgttggcgggggaataccgcacctggtgaggtgccgacagacttgaacccatcggttgcggggccattccgttcgatgggttcggaacagggctgacgcgtcaatacgtcagcgagagacaagagtgaaggaggtgcgagcgaacgggttcgggggcagagtagctgccgaaccgaacggcccgatacgcgggctacgcaaggaatacaccattatcaatgaggaaagtgatggatacacattgttcaatacaaccgatgaacgtggggcgtccaagcgccgtggcatcgtcgcggcgcttgcggccgtagccatgctggtgccgctggcattcgctccgtcggctaccgccgcggaaggcgactactccggtggcatcaagggcgagtacaacgctctgggcatcgccgccggtgtggcgaccgaagcctatagcggtctcaatagccaggaacggcaggatacggtgcttgccaacttcaaccagatcactccggaaaactcgatgaagccggaaggctggtacgacggcaatcatgagttcgccatgtccgataacacccggagcctgttgaagttcgccagcgacaacaacatccggatctacggccacgttctggtgtggtactcccagacgcccgactggttcttccaagcggacgaatggtgtgaggacaccaataacaccgccggtgtcaccagctgcccgctggccgacaaggccacgatgcaggagcgtcagcgtcagcacatcgagaacgtcgccaaggcgatctccgatgagttcggtccgttcggcagcgacacgaatcccgtcgtggcgttcgatgtcgtcaacgaaaccgtgaacgacaccgacaatccggacaccaacggcatgcgcaattcgctgtggtaccagacctacgacggtgaggactacatctatgacgcgttcgagaatgcgaacacgtacttcaacgaggtgtacgccgatccttcggacgatcatccggtgacgttgttcatcaacgattacaacaccgagcagtcgggtaagcgcacccggtatgctgccctgctggaccgtatggttgccgaaggcgtgccgttcgacggcatcggccaccagttccatgtgacgttgaccacggcgacctcgaacctggaggccgcgctgaccgacatggagcgcttcaacaagaagcaggccatcaccgaactggacgtgacgaccggaaccccggtcacggaggccaagctcatcgaacagggccagtactactatgaagtaaatcagatcatccaccgtcacgctgcgcagctgttctccgttacggtgtggggcttgatcgacggactgtcctggcgtagtggcgaaggcgctccgctgctgttcgacgacaacctggagaagaagccggcgtacatcggctacatcggtgatagcgccaaccttcccgagccgttgaagagcatgaacgcattcaaggatgacgccgtgggcatcgactcggcgcttcccggtaccgtggccgagtccggcgcgtcctctccgtgggaacgtctttcgctggtcgagatgaccccgtctgcgaatggcgccgtttccggctcgttcaatgtctattggaaggacggctctctggtcgtctacgcggatgtcgccgatgtcagcgcggcggatgacgacaccgtcaccgtgcgtgtgggtgacgccgagtatacgatcggccgcaacggtgtgaccggcggcgagggtgtgcaggccaacgtcgtttcgtctgatgccggatacgaagtcgtggccgatatcccatacaccggtgcagagaaggacatcgtcgagatgaacgtcatcgcgacggattccgccaccacggagaccagcgcgtggagcacgaacgacaccggcgccgtcacgctggccgagccgctgagctacacggaagccgtgaaggttcccgccgacgcccaagctccggtcgttgacgccgacccgtcggatcccgtctgggcggaagccaacgaggttcccgtggataaggtgaccgccgccacgccttcccccgaggcgaccgctaccgccaagaccctgtggtcggacggcaagctgtatgtcctcatggaagtgaccgacgcggacatcgacctgaccaactcgaatccgtgggagaaggactccgtggaggtatacatcgaccgcggcaacaccaagagcggccagtacaccaacgacatccagcagattcgcgtgtccgccgatggcgcggagctgagcttcggctccggcgcgtcggaggatgtccagaagtccatggtccagaccgccggcacgatcgtcgatggcggctatgtcgtcgagatggccatcgatctgggaacggctgaggccggcaccttcgaaggtgtcgacttccagatcaacgacgcgaagaacggtgcccgaatcggcatccgcaactgggccgatccgaccggcgccggctatcagacggcgtcccattggggcgtgctgcgtctgctggccgattcctccgaaaccgagacccccggcggcgaggagacccctggggggggtaccgacaagcctggcgacgagaagccgcagccttccgacgatgctgacaacgacgacaagatgccgcagaccggttccgcggtcatcggagtcgccgtggtggcgttgctgctggttgccgccggatgcgggctggtcatcgctcggcgtcgatgagacttgtacacccgccagcgcaccgaatcgtttcggcccctgcaaggccggacgacaagaccgcaagcgggtgcacaagctgagagcgtaagcgctcagttcctgtcattccataggccatggcattggtggtgcaagcctatggaatgactcttcaataattgcggcgcttcctgaaagcgccgatggtaccgacgtttgtcgtaatgtttgagcgtgaaattctggtttgttcgtcataaatggtgagcgtgaaatcccgtccggcatggccggacgcggggatgcttgccttatggaaggcggactggacatggccacgaggaagcggctggcgaacaggttcagggcggagtacgccaggggaacgaagaagcagaagggcgaggtcctcgaccggctcgtggccgtgggcatgggccggtccacggcacggcgcctgctctcgcaggcggtcgggtccgaggaaagaccggggccgggccgcggccgcagaccgaagtacggcgaggaggcgcaacgactattggagcggttgtggctgttgatgggcatgccgtgcggtccgtacatgaaggcgatgctcgaccagtggatccccgcgctcagggccgacggggaactcgacgacgtggacggggacgcgctcgagcaggtgtgctcgatgagtgcgtcgaccatcgaccggcggctgcggccgctcaaacgggcggccatgcccaggggcatgtcgctgacgcgtccggccggcgagcatctgcgcaactcggtccgcatccgcaagtgcgccgacgagatcgcgcgcctgccgggcctggcggaggccgacacggtcgcgcactgcgggcccagagccaggggcgagttcgccaggacgctgacgatggtggactacgcgaccaactggaccgtgagcgtcaccgtgcgcaacaacgccaagtccaacatccgcagggccgtcgacctggcgatccccctgttcccgttcccggtcacctgcttcgactccgacaacggcacggagtccgtcaacgacgagctcatcgactggctccagcacaaggacatcgaacagaccaggagccgcccgtacaggaaggacgaccaggccaccgtcgaatcccggaacaaccacgtcgtgcgcaggttcgcgttctactggcgctgcgataccgaggagcagcgcgacctgcccgaccggctgtgggcgaagacctacctgctgctgaacctgttcaccccgacgcgaaagccggcccgtatcgagcaggggcgcgacgggcgcaggaggaccgtctacgaccggccccgcaccccgtgggcacgcgtactggaatacgatgcggccagccgcgccgacggcggccggggctacgtcgacgacgccacccggacgcgcatcgaaaatctgatcgcctccaccaaccccgcccggctgggccgcgagatcgccgccatccaggacgaactcgaacggctcagccgcgaacgcaccgaaggcatggcgcgccgacagggcctggacatgggatacttgggaaaggtgatcgaacgcatgcgcgccgacgccgaacaagacaacaaataggaacgcaagcaccgtttcgcgctcaccttcaatgacgaacgaacaacggtttcgcgctcacctatttatgacaaacctcggtacaaggaagagtgggaggaatgatgacgacgatgaatgaggggcaggataccgtaacgctttcgccgctgttcggcgaagggggagtgttacagtcaggtgccccgttgagaatttagggaacgggaaggccctgttcgcaggtgcggattaccattgccgatcgatcggccgacgctgtggtcggtgacgatggagcctgggtcgtacaactgggtccgctggaacccggcggcccctaccggctggaggtgcgggtcgacggcggcgacgaaccggtgatcgcgcatgacgtctacgcgggcgaggtgttcatctgcgcgggacagtcgaatatggaataccaaatggagttcctgcgctggcggtacccgtcggaatacacgcgcgaacccgacccgttgctgcgccactgcaaggtccccgtccggttcgacttccatggtcctcgccgcgacttcgacgaaccggtacgctgggtcggtgcggtcgccgacacgctcgacgagttcaccggcgtcggatatttcttcggacgcatggttcgtgcatggctcggcgtaccggtcggtctgctcaacatcacgctcggcggctcgccgatcgaatcgtggatggacgaggagacgctcgccgcgtggccgaaggcgctcgccgacctggaaccctaccgcgacgacgaggtggcccgcacccgcagcgaggagagcatcgccgcaatgaaccgctggtatgaggacctgcggacccgggagaccgaagcccaatccgaggatctgggccacggcacgcttacattgcccgcgttcctgaaggacgccgatccgcgactgaccggattccgcggcgtgatccacctgcgccgcacggtcacgctgcccgcctacgcggccggacaatcggcggcgctgcatctcggtgccatggtcgactccgacgaaaccttcgtcaacggggtcaaagtcggccagtccgaacaccagtacctctcccgcgactacatggtgcccgaaggcgtgctgaaggccggatgcaacgagatcgacgtgcgcctggtcgtcgaacacggcacgggccgcgtgacgccgggcaagcacatgcacctcgacatgggcgacgactcgtacaatctcgacggcacctggacctactccatcggcgcacgcacggacgcggactgccccggcgaggacttcgtgcgctggaagccgctcggcctgtacaacggcatgaccgcgacctgcgccgggtacgccgcacgcgccgcgctgtggtaccagggcgagtcgaacactggcgacgtggcggacgactacggccgtatgctggccgcgatgatcggctgctggcgcaaggcatgggggcagcagcggctgccgttcctcatcgtgcagctgccggtgttctccatcgacggtgtggaggacggcggctgggcactcgtccgcaaacaccagtggcaggccgccaagtcgatcgaggacgtcgccgccgtggtgaccctcgacgcgggcgattggaacgacctgcacccgtggaacaagagcgtggtcgcagaccgcctgttcgccgcggcgcaacgcctcgtctacggcaaggacgacgcgcctcgctcgccggaaccgaccggcgtgcggctggccgacggccggctgaccatcgccttcgacgacggcaccggcgattgcggtctggacacgatggacggcgccgatccgggcgagttcgaattggtgtgggaagacggctcccggcacaccgtgccggcgcgagtcgaaggcaacaccgtggtcattgacgtgccgtggcgcaggccggcggccgtgcggtatgcgtggcgcaacgccccgagtcacggactgctgtgcgggtcgaacggactgccgattccgccgttcgccgaatccattgcgtaacggagcagttcatgaaaggaatgaacacatgagaaacttcatcttccacaacccggtcaagatctacttcggcgaaggccaggccgtgcatgtcaccgaggaggccaagtcacgccccggcgccgtgctgctggtctacggcggcggctcgatcaagcgcaacggcgcctatgacgatgtgacggccgcgctgcgcgaggccggcaacgaggtcgtcgaactctccggcgtgaccccgaacccgcgactcgataaggtcctcgaaggcgtgaacctggttcgggagcacggggtgagcctgatcctggccgtcggcggcggctcggtcatcgactgcgccaagttcatctcgctgggctccggcctgggcgaggacgaggacctctgggacgactacgtcgaaaccggcaagcccgcccccgaaaaccttgtgccgctcgtcgtggtgctgaccatcgccgccaccggctccgagatgggcgacgcggctgtgctcaccaactgggcccgcaaccgcaagctcggctacacatccttcccgctgacgccgaagttctcggtactcgacccgacctatctgctcaccctgccggctgaacagaccacctatggattcgtggacatgttctgccacacctgcgaacaatatttctcgctacccagcgacgacaatctctccgacgagatggccgaggccatccaacggcatatcctgcgctcctggtgcgcctgccgtcgccatccgcgcagttatgaggcccgtggcaacgcgatgtgggattccacgttcgcgctcaaccgcgtcatctcgcgtggcaaggaggaggattggggcacgcacggcatcgagcatgcgctctccgcctacttcgacatcccgcacggcgccggcctggccgtggtccatccgcactggatgaagtacgtctacacctcacgccccgaagccaccgcacgcttcgcccgctgggcggtgaacgtgtggggcgtggactcgaccggcaaatccgagcgagaggtggccgaggagggcatcgagcgctacgccgactttctgcgtctggtcggtgccccgctcaccctgtccgaggtcggcattccagccgatccggccacgctggacaagctcgccgaccatgccggcgacgtcggcggctcctaccgccgcatcacccgcgacgatgcgcgtgccatcctcgcctcgtgcgtgacaccggtcgtgttctgaggatgtatcaaggtgtatcgagggatggaggcgccggagacttgatatccacacctgccgtatacacgtctatgaccacacattttgccctccacctgtacatcgatacgcagccgccacggtgtacagggatggcaagccgtacatggatgtgcgatgaaaggcggcatctccgcttcggtggcggggcaggcttgcctcgccaccgagccgttgtcgggcacatgattcggcagcggccttattaccctgctcttggcggggtgcggaagtccttgaagcgttggattgcgcttccataccatgccgcggcggaatcggactcggcataacggtttggtttcgccgttttgctatggtatctcggctgtggcatggtacggagcaccgttatcaggtgctatggtgttccgtaccgggatcgggtggtacggaacaccaattgccgagcgttgcagaacctgtaccgcaaaggggcggccttccggttgtgatttcgatcgtgaacagccttgtcgccccgatgggaggcgtcaccgttggtggtcgcatattatcgggtcgtcaaccgcgtgcgaacagcgtcaacttggcgaagaggtcctcgagaatgaatcgactgtcaatgctgtcgtagatgcgtatcgttgggcgagacggtatgaaagcagtggagctgtccggcttgaccaatggtgccggcgcgtaatggaattcgccgcaatcatgcttcatcgccaagccgacggcgggcgaatctcccaatgaccagctttctcccgaagtccagaacgcgaaatcactatcattgtattttacgagattgtcgaacaggaactcgccgatggcgcccgcatcggcaagcttacattgtagttcggcaatgctcacattcatcgtacggtagacctgataaggcaccagccagagattcgcaccactggtcagcaccagattggcgccttccacgtcgttgccggagttgaattcgcgaatggcttcctcatcgttgccgggaagctgcgtgccgatccagatgatggtcatccggctgacgatttccgggtgcagcttgatggcggcggccacgttggtgatggcgccgaggcacagtacgaacagcggatgggtatcggtactcagagcttcgtcgagaatcgcgcgcgaagcgggggagaggtcctcatcagaggcgaggtgcagccccgccagcggcgtgcgggtgccttcgaataccggtacatcggagttcagcagttgaacaaccgtggatgcggtgcggaagctgcgttccatactgcccgcttcgttgaaatgctcggcgcaaatcgccttgaccatgaacttcggtgtcagcaacgcctgagcgatagcgaacgggtcgtcggcctcgcaatcggcgtcggtgtcgatgatgacacgaatctgcttatcatcacggactgtgaaatgaaaagtcatcaatgttcctttcctgatggtgatatgagatgaggctgctggccctcgtcgttccgataacctcatcgtgtgacgtcatcagccgcgccagcgcacgtactgctcgtacacctgcggggttggttcgccggtcagtgtggtctcgaccttgaccggccacgtcggcggttcggtctcgccggacagcacccaggcggcctgacgggccgcgccgatcgccacgtgctcgtcggtttctggcagttcgacgtccatgccgaggatcgcgggggccagcgcgcgcacggccgcgaacttggttccgccgccgatcagcaggatgcgcttgacgtccacgcccagacccttgaccagttcaaggcagtcgcgctgcgagcacagcagaccctccacgaacgcgcgggcgatgttctctcgcctggtgttcgccaacgtcatgccgtacagcgccgccgtggcgtccggacggttcggggtacgctcgccgtcgaagtacggcaccagcgtgatgcctccggcacccggttccgcggccgcggccagttcggccagttcgtcgtagcccacgccgagtgcggcgcgtccggcatcggagatgcgcgaaccgttgatcgtgcaggccagcggcagccaatgtccggtgcagtcggcgaatccggtcaccgaagcggtcatgtcgtaggcgggcacgggggagatggccgcggccacgcccgaggtgcccagcgagatgcttacgtcgcccacacccatgctcaggcccagcgacgccatggcgttgtcgccgccgccggggccgaccgccagcgcggccacgtcgtcgagcccgccggcctgttccgcggcctcctggaacgcctgccactaggcatcggggttcacgctggtgccgtcggggtgcttggcctgcccgaaacggaccatctcgccggtctcggcgtcggtgacgcgcaccttggtcgactgggtggacgtgtccacgccggccaccagaactctgctcattgtgcttccttgcaacatgccgccaaaaacgttgggctgatggcgtttgtccgaatacggttgccattatacgcaaatagtttgacgaatgaactatactggtgtgtgtaccattttcacaatgttgtgggaggcacgccggaggcgatgaagcatcagaacacatagaggagagctacgtcatgactacgttgcgcagaatcaaccaagacgatctacgcaaccacaatctctcggtggtcatcagcacgctgctgcgcgccgccgaaccgatgagccgcgccgaactggccaaacagacgggactgaccaaggtgaccatgtccctgctggtttccatgcttgtcgacaacggcgtcgtgcgcgaggggacgccgagcgtacaatcctcctatgggcgtcccagcacgccgctgctcatcgccggaggccgatactgcggcatcggtctgcaggtgaatacggacggctacggcaccatcgtgctcgacctggacggcacggtggtcgcggaacgctgggtcgatgcggatatgtccgacgtggacgccgacgacatcttctccgaactgaacgccctgtcgcttgggcaggaacggctgctggccgaccgcggatacaccgtgacgggtaccggactggcattgcccggtctggtcacggatgacatgaggctcctcatggcccgcaacctgggatgggaacagttggatctcaagcggttcgacgtggtgcggcggctggatgcgactgcgggcaacgaggcgaatatggcggcgctcgcgcagattcccggatacgccatgcaccgtgaggatgacggcatcgtggaccccaacgcctcattcatctacctgtccacggacgtcggcatcggcggcgcggtggtccgtggcggacatgtggagatcggcgaccatggattcggcggggaactcggccacgtgtcggtggagctgcggggtgcttggagacctatgccggccgcagggcgatggtggagtccgcgggcatcgccagcgggtcggcggccgcgcggcgcgagtcgatcaacgagctgatcgaacggtggcgtgacggggacgtcaaggccgcggtggtggacaaggccatcgaggccatggtctccgccatcgcgtcggcgatcaacatctgcgacgtcgatacggtgatgctgggcggcgtatggtcgcagttcgggccggagatcgcctcgcatatgcagggcaggatgcggcgccaggtgcttggataccccgaggcgcgcgccaaggtgctgatggccgacgtgacgtccaaaccggcgttgatcggttcggccgccatcggtctgcgccgcttcatcgacaatccgatgcggttcgtctcgaccaactgacggtccgcacacggatgcgcgcgcgttccaacctaggcctataacgtcggggcgcggcaagaggagccgcctgatacagtggcacgtggcgatcccgcccgggctgcgcaggtcaaggatcgtccgcggggcctccccgtgttcatgccgtgcgcagccaacagggaacaggagcgtcccatggccgaacatcctcaacaaccaaatcatcacaccatgcccgccgtagggaaaacgtcggacatggccggcatgtcggcacggagggatgcctccggtcccgccggattgtcgtccccatcctccggcggccgggccgcggaccgtcgttggcgctggacctcgtccgacatcgccgtgggcgccgcgttgggcgtggcctgcggactggtgttctggctgttcaacttcgcctacgcatggctgtccccgatcatcggcggcattctgcccggactggccagcatccggcacccgctgtggtatttctccggcacgttggccgtcatcatcctgcgtaagcccggagccgcggtttatgtgaacctggtgggcagcgcggccgagatgctgctgggcaaccagttctcgttcgggttcgtgttcgcgtccgcggcgctgcagggcgtgttcgccgaactgccgttcgcgctcacccggtaccgcgtgttcaacctgccgatctccatggcgtccggcgccttggtggccttggaatacggcgtgtacctgatgctgttccggtatcggggcgtatcgttcctcagcccccgcggcgtcatccatatgatcagtgaattggtcggcggcgtgctgatcgccggcgtgatgagctggtatctgtacagggccatcgccgccaccggggcgttggatcgttttgcttccggacgggcgctgcgcgacgatgccgaccgtcgcgggtgaccgctgtctccggtcggcggttgtcaggatgccgcccgttgacgagcatccgggcaaacgtccagcggcttgctagactataggggccggccacgaaccggcgtggggctgtagctcagtcggttagagcatcggactcataatccgccggtcacttgtccgatcagcagtgccgcaatcgttgtggctgccaatcccacggtgaatgacaccagcgacgcgcgaaacggtgtgcccaacgttccgcgcagtcgcgcgttgacggcagtctgcaacggcgtgactattccggtgagcactcccagcgcggcaagcagcacatgatcccctttcgtctcggcgacattgtactcacgacgccgatttcgggggtccggctgtgcgctgggacgcggcggttcggattgggagggaaggcatgcatggcttcgtgggtgatgcgggaagatacaggaagatgcgggaaaagcggggggggg

SEQ ID NO: 880 - DNA, 60537 bp, Unknown
  gut microbiota DNA sequence
gcaggcaccaagatacggaagaagaggagtcgtaccatatgaacaacatgccgcagcgtttggcgttcttcgccctgggcgtcgtcatcaactcgttcggtgtggcactgatcacgttgggcaatctgggcacctcggccatctccagcgtgccgtacgtgtgcagcctgcagttccccatgttcagcttcggcgtgaccacattcatctggaacatcctgctgattctggttcaggtcgtgctgctgcgccgcgacttcaagccctcccagttcctgtagatcatggtcaacgtgctgttcagcgtcatgatcgacgtaagcatggccatcctcggtgttctgcaccccaccatgctgtgggagcagttcctgtgcatcggcttaggctgcgtggcgttggccttcggcatcgtcatcgagctggcgccgaacgtggtggtggtgcccggcgaaggcgtggtccgtgccatcgctaaggtcagcggcgtgcgcgtgggcacggtgaaggccgtattcgacatcacgctgatcatcatcgccgcggtgctgtcattgatcttcttccacgggttgcgcggcgtcggcatcggcacggtgatttccgcggtgttggtcgggccaatcatcaacatcgtcaatcgcgtcttcaccttccagcaccgcatccaggcgctggccttgtcccgcgacgggcgttgacacctgactgtctggtcaccacagggccgggaatggtgacgcggaaccgatcgagcgaattgtcgatgcgcaccggttcgcgcgtctcgttccttagcgcggcgccgatgcgcaggtatccggtgccgtcgtcgcgcagcacggtgccgccgtccggatacggggtggaccgcagcagtgagaacaggaatgcgttgcgcgtggacgttgacgcctcatggatgagccgctgtttggagaccgcgccgaacaggccgcccgggttcgagacctcgattcggttggtgaacacgtccacatgcacgggcgtgccgagcgcgtccggggagtattcgcggtgggtcaacgcgttggcgatggcctcgcgcaacaccagttgcggatacatcggcggctgtgatggttgcgcgccggaatcggcgccgcctgggccggacgtccatgccatcagcgaggcgaccgcgtcatcgatcatgatcgggatcgggccggtgatggtttcggaggcgacgagccgtgcatcgccggtgaacacgtcgtcgcgtgaggtaccggggtagacggcgatggtgacgttgagccgaggaaagaacttctgcggataccggccgacggccaacagtcccgcaagcgtggggcgcggcacggatgcgatccgggtctcctcgtccgtgtcggtgtccgcgccgatatccgtgtcgtcttccctggacgcggttcccgccgggtcgcaatccgcggcatgtttcgcggcatgtttcacggtgtcgtccgcggggtggccggttggcatgcgtctcaggatgcgcaggtccagcatcatgtccatgtcggaacgctccgcaaagacatgcggatggcggttgcgctcgcattcgagcagcgcgtggacgagcgtgggattcaagtcgtcgagcgtggcctccgacacgaccgcgatgtcgtgctccggctggcgttgctcatcaagcagacgatcgacctcgtaggcggtcatcttgcggtcgccgtcgccggtgcggatgtaggagccgccgtgcgggccgaccgaggagacgaagcagggcttctcccgcggcagcatctcgtcgatgacggcgaacaccaaattcgcgccctcgaacgggcaggtcacgatcacgggccggaccacgggcgtgagcttctcgcaggcctggctcaacgcctcctgcatggcgcgggcgtcgaagccctcgaccggcgtgaaccccgccttctcgctcagccccaggatgatgtacccgccgttgccgttggagaacgcggacagcgtctcggtgatggtcgagctgattctgcgtttgcactccttgacctcgcattgctgcgtgtcgttgccgatggcgcgcagcaatgcgatgagctcggtcatcttggccgtgtagtcgtcgttgtccatcgctcctccgggggtgtgccgttgccgcctggtgacgtctgtactccggccgtactccatccggctccatctgtacgccgaccgccgcgggctcctgccactatcctatgccggcggcggcataggatagtggcgatgacttgcgcgggatcggtgccgtccgcgagtcggatatggtggggcccgcgacgggatcgttccccgtcgcgggccccaccgttaccgtatggtcgcgtggttcgcgggaatcagagcaccgcgtccatcgcctgcttgaggtcggcgatgatgtcgtcggcgttttcgatgccgcagctcaggcgcaccaggtcaatgccaacgcctgcttcgacgagctgctcctcggtaagctgacggtgcgtggtgcctgccgggtatagggtgcagctgcgcgcgtcggccacgtgcgtggcgatggacaccatcttcaggtggtcgaggaacgcggacaccttttcgcggccgcccggcacgccgaaggaaataacgccgcaagtgccgttcggcatgtacttttcggccagcgcatggtacttgtcttcctcaaggcctgggaagctcacccagctgatgcgcgggtcggcgctcagccactgcgccaccttgagcgcgttcgcgcaatggcgctccatacgcacgcccagcgactccaaatgcatgcccatgatccacgagttgatcggcgccggcgttgagccgaaatcgcgcatgagctgtgcggtggctttggtgatgtaagcggccttgccgaagtccttggcataggtcacgccatggtaggaatcgtccggtgtggtgagtccggggaatttctccgcatgggccatccagtcgaagttgccggaatccacgatcgcgccgcccacgcaggagccgtgaccgtccatatatttggtggtggcgtgcgtgacgatgtccacaccatactggaatggacgacagttgactggtgtggggaacgtgttatcgacgatcagtggcacgccgtggcggtgcgctgcattcgcgaacttttcgaaatcaagaacgatgagcgccggattggagatggattcgccgaagaccgccttggtgttcggctggaatgccgcttcgagttcttcctcggtgcagtccgggcttacgaacgtgcattcgatgcccattttgcgcatggtcacgttgatgagattgaacgtgcctccgtagattgcggaggatgcaacgatgtggtcaccgttgttgcagatgttgaagagtgcgaaaaagtttgccgcctggccggatgaggtcagcattgcggccgcgccgccttccatttcgcagattttcgctgcgatggtgtcgttggttgggttctgcagtcgggtgtagaagtatccggattcggataggtcgaacagtcggctcatctgttcgcttgacttgtatttgaaggttgtcgcctgaatgatcgggggtgtgcgggattcgccgtttccgggctggtaacctccctgcacgcagatggtgtcgacgtttttgctcatggatttccttctttcgattgggtgcttcgttgcgtagcgctgcggtgcaacaaacatgctcaccttatcactgagttgataattggctattcttcaatggaaacgccgaatagttcactgaattgacaaacttaggaaattgattttattatatacatcaaggcaggcgggaatccgcttgacgggaaaacaatgtcttgcgaaagtaaaatcaatagcaaaggagcaacccatgggtctgtgggatatcgaaaagattccgtatatcggtcgtgaaaagggaccgcaggagggtctggctttccattactacgatgccgacaaggttgttgccggcaagaagatgaaggattggctgcgttttggcgtcgcttggtggcacactttcgatcaggagctggtcgatccgttcggcaccggcaccgcccagcgtccgtggtacggcaagtactccaatgctgaggatgaggctctggccaaggtcgactacgccttcgagttcttccagaagctcggcgtcgagtacttctgcttccatgatcgtgatatcgctccggaaggcgataccctgcgcgagaccgacaagaacctggacaaggtcgtcgacaagatcgaagagaacatgaagtccaccggcatcaagctgctgtggaacacctcctccctgttcaccaacccgcgcttcgtttccggtgcttccacctccccgttcgccgacatctacgcctatgccggtggccagctgaagcactccttggagattgccaagcgcttgggagccgagaactacgtgttctggggtggacgtgaaggctacgagaacctgtggaacacgcagatgaagcgcgagcaggagcacatggccaagttcttccacatgtgccacgagtatgctcaggagatcggcctggacgctcagttcctgatcgagccgaaggccaaggagccgacgatgcaccagtatgacttcgatgcatccacagccatcgccttccttaagacctacgacatcgacttcatgaagctgaacctcgaaggcaaccacgccaacctggccggtcatacctaccagcacgagatccgcaccgcccgcgaggccggtgtgctcggctccctcgatgccaaccagggcgacaagctcatcggctgggatatggatgagttcccgaccgacctgtacgagacttccaccgtcatgtgggaggtcctcgccgagggtcagatcggccctcacggcggcctgaacttcgatgccaagccgcgccgcacctccttcgccgccgaggatctgttccgctcccacatcgcaggtatggatgcattcgctgcaggtctcttggtcgctgccaagatgcacgaggacaaggtcatcgagaatctgcaggccgagcgctacagctccttcgattccggtatcggcgcgaccgtcgagaacggcaccgcctccctggcctctctcgaggagtatgctctggatattccgcagtccaagctcatcgaagccaccaagtccgatcacctcgagtccgtcaaggccacgatcaacaactatatgatcgacgccctggccgaggcgtgagccgaatagggagtttccgttagggctcctgattcatcgctggatcaagcagtgaggctcggctgtgacagagccggatgtggtgtgccgaagcgtcggcgttccggcacaccactcatctttccttccttcttcctagaatttccttcgcaggcaagtcgtctgccggttatgtcgccggtgtacggcttgtttgcgtttttgggccaaacgaaagtttcgattgttcgcaatgatgcgatgctcacgaacgtttctgaataaggtgtatttatgaccgcgactattaccattaccaatcccattcttagtggaatgaatcctgatccgagttggatttgggatgatgagttccagcgaattgtgttggtgacttctacttttgagcttgtcccaggtcttcccatttacgtttccgaggatatgacgtgctggaagcatgtgtcgaatgtgatagatgctgacttggcaaggcgcctgcttattcctttcgtggatgattcgggcggtgtctatgcgccgacgctgcgcaggattcatggcaaatatgtgattgcatgcaccattgcccgtcttgatgatcgccgtgctatggaaggtggttgcacagaaagcgagctgatgcggttccacgccgcggagggcaattttatccttgaagcggattctatcgaagggccatggcgtggcccgttctggattgagggcgctgaaggcatcgatccagacatattcgaggacggggatggcaacgtgtactggacccagacccgtcctgcggtcaatccgcaatgggaaggccagaccgaggtctggacccaacgcattaatccggagacttggacttttgccgatgacggtcttcctgcgggatcgggcaagacggtaatatggcgcggatacggtatggaatcggtgtgggctgaggcgccgcatctctatcgcgtgggtgattatgtgtatctgatgaccgctgaggggggcaccagtttcgaacatagcgaaatggccatgcgcatctatgcgccgcatggactgcttcgggcgttcgaagcttacgaacgggaagcatccgaattgggtgagtgcattccgcaggttcgtgacggggaacgctgctatcttggcaccgcaatccgtgccttccatgcggataagaagaatccgattctcacccaccgacatctgggtttgtcggaaccgctgcaatgcgtgggacatgcggacctgttgcttcatccgaaactgggatggtggctggtgtgtctcggcgtgagggagacacggggaaagcgtgacggcgaattattgagctacttgggaagggagagctttgtcgctccggtatcctgggaacataatccggccgattggaagctggacggcaacggtgcaccatatacgcatgagggtgaccccggatggccggtgacttgcgctggtcttggccgcttggccgacgagatcacggttactactgaagacgatggcatcgccatcgagcctagggtgaaatcctcgctcgccggtgacgtggaacctgcgctggtggatgtggctgatggctcgacgaacgatgtggtggtgcgcgatgagcgtgatgtcagctaccgcagaatagcgaaactgccgacgctcatgccgattcccatgtccggttctttagtgatccggcagaattccacacattacgcggtgttttcgatgcatggcacggatgtgcgctacgagatggtgaatggagacgattcgcaagctgggtctgttgccgtacaggctgacggagtgcgtccggcggtacttttcgacgacaaccgcttgtcggtcatcgtgactggcatgcatggtttggttgattctgcgacgttcgtgcgtcaggggcaggtcctgctgagtgtcgatgctcgtttcctcagcaccgaatgggccggtgggttcgtcggttgcatggccggcttcatggcatagtttctacggaatttcaggatggttcactgctggtgttccgacgggccgtcttagaacgagttgaaaacgggtcgaaaggctaggagcgctgtgttctccctccggttgtgcctgtgaggtttgccccgctgattaaccttcgagttgctgtgtgctgttgcgtaccactagcgatgtcggcatgatgatgtgcggttggatcacgtcggtggacagcgcttcgaccagcatgcgtacggcggcccttgccatgtcttggagcggctgtcgtacggtggtcagcgccgggccaaggaatgcggcagtctgcacatcgtcgaatccgaccacggataaatcctcgggaatacgtaatcccagctgccttgccgcctcgtagacgcccatggcctgcagatcgctgccggcgaagattgcggtcggacgattcggtcgtttcaacagggagatggactgtgcgtaaccgccggaagtggtgaaatcgccttcggtgataagttcgggatcggcttcgattccatgttccgcaagcgctgatgtatatccgtccagacgtgctttggaacacatcatctcctccggtccagtgatgatgcctatgcgggtatgtccgagtgcgagtagatgcctggtggcgattacgcctccggtccagttgtccgcatgcaccgacaacgtgtccagatccggattaccgaatggatcgaacaagacgaagggaatacctctggaatgcagtttattccgctcgatacgtgtcagactggagaagacaagaatggcgccgttcacctgcctgcgaagcatgttgtcgatccaggatgagtccgggtgttgacgattgccaccttcggtggtgatgatgctcagatcgtgttgtttggcttcgcggatggctccgcgtaacacttcaagagcccagacattatcgaaatcttggaacacgatttcgataattcgttggctttttgcacctgtcgctttacgggaatacccataccgtttcaacaccgcgttgatggtttgccgcgtctcttcggaaacgtcggctctgccgttgagcgccttggatacggtggaaagggaataaccggtctctttagctatgtcagagagtcgtactgtagctttttttgccgtattgcgcatgagtcactccttcttcatttccatcatatccgaaaatgcgaacgaaagtttcggtttacgtttttcgaaactttcgatatgttggcaatgcttaaaaacgttgtaaaatcaacgaaaaatagttagttttctgattttacaaaaaacttgactttgtgtgatttgtttcggtagtctgtaggtacaacgaaaacgaaatggagactttcgaagggagtcaaaggctgattctctgtctgctaggggagctgcagcagcattcgttgcggtcatgcttcccgattcgacccattcgagagaaatcgttcctgtcgttgccatcattttgtcgatgatgacttggtcaataaggagaagacaatgaagttcaaaaccattgcagctgccactcttgcggtggcgaccatgttgggcatgggtgcctgtggctccagcgctggtgccaaagacgataagaccattacgttctggcataacgcaacagctggtgacggcaagcagtattgggaagatctggccaaagcgtttgagaagaagaccggtgtcaaggttcagattcaggccatccagaacgaggatttcgaaggcaagctgactaccgctatgcaggatcccgcctccggcccggatgtgtacatgacccttggtggtgccaagaccaaggacatggttgatgccggccaggtaatggatattactgataagattagcgataccgtcaaaaagcaaatgtcttcctcattggaatccgtgtcttatgacggcaaggtctatggcgttccggtcactgtccagcctggtggcatctggtattccaaggatttgttcaagcaggctggcatcgatgccgtgccgaccactttcagcgagctgaagaccgatgtgcagaagcttcgcagcgctggcatcgagccgatcgcactcggtggcaaggatgcttggccggtcggtcactggtactactggttgtccatgcgcgaatgctctccgaaggcctacgccaagggcgttaatgacaaggacttctccgactcctgctgggtcaaagccggagatgatctgaaggatttgttggatgcgaatgcttttaacgaaggattcctcaccacgacggcccagcagggcgccagctcgtccgcaggtctgctggccaatcataaggctgcgatggagctcatgggcacatgggagcctggagttctcaaggacctgactccggacaagaagccaatggctgaccttggcttcttcgccttcccgaccgtggacggaggaaaaggcgaggaaggtgctttgatgggcgctgtgaccggtttctctgtcaatcccgaggctccggacgctgctgttgatttcgtcaatttcatggctgagaaatcaaatcaggagaaatacgccactgcgttcagtaccattccggcttccgccgaagcttacgatgcggttaccgatgaaaatcttaaggcgatcctcgaagctatgaaaaagtctgatggcatgcagctgtggatggataccgctctcggcggaaatattggcaacgctcttaattccggagtggtgaatctgctttccggacaggggacttcggctgacatcgtcaaggcgatgaaggacgcagcggccaagggctgacagtgaacatggctggttgacggccaaaggagggtggatagatagatcttcatctgccctccttcctattcgagaaacgtatctggtagtggagaaaaccatgtcaagtacaagcaaagacgcggtgacgctgcgcgctaagcggtccaagaaaccgtccgatggcaaaatgcgtcgtaatgttgagattttcgtactgtccgcacctgcgattcttctgttcgtctgctttgtgattctgcctatcgtcttgggtgcttattacggcttctatcagtggaagggctacggccttccctccaagacaggtaaatttgttggtctccagaactacatcacagcgcttaaggatcccgcgttccaggcggcgattctgcataccttcgaggtcgtgatcggctcgttggttatccaggctccgctcgccatcctgttcgcattgctgctgaaccagaagttcaaggggcgtggtcttatccgcaccctcatcttcgtgccgtatgtcgtttccgaggtcatcgtcggcacaggatggagcctgttgctacagaagaagggcgccatcaatgagattctggccaacttcggcatcaatggtcccgattggctggccgacccgaaaatcgctatttggacgctgctgttgctgatcagctggaaatacgtcggtttcgccgtaattctgatgctcgccggcatgcaatccattcccgatgaactgtatgaagcagccaaagtggatggggcgagtttctggcagatgcaaaggagcatcacgctgccgctgcttgccccgacattgcgaatctgggtgttcctttccatgatcggatccctgcagctcttcgatctggtctatatcgtgtggggcaagtatgtgtcgaccaccgctggtgtgtccaccatggccacctacatggtgcgtgaaggtcgtggagccggcaactatggctatggttccgccgttgctctgatcatcttcgtgatctctttgatcatcgcactcgtctatcagaagttcgtgctgaaccgtgacttggacggtgctgttactgaacagaaagaagccgagaagcgtgccaggaagcgcgcaaaggaagtgcagcatcgtgaggttgctgccctggcaagtgaggtgaagtgatgactgccgcaacaatcgcaggacattccaacaaaagcgagtacagcaagaagaatggttaccgtaagtcatccaagacgccatggggcaacccaatcgtctacttcttctccctggtgcttgtggccatctgtatcactccggtgttgtacattatcttcggtggtttccgtaccaattcgcagatcaccaaccatccgtccgggatgccgaacccatgggtccccgacaactacaagacggtcgtcgaaagtgatattttctggacggaactgaagaattctaccatcgtgggtatcgccaccatggtaggcgtcgtggtgcttagcatcatggtgagctttgtcatcgcccgatacaaattccgctatgcgccgcttatgtacgcgttgttctctgctggtcttatgttcccgatgaccgttggcattacacctttgtatctgctgattcgcaatctgggtctggccaactccctgtggggtctgatccttccgcagattgccttcggacttcctcagaccatcatcatcttggtgccgttcctacagtcgattcctaatgagcttgaggaggcctgtcttctcgatggatgctcccgccttggcttcttctggcgcatggtcattccgctgtccatgcctggcgtggccaccactggaatccttaccttcgtgggaagctggaatgcctacatgctgccgctgttcgtgctcagtgatgccagcaagtacacattgccacttggcgtacagatgttcagctccgaacactccgttgacaccgcacaggtgttggccttcacctctctggctatgattccggccctgatctgtttcaccatcttccagaagaagatcgtcggcggcctgacaggtgcggtcaagggctgacggaatgtgacaacccacgcccggaagacgttcctttccgtcttccgggcttcatctcttatacaagaggtacattatgaagatttccaacccggtgctcaccggttttcatgccgatccttcaatgattcgcgtcggtgacacttattacattgccaattccacgttcgaatggttcccaggcgttcgcttgcatgagtccaaggacctggtgcattggaacattcttccaagcccgttgagtcggtccagccagcttgatatgagaggaaacccctcttcgggaggcatctgggctcctgacctaagctatgcggatggcagattctggttgatctacactgatgtcaaggtggtcaatggtgcattcaaggattgcactaattatttggtcaccgccgaggacatccacgggccatggagcgagccgattcgcatcaacggggtcggttttgacgccagcctgttccatgacgacgacggccgcaaatacttggtgcagcagacatgggatttccgtgaataccaccaccagttcgacggtatcacattgacggaattcgacgtcgacaccatgaagctcaagccagaaacggcccgcaccatctgggatggcacttcggtgaaggtcaccgaaggtccccacctatacaagaaggatggttggtactacctgtttgccgcagaaggcggcacggtgtatgaacatcaggaatctgtggcgcgttcccatacccttgacgagtactccttcgaagttatgccgaatggcccgttcatcggtaacttcgacactcctgacacctatttgcagaagcagggccacggagcgttggtggacaccccgtccggcgagtggtattacgcctccctatgcggtcgtccgtggcgtcatgataccgaaccggcccatggcacccgcggatggtgcacactcggacgcgagacctccatccagaaagtcgaatgggatgaggacggttggccgcgcgtggtcggaggtcacggcggacagcgttacgttgatgctccgaaagatgctatcgaaactttggccccaacgacgcgtgacgaacatgatgagttcgattccggcgagctcggtccgaattggaacacgctacgcgtcccgttcaccgacgccatgggcacggtgggcggtggcaaactggcattgcgtggtcagggctcgctgtgcaacctgtttgacttgtctcttgtggctcgtcgctggcaggcatttgatttcgacgccgaaaccaaggtgcgtttcgatccgaagaattacatgcagatggcaggcctgaccaactattacgatgacctgtgctggtcatgggcgtttgtcacttgggatgagaaacgtcacgcaagggtcatcgaagtggctcagaacgatttcaaccaatatacgtcgttcctcaaggatgacgccatcgtagtgcccgaagaggctgaggcggtatggctgcgcaccaaggtccgcacggaatactattcctacgaatattccttcgacggggaacatttcaccgagattccagtcaggctcgatgcgaagatcctgtccgacgattacgtgaaccaacgttacggcggcttcttcaccggcgcgttcgtgggacttgcctgcgtcgatctgtccggctacgacgcgcaggccgaattcgactacttcgactatcgggagctttccgataaccagtagacagtgccggctggcgacagagcgtccgccgtcagccggcatacacgacgggattgaattctatgggcaatgaggagcggacgagcatggttttgcaattgccgaaactgcttgacgacggttgcgtgctgcaggccggtgcgaccatacatatctggggcgccggcgaccctggacgcggcgtgctggtacgcctcgatggcaaggatcggactacgcgggtgggggacgacggctcatggagtgtgacgtacggtccgatcaaagcaggcggaccgtacgatttgacggtgcgttatgaggacggaaccgaatgcatctcgcgccaatgctatgcgggagaagtgttcctgtgttcgggacagtcgaacatggaactgcccatggcttgggtgcgtgcggactatccgctggagtggaatcgtgagcctgacccattgctgcggcaatacaaagcgattcccgattgtgacttcaacggtcctcgcagcgatcatgaccatgcgttctggcaggggtgcgatgcggaaacccttggagatttctccgcgctcgcctatttcttcggacgcaggatccgtcagtggctgaatgtgcccgtcggcctgttgaacgtttcattgggtggatcgccgattgaatcctggatggatgccgacgcattgcgggcgttccccgaagcgctcgctgaccttgagccgtatcttggcgatggcgtggcgtcgaagaaaagccgcgattccgttgccgaacgggaccggtggtaccaagcgcttggatacgaggctgtggccgatgcccaccatgaatggctgccattgatcgcgtgggactgtccggaatccaagaacatcgagccgcgcgacgtggcatggcatggcatacgtctgccgggatggtacaaggatcgcggacttgccggtttccgcggcgagattaccatgagaaaaaccgtgttcctgcctccgtcggatgcgggcaagcccgctctattgcgtctgggcaccatgaatgacgccgaccatacgtgggtcaatggtgtgttggtcggtggtcgaagcaatgtgtacgaaccgcgcgattatccggtcgggtccggtgtgctgcgcgccggtgcgaatgaaatccgcatgcgtctggttattgagcgtcccggcggacgtgtgacgcccggcaaacggatggcactgaccatcggagacgatgtcttcgacctgtccggcatctggcagtatgccgtgaccgccgaagctgaccgcgattgcccattcgaggatttcgtcagatggaagccgaccggcctgtacaatgccatgctcgccccgtgttttccatatgcggtgcgggccgtgctgtggtatcagggcgaatcgaataccggcgatcgcgccatgcgatatggcgacgagctgaaggccatgattcaattgtggcgcgtcaaatggcatcagccggatatgccgtttctgatcgtccagcttccaaaattcgacatcgacgccattgaggatggaggctggccactcgtccgcgaacaggaatggaacgtcgcgaacgaacttgaaaacgttgcgacggtggtgacgcttgacgccggcgagagcaacgatctgcatccgtatgacaagaagctcgtcgcggatcgcgtgttcaatgccgcgatggatttggtatacggtcgccaggctcagcctcaaccggccgtggaaaccatcgaggtctgcggagatctgttgcggatgcactgtgtgtggcggagtcgctcggacgagcggatccgatcggagggccgccggctgatgacgttggacggtgacgctccccaggaaatcgaatttctatggcgcgactgcgccacatccgcgcgggccgaggcatggctggacggctgtgatatcgtggcgcgcatgacggcgcgcaggccagatgaggtgcggtacgcgtggagcaacaatccggaatccggactcatctgcgacggcgatggcatgctgattccgccgttccgcctgacattgcccacggacgatgataaggggattcatgcgtagacaggtcgcgcttcgacaaggactcgtcgatggattctccgatacggactctgtaattaccgtgtttcgtggcatcccctatgtcaagccttcccgttggcgcattacgatttgtctcgtgtcatgattcggtattggacgaatttcgcggcgacgggcgatccgaacggttccggattgcccgaatgtccggcgtgcggacccaatggccaacgatacatgctgctcggcggatgccacgatacatcggatagtatgtcgtatgccaggtcaagtagatgaatatagtatagtgtgagcgttcactatagtgtggtggaaatcgtgacgaaggagacgggtatgacgaaggagacggagacgcagatcgcgtccgacgaggatctgactaggctgttcgccggcaagccgacgcaataccgcaaatcgaagtcgctgccgaagtttactggcgaggccatgcgtacctgcgccacgatcaaccgcatcttcttcgatgatcctgacgaggcctaccgcctgttccacgagctcgttcccgacgcgggggagggcgtacaattcacgccgccgttcaatgtggattatggcatcggcctgaccattggccgaggcacgttcttgaacaaggatttcatggtgtgcggcggcggatatgtaacgcttggcgaggattgcctgatcggcccgcgttgtaccattgccacgccgaatcatgccttggatgcggcaacgcgactggctggctgggaacatgcttcgccggtgacgattggtgacaacgtgtggtttggtgcgaacgttacggtcacgcctggcgtcacgattggctcgaattccattatcggcgcgggttctgtggttacacgagacattcccgccaattcgatcgcagtcggcaatccggcgcatgtaatccgcgaaattcccgaacgcgatcccgccttcgccgatgtcgagggtatcgtctgacgttgggttacggtgttccctcagagcgaattcgcgtgttgccctactgctagacgtgttgtcgcacgatttcagttttgacctcacgatttgatcggaatatcgcacgattttgtttgagacgaaaatgggtgccgttgcggttggttgtgacggcacccattttgcgttgatttagtgcgatttatgctgattgatcagccgcgggcctttgcgtaggcttcgtacacggcttcagtcggttcgccggtttccacgccgtcgatggtgagctgccatgcgggcggttccgtttcgccggacagcacccaggcggcctgacgggcggcgccgatggcaacatactcgtcggtggtcgggcgggtcacgtccatgccgaacacgctcggcgcgagcgtgcggattgccttggacttcgcgccgccgccgataagcagaatgcgggaaatctcagcgccaagcgaacggataagctctaggcagtcgcgctgggagcacagcaagccctcgacgaacgcgcgggacatgttctcgcgtgtggtgttggccagcgtcatgccggaaagggttgcggtcgcgtccggacggttcggcgtgcgttcgccgtcgaaatacggcaccagcgtaataccgccggcgcccggttcggaagcgaatgccagggatgcgagttcgtcgtagtcgacgccgagggctgcacggccggcgtcaagaatgcgcgatccgttgatggtgcaggccagtggcaggtagtggccggtgcagtcggcgaagccggaaacggcaccggtcaaatcgtaggtcggattttcggaaatggctgctgccacgccggaagtgcccaatgaaacggaaacgtcacccacgctcatgccaagtccgagggacgccatggcgttgtcgccgccgcccggtgcgatgatgcaaccaccctcaacgttcttgccggcgatttccgggcttgccttgactgcggcggcatcgtgcggtccaagcacggtcggcagcatgattgcgttggcgtgctcgcgtgccgcttcggtaccttccgctggctcaagcaccatggcgatcagatcgcggcggtattcgttggaagcggcatcgtaatagatggtgccggaagcgtcggaacggtcggtgaacagcgcttccaagtgtgcgtcctcgccttctgcgaccgggccgtagccggcgatacgccagctcagccaatcgtgcggcaggcagatcgcggcgatcttcttagcgttttccggttcgttttcagccacccacgccaccttggttagcgtgaaggaagcaacgggggaggagccaacggccttgacccaacgctgcttaccacgcgcgatcacatcttccggttcgccttcttcggcgggagcctcgcccatcttttcgatgagggccgcggcctgcggcgccgagcttatatcgttccacagcatggcgtcgcgaatcacgttgccttgctggtcgagaatcaccatgccgtgctgctgaccgccaacggccagtgcttcaacatcgtcaagtccgccggcctgctgggctgcctcgaggaacgcgtcccaccagaatttcgggtcaatagacgtgccattggggtgtttggcctggccaaagcgcaccatttcaccggtttcggcgtcggtcacgcgcactttgcaggactgggtcgaggtgtcgacgccggccacgagagttcgagtcattgtgtctccttgcagtgagctggcgcaacgaagtgcaaggaattcgcacggtccgccacctcatttagttagatgaatgaactataatgtctagtgtaccatcataaagtgatttgactatagagacggtgcgctttttcggcaaagacgcgtcaaagaggagggaaccatggcttcactgcggagtatcaatcaagacgatttgcgaaaccataatctttccgtggtgctcgactcgctgttgcgtgccaccgaaccaatgagtcgcgccgatcttgccaagaaaaccggattgaccaaagcggccatgtcggtattggtgtcgttgatgctcgacaatgagattctggtggaaggcgcgccttccggccaatcgctgtatgggcgccccagcattccgcttgaaatcaaaggtggacgcctgtgcggcatgggattgcaggccaacaccgacggttatggcgtggtggtgctcgatcttgacggttccgttgtgggggagcagtgggtcgacgccgacatggccaacgccgacgagcgggcgattttcgcccgtctcgacgaactggctttgcagcaggaagaagcgcttgccaagaaaggttatgtgcttgccggtaccggtttggcattgccgggtctcgtcaccgatgatatgcgattgcttggcgcgcgcaatctcggttgggaacgtttggatctcaagcagttcgatgtggtcaggcgacttgatcctgttgcctgcaacgaggccaatgccgccgcgttggcacaggttcccggctatgccacgcagcgtaaggattctgggcggatcaagccgacggattcgtttctttacatgtcgaccgacgtgggtatcggcggtgcagtgatccgcgaagggcgtgtggtgagcggtgatcacggtttcggtggcgaattgggccatgtttccgttgacatgcgcggtcccgtctgccgttgcggccgtcgcggctgccttgaagtgtatgcgggcaggcgttccatggtgagcgcggccggaatcgccagcagcgatgccgccgcgacccgcagcgccatcgacgaattgatcgaccgctggcaccagcgcgatgcgcagaccgtggccgttgtggaaaaagcattggaggccatggcttccgtaatcgcatcgaccatcaatgtctgtgacgtcgacgtggtgatgctcggcggcttgtgggcgcgtttcgaacctgaactgattcgcagaatcgaacgcatggtacgcccgcaagtgctggcgtatccggaagtcgaggcaagcgtgcttgtggcggatatcgtcgatcgtccggccttgatgggcgctgcggaaatcggtttgcgacgctttatcgacaatccgctgcgtttcatgaagcaaaactagtccacccatttgttaaacttgccgagttggcatgttcgcatgttgcaacgtggggcgttagctcagtcggttagagcatcggactcataatccgccggtccacggttcaagcccgtgacgccccactctttcacaaagtcaaggcttctgatatactctgcaaggttatccggttcacgctctgccataggggctcagcgacccgggtcccccgaatctctaggagacaaactatgaagcagggtatccatcctgattaccacgcagtgcaggtcacctgctcttgcggcaacaccttcgtcacccgttccacctacagcggcgatcacatgaccgtcgacgtgtgctccagctgccacccgttctacaccggcaagcagaagatcctcgacaccggtggtcgcgtggcacgcttcgagaagcgttacggcaagaaggccaagtgagtcttattgcttaggcaatgaaaaacgccagtccgattgtgggctggcgtttttcattatgcgacggatgcgcatgcgctggcgtgcatgcgatcgggatattcgtaagatgcgtgggatgcctgcgaaataccgcgcttcggcagcgtttccaaggcaccttatatgatggacaggttgagtggagttcagcgaagcgttcacgctgaagcgcagatttataagcagatagaaaaggcgtacattggcagacgagcagttccccgcggcagttaccgcacttgaggaatatcataatatcgaacagcagatggccgagccggaagtcgcgtcggatccggataagatgcgtaagctgggacgtcgtcacgccgagttgggcgtcatcgtttccgcatacaccgcatacaagcaggtgaaagacgatctggaggcagccaaggaaatggcttccgaagatccggatttcgcggaagaagcgaaacgtttggagagcgagcttccggcagttgaggagaaactgcgtaccgcgttgattccgcgcgatcccgatgatgcgcgcgatacgatcatggaaatcaaggcgggcaccggcggcgaggaagccgcgttgttcgccggcgatctgctacgcatgtacatgcgatatgcggaaaagcgcggttggaccgtcaccctgcaaagcgaaaacaccaccgaactgggcggcgtcaaagacgtgcagctcgccatccgcgccaagggcactcccgctccggaagacggcgtatgggcatccctcaaatacgagggtggcgtgcatcgcgtgcagcgtatccccgtcaccgaatcgcagggtcgtattcagacgtccgcagcgggcgtcattgtattcccggaagccgatgaagatgacgatgagatcgaaatcgatcagaaagatctgaaaatcgacatcttcatgagctctggcccgggcggccagtccgtgaacaccacatattccgcagttcgtatgacccacattccgactggcatcgtggtgagcatgcaggatgagaagagccagatccagaatcgtgcggccgcactgcgcgtgttgaagagccgcctgctcgccatgaagcacgaggaggaagccgcacaggccgcagacatgcgtcactcccaggtgcgttcgctggatcgttccgaacgaatccgcacctacaatttcccggagaaccgtatcgtcgatcatcgcacgaactacaaggcgtacaaccttgacgccgtgcttgacggcgatctgcaggctgtgatcgacagcgacattcaggctgacgaagccgatcgcttggcccatcagaagtaaaggcggccgatggctaccgtattcgaactcgtgcgatccgcttcggccatgttgcgtgcgtccggtgttgacactccggagcacgatgccaaattattggccgccgaagtattcggcgtcgacctgcagaccgtcgacaaggccatgctgatgggaagcgaaacatccgaactggcgaagcaaggcgcgaagcagagcggtgaagacgctgcgttgaagcgattccacaccatggtggatcgcaggtccaagcgtgaaccgctgcaacatatcaccggccacgcgcccttccgctacctcgatctgaaggttggtccgggcgtgttcattccgcgtcaggaaaccgaactcgtggtgcaggaaggtgtcgactggatcaccaagcacggcatgtattcggcgaaagtggtcgatctgtgcgcgggaagcggcgcaatcggcctgtcattcgtgacggaagtgcccggcagcgaggtgtgggcggtcgaaaaaagcgagcaaaccgcgcaatggacccgcgtcaatctcaacgaaaccgcaaaaaagtaccccagcatcgccagcaactatcatctggaaatcgctgatgccacgcaaacgccgacgctgaaccagctggacggcacgatcgatatcgtgctcaccaatcctccgtatgtgcctcttgcggatattccgcagcaaccggaagtacgcgactacgatcccgatcttgcgctatacggcggttccgcagatggcacgcttattccggaacgcattatcgcccgtgccgcaaaactgctgaaaaacggcggtttgctggtaatggaacacgatattacgcaaggtgaacgattgtctgcattcgcgctgtcatatggattcagcaatgtgatggtgcataacgattacacaggtcgcccgcgatacatgaccgcgaaaaagcagtgatgcaacgcgtctcagaataagagatttttccaggggaacgtggtttttctgttgcaatagagttccagttggaagtccgaccattgcattagaccagttcagcggtaagcataccggttgcggaagcatccacaagatgaggcgtccggttgcgctgacaggaagagaaggaacggcagtgaaaatcaagaatgccgaaaaactggccgcactctgtcttgcggcggttatgggagtgagtgttacagcctgttcgggcggcaacatgtacgccaccagtaatgagagcgccaccatcgcggataacgatgtgatcaccatcggctcggtcaccaccaattccggtgcagccgcagcctatggcgaagccgaagtgaacgggttcaaactggcggtcaaggaaatcaacgccgatgggggaatcttcggcaaacagatcaaactggaatccatggacgacaagggtgatgtgatcgaggcatccaacgcctttaaccgtctggccggcgacaagaacgtgatcgccgtgctcggaccgaccatttcgtcaacctccggtgccgtcgcgccgctcgccgaccagaaccagatgccgaccatcgctccggccgcaaccgccgattccgtggaaacgggcggatacctgttccgcacctgcttcaaggactcctaccagggcgagatcgccgccaagtatgcggccgaaacattgaaggtcaagaaagtggccgtgctgtatggcacgggcgatccgtattcgtctggtgtgggcaaggcttttgttgcggcggcgaagaagaacggacttgacgtggtggcggaagagaattcctctagcgccgacgataccgaatactcgtcgcagctgcagaaaatcgaagcttctggtgcggaattcctatatgcgccgtactactattccacggttggcccgtacattgtgccacaggcgcgagcggtcggctatgagggctacatcatgggccccgacggctacgacggcctcaaaaccacgggaaacaaagcgaactacaacaaggtgctgtacaccacgcattattcgccggatgacaagtccaacacgaaggtgcagcagttcatcacctcatacaagaaggccaataacggcgaatcgccgaacaccttcaccgcgctcggttacgattccgtctacatgttcaagcgggccatcgaacaagccggtgaaaacgccactcgtgccgatattcgcaacgccatcgcaggtatgagcttctccggcgtgaccggcgcattcacgctcgacaagcatggttctccgaagaaatcggtgattgtgctggaaatgagcgacggcgaaccgacatacaaagacaccatccagccggcgaaatagcgaaaaaacgcgaggaatcaagaaaaacaagacttcaactgacgaaacaacaagaaaggagggatgatgagcgattcggtcattatgttcatcggtcagatcttcaacggtctgaaaatcggcagcgtgtattcgcttgtggccctcggctacaccatggtgtacggcatcatccgactgatcaatttcgcgcacggcgacttcatcatggtcggctcctacgcgctgatgcttaccattccgttcattatcgcctgcggtctgcccgcatggttcgccgtgattccggcggtgcttgtgtgcgtggcggtgggtattatcgtggaaagggccgcgtacaagccggtgcgtgaaaaaggcaataatatgacggcgctgatcactgcgatcgccatgagcctgctgcttgaaaacggctcccaggcgctgttcggcgctgattatcagaccgtgccaaccatcgttgaaattccaacgctggtgcttggcaaactcaaaatcgacggagcgaccatcataacggtgctgctcggcatcgccatcatggtcgcgttgcagctgttcgtctccctcaccaagcagggcaaggccatgcgtgcggtgtccgaagacaaggaagcgtcgattctgatgggcatcaacgtgaactccaccatcacgttgaccttcgccatcggctccggcctggctgcggtggcggcgcttatgtactgcatttcctacccgcaggtctctccgatgatgggtgccatgctgggcttgaaagcgttcgtcgccgcggtgcttggcggcatcggttccattccgggcgctatggtcggtggcttgctgatcggcgtggccgagagtcttaccaaggcgtatatcggtacgattacggccggtgtgatcacgtcggcgttctccgacgccattgtgttcggcattctcatcatcgtgctgctggtcaagccgtccggtctgatgggcgagccggaaagcgagaaggtgtgattatgaagaaatcaatgctttccacgaagcaatcgtatgcattgtgtgccattggcgtgcttgtgctgttcggcattcttgttgcggtatgtgaaacgggcgctatttccctgtatgtcaagggtattctcatgacttgctgcattgcggtgatcatgaccacgtcgttgaatctgacgatcggtgtgctcggacagcttacgctcggctgctgcggtttcgaggcgatcggcgcatattccgccgcgttgatgagcaagctgctggttgccaacggcgttcagatggatgatacggtgcgtttcctgctggtcacgttcgtcggcggtgtggtggcatgtgtgttcggtgtgcttgtcggcattccggcattgcgtttgcatggcgattatcttgcgattatcacgcttggtttcggtgagatcattcgtgtgatcatccagaatctgaaagtggccggcggcaagggacttgcggacggccagcaggggcaggcactgatcggcatcgaccgtctcgccaatctgtatgtggtgttctgtatcaccgtcgtgaccgtggtgctgttgttcatgttcgcgcgttcccgttatggtcgtgcggtcaaggcgattcgtgatgatgagatcgcggctggcgcttccggcatcaacatcacctatatgaaagtgctcgtttttgcgatttccgcgttcttcgcgggtattgcgggtggtattttcgcgcaatatatcggtgcgctcacgccaagcatggccggttggctgcagtcgatcaattacgtgatcatggtggtgttcggcggtatgggttcgctgacgggttccattgtcgccgcggttggtctgacgattttgccggaattgctgcgtgcgttctccgcataccgcatgctcgtgtattcggtggtgctggtgatcatcatggtgttccgtccgcagggattgttcggcaattgggagttctcgctgccgaaattcgtcaacaagtggttctatccggtacgcgtgaagatgcacggcaaatcgggtgcgtctcaatcggcatctaagaaaaccaaggaaaccggcgagactaccgcatctagcgaaatcaacacatccagcgaagacaaggaggtgcaggcatgagcgagccgattctgaaggccgagcatctcggcatcaccttcggaggcctcaaagccgtatccgacttcaacatgaccatcaatgcgggcgagcttgtcggtctgatcgggccgaacggcgcaggcaagaccactgtgttcaacctgctgaccggcgtttaccagcccacggaaggtgagttcttcctcgacggcaaacgcatgaacggcaagaaaacgtatcaggtcgtgcgtgcgggaatcgcaagaaccttccaaaacattcgactgttcgatcaaatgacggtcgaagagaacgtgcttgtggcgttcaacgaatccttcacctaccggctgggcggtgcgatcttccgcacgccgaccttctggaagcaggaacgcgacatgcatgccaaagccatagacctgctgcgtattttcggactggaaggattggccgaaaccgaagccgcgaatctgccgtatggagcgcaacgtaagctggaaatcgcacgagcgttggcgaccggcatgaaactgctgttgcttgacgagcctgcggcaggcatgaatcctacggaaaccgaggatctgctgaactgcatcaacacgatccgcgaccgtttcggcatcgccattctgctgatcgaacatgatatgagcctggtgatgaacgtgtgccagcgtattcaagtgcttgattacgggcgtaccatcgcctccggaacgccagaggaaatcgccaacaatccgcaggtcatctccgcatatcttggtgcggacgatgctgaaaacaatgccgtcgaaacgtctgaaacgaccgaaaggaaggacgcctgatgctgcagatcaagaatctttccgtctcctacggtgccatcgaagcggtcaaaaacatcagtctgacggtgaacgacggcgagatcgtgtcgctgatcggtgcgaacggtgctggcaaaaccacgacattgcataccatcacaggtcttactccggcggtttccggcgaggtgctgttcaacggcgtggacctgctgaaaacgccgaacaataagatcgtgaccctcggcatggcgcatattcccgaaggacgccacgtgttcacgcgcatgagcgtgcaggaaaaccttgaaatgggcgcgttcagtctcaaagaccggtctcacatggcggacgatcttgccatggtgttcgacatgttcccacgcctgaaggaacgccgcaaccagaaggcgggcacgctttccggcggcgaacagcagatgctggcgatgggccgcgccctgatgagccacccgaacacgattctgatggacgagccgtcgatgggtctgtctccgaaactcgtcaaagagatcttcgccattattcgcaagctgcacgatcagggcattaccgtactgctggtcgaacagaacgcgaatatggccctgtcgatcgccgatcgtgcgtatgtgctcgaaaccgggcgcatcaccatggaaggcgacgccaaggagctgatggacaacgagcaggtgcgcaaggcgtatctgggcgcataaggtcagtttcaacgcagttgaagaatcctgccttacaatggtgggatcagcaagccgaaaagggaggtgtcatgagcgagattcgcgctatttcagacgaatcccttgcccaggctgtcgaaatcgtacgtgacggcggattgattgtgattcctacggacacggtctacggcgttgcgtgcgatccgcgcaacattgaggcgatccgcaaggtgttcgcggcgaagcaacgcccgaaatacaagtcgttgcaagtgctattgccgtctattgaaagcatggagaagctgcatttggatctgccggtgccgctgaaccgcctgtccgccatgttcatgccgggcgcgttctctccgatcgccgtggccgatgacgattgcacgctcgccacggtacgtaccgatcccgccaccggcaaggtcacgcagggcgtgcgcattccgaattccgcggccgccttgcgtgtgctgcgcgctaccggaccgttggccgccaccagtgccaaccgttccggcgatgaaagcgcgcaaaccgttgacgaggccgtgcaggcgcttggcgatgcggttgatttgtatttggacgggggagcgactcccggtcatgtggcttccacggttgtggcggctgaccttcatgggcgtgatggcattgcgattcttcgagagggagtgattcacgagccggttatccgaaaggccttgacgttgaatggcggtgctttgggcgtatgagaatctatctgttcattgctgcgattgctggcggcgtcacctatttgatcacgccgttgattcgccatatcgccattgagatcggcgccgtcggcgaagtgcgtgcgcgagacgtgcataccattccgacaccgcgactgggtggtttgggcatgctgatcggtttcaccgtgtcgatgctgttcgcatcccgcattccgttcattcaaggattgttcgcgcaatcgcaacaggcgtgggtgattctcgccggcgccattatgatcagtctgcttggcatggccgacgacttgtgggatcttgattggatgctcaagcttgccggtcagctgttgatttccgtgttcgtggcatggggcggtctgcagatcatttcgcttccgcttggctcgttggtgacggcgtcgccgagcctgtcgatggccatcaccgcgtttttgatcgtcgcgtccatcaatgcggtcaatttcgtggatgggttggacggtctgtcgtcgggcattgtggcgatcggcggcatcgcattcgccatttattcatacatcatcgcccgcaactcgccttcgtacgcttcgatggcgacattgatcgacattgccatggtcggcatgtgcgtgggctttttgatgcacaactggcatccggcgaagctgttcatgggagactccggttccatgctgctcggctatttgatcacgtgcgcgtcgattgtgatgacgggccgccttgacccggccagtattcatgccagcatttacttgccggtgttcatgccgattctgctgccgattctggtattgttcctgccgattctcgacatgtgtcttgcgattgtgcgccgcttgcgcaagggacagtctccgatgcatccggaccgcatgcacttgcatcatcgcatgctgcgcatcggccattccgtgcagggggctgtgctgattctgtggggttgggcggcactgatcgcattcggctcgattatgacgctgtttttcaaggcccaatacgtgcttgttggattcctgattgcggccgtggtgctgaccgtcgccaccatgtatccgtatgtgaagcataggattcccgagatgctggaggaggacgctgcggatggcggcagacatgcgtcggtgcggtcgtcgaagcgtcggaaaactgattaaacgctttgcctagcggtattagttaactttcataacacccttgtttgccgcttgttctgccgtgtcgcggtaagtcagcccgcgttcatatagtgggtctatggctacaattcctgatatgaatgcagattccacgtacgctccacttcctccgattttcgcacagcttggcctcgcctatgacgatgtgctgctgctgccgaacgagacggatgtcattccgtccgaagtggacaccaccacccatctgacccgcaacatcacgatgaaggtcccggcgatctccgccgcaatggacaccgtcaccgagtccgacatggccattgccatggctcgtaatggcggcatcggcgtgctgcaccgcaatctttccatcgacgaccaagccgctcaggttgacatcgtcaagcgctccgaatccggtatgatcaacgatccgttgaccgtcagcccggatgtgacgctggctgatctcgacaagctgtgcggccgtttccatatctccggtctgccggtcgttgacaacgacaacaagctcgtcggcatcatcaccaaccgcgacatgcgtttcatcgcctccgaggattacgaccggctcaaggtttccgaggtcatgacccgcgagaacctcatcaccggcccgtccaacatctccaaggaagacgcccacgacctgctggccaagcacaaggtcgagaagctgccgctggttgacgatgaaggccacctcaccggcttgatcaccgtgaaggacttcgtgaagaccgagcagtatccggacgccaccaaggacgaacagggtcgtctgcgcgttgccgccggcatcggcttcctgggtgacgcctacaaccgtgcttccgctctgatggaagccggcgtggacgtgctcgtggtcgacaccgccaacggtgaggccaagctggctctcgacatgattcgccgtctgaagtccgattccgcgttcaagggcgttgacatcatcggcggtaacgtggccacccgtcagggcgctcaggccatgatcgacgccggtgttgacgcagtcaaggttggcgtgggcccaggctccatctgcaccacccgcgtggtggccggtgtcggtgtgccgcagctcaccgcagtgtacgaggccgctcaggcctgccgtgccgctggcgtgccgtgcatcgccgacggtggcattcactactccggcgacatcgccaaggctctggttgccggtgcctccaccgtcatgctcggcggcaccctcgcaggctgcgaggaagctccgggtgagaaggtgctgctgcacggcaagcagtacaagctgtaccgtggcatgggctccctcggcgccatggctccgcgtggcaagaagtcctactccaaggatcgctacttccaggccgacgtcacctctaacgacaaggtcgttccggaaggcgttgaaggcgaagtgccgtaccgcggaccgctgaacgcagtgctgtaccagatgatcggtggcctgcaccagtccatgttctacatcggcgctcacaacatcgccgaaatgccggaacgtggccgtttcatccgtatcaccgacgctggcttgcgcgaatcccatccgcatgacatcgtcatgaccgccgaagctccgaactactccggccgccagtgattgctgaattccagtaatcaaaatcggtaaaagcctcttacttctcggaaaagaccgaaagtaagaggctttactcatatctgcaacgtgaatatttataaccgaacgtcgccctatcgccaagtagcggtgtttgatgtacgaagcaaatcgctaaaacaagtgtgacttcccggtgcgtgggccttccaatctccctacctcgcggtatcttcgaatgttcagctgaagcgtgccaagcggtacgcgcacacgcaaaggaaacgaggcaaaatggttgacgcacatgacggcgaaacgtatacggcgaaaggttcgcgactgatttggatcgattgcgaaatgaccggcttggatattttccacgatgaactgtgcgagatctccgtggtaccgacggattttgaccttaacgtgcttgacgagggtattgatttcgtgatcaagccgtctaatgcggccgttgccaatatgaacgatttcgtgcgtgccatgcacacccgttccggactcatcaacgaatgggagaacggcctgagcgtcgaagaggctgaacggaaagtcaccgaatacgtggcccgcttcaccccggacggcgtcaagccgctgctcgcaggcaactccatcggatcagacaaaaaattcctcgaccgttatatgccgaatctcatggaacacctgcactaccgtgtaatcgacgtgagcacgttcaaagagcttgcccgccgctggtatcctgccgtatacaacaaccggccgccgaagaatggtggacatcgcgcgctcgccgacatcatcgaatccttggacgaactgcgctactaccgtaaggcgttcatggcagcggcgcccggtcctgacgcagccgaagccaaggcgatcgccgatcagatcgtggcaaccagcattttgaacaacaactgattctgcatatcgcacaatcgttggaaaatctgatattccaacgaaaacatggaaaggacttcagtgagcgcagccgattggaccagcatcgaaatcccgcaagacattcgcttggtggttgccgatatggacggcaccctgcttgatgagcatagcgagattccgcaaggtttctggccgatgcttgcccggttgcgctcgcgaggcgttgaattcgtgccggcgtccggacgccagtacgctaccttgcgtgccatgttcgccgataaggcggcgcaggtgcttgacggcggcgaactttcgtatatcgcggaaaacggcaatgtcgtggccattgacggtaatatcgccgaagtgcacggcgtcgataccgatgtgacccgctggaccatcgacacggtgaacgcttctgccgcggctggcgaatacgatatgggattggtgctttgtggcctgcgcacggcatacgtgcagcgcacggacaagccgttccttgatgaagtcggcaaatattatgcggcactggagattgtggacgatctgcatagcgtgcttgaagatgtgatcgcatcaaacggcgaaagcgacaccatgctcaaactggcgattctcgatttcgacgatgccgaagcgatggccgcggaaaagctgacgccactgaagaacgattatcaggtggtggtttccggcaaactgtgggtcgacatcatgaatgctacaaccaataagaaacagggcgtcgaagcgttgcagcgcgtgcttggcgtcactgcggcccaaacggcggtatttggcgattatctcaacgatttgcagatgctttcggcagggcagtggtcgttcgccatgggcaatgcgcaccccgcgttgaaacaagccgcgcattttgtggctccatccaatgccgatcacggggttcttcaggttgtcgacaaactgattgcgtaaggaagccgtttcttcgaaattgatggtcgattgaacaggaaaggcggtgcggcatgcggcaggctgaggcattggcgattctgcaaagtggcgcgagcgtcttcctgacgggtgcgccgggtgctggcaagacctacgtgctcaatgagttcgtgcgtcaggcccgtgccgaaggtgcggcggtgtcggtgacggcgtccaccggtatcgcggccacgcatatcaacgggcagaccattcattcatggagcggtgtcggacttgccaacgcgctcaccgacaatctgatcaaaaccatacgtacccgacgcaaacgtaagctgcagggcgctgacattctcatcatcgacgaggtttccatgttgcatgcgtggctgttcgacatggtcgatcaggtgtgccgcatcattcgacgtgaccaacgcccgtttggcgggcttcaagtggtgctgtccggcgatttcttccagcttccgccagtgagtgtgggtggacgcaaccacgatttggtcacaccaagcccggaattcgtggcttcccgcgaacgatatgcgaaagcgggactcaatccagatggtttcgtcaccgaatcattggtatggcgggaattgaatcccgcaatctgttacctgaccgaacagcatcgtcaggatgacggcagtctgctcaccgtattgaccgatattcgcaacggttgcgtgaacgacgacgatcgcaatgtgctcctcaccagactgggcacaatccccgaacctggtcaacaggccgtcaatctgtttcctgtcaacaagcaggcggacacgctcaacgacatgcgcctgttcgaaatcaacgaggaaccgcacgaatatttcgccgaagccgcaggaccagtcaatctggtggaacgtttgaagaagaacatgcttgcccccgaacgtttgcagctcaaaaccggggctgcggtgatggccgtacgcaacgacgccgaccaccaattcgtgaacggatcattgggcaccgtgcgcggatttgccgccgaaaacaagggcggatggccgatcgttgaatttgaaaacggcaatatcgttaccatgaagccgaattgctgggaaatgatggacggcgacacagtgctcgccagcgtcaaccaagtgccgttgcgctgtgcgtgggcgatcaccatccacaaatcgcagggtatgacgctcgagcgtgcggtgatggatttgcggcgcactttcgcgcccggcatggggtatgtggcgctgtctcgtgtggaaggtctgcaaggcctgtatttgaacggtgtgaacgaacgcatgttcttggtttcgcccgatgcggtgcgattggatggtgagttgcgtctcgcctcggcgcaggcatccgatatgttggctcatgatggcatcgccgcgttccagcagaacattgccgttcccgacggtgacgagttcgcgcaggacgcgctgttctagtatggcgattgccttgtttgacatgtatgatgatttttgggattcgacggatatgactgttgtgttccgtccgtgcgttgccatacgtcggtgaacgggtggttggattgggcttacgtccccttgcctgagtagttttgggcatatgactaaagcacttcgtatgtccaccatgttcctgcgcactctgcgtgaggatcccgccgatgccgatgtcgtatcggataagcttctgcagcgcgcctgctacctgcgcaaggccgctccgggtatttggacctggctgccgctgggcctgaatgttctgaacaagatcgaaaacatcatccgtgaggaaatggcttcgatcgacgcccaggaagttcacttctccggtctgctgccgcgtgagccgtatgaggccacccatcgttgggaagaatatggcgacaacatcttccgtttgaaggaccgccacgaggccgactatctgctggcgccgacccatgaggaaatgttcaccctgctggtcaaggacctgtactcctcctacaaggatctgccggttaccctctaccagattcagaccaagtatcgtgacgaattccgcccgcgtgcaggcctgatccgcggccgcgagttcatcatgaaggacgcctactccttcacgcttgacaaggaaggccttgtcaaggcgtatatggacgagcgtggcgcctacgagcgtattttcaaccgtctcgatttgaagtatgtgccggtgcacgccatggccggcccgatgggcggcttcgaatccgaagagttccttgccccgatggaaatcggtgaagataccttcgcacagtcgccgagcggtaaggcttggaatgttgaggcgctgaccactccggaaccggaagccatcgacttcagcaacactccggctgctgaaaagcgtccgacgccgaatgctgaaaccatcgatcagatggttgaatttgccaatgccaaccatccgcgttccgatggccgcgcgtgggaggcctccgacattctgaagaacgtggtaatcgccgtgatgcatccgcaggatgacgatcatgacgagccgtggcgcgaactggtggttgtcggcgtgcctggcgatcgtaccgttgacatgaagcgtcttgaagcgcagttcactccggctgaaatcgaagaggccaccgacgaggatctgaagaagcatccggaactcgtcaagggctatattggcccgatggcgtttggcccgcaggctcgcggcggtgaaaaggctgaaaacgccaacgaaaccggcgaagcgttgcgttacctcattgacgcgcatatcgcccgcggttccgcatggttcaccggtgccgacgaagccggcgtcgactactacgatctcgtgtacggtcgtgacttcgaagccgatggcgttgtggaagccgtgcaggttcgccatggcgacatgagcccggatggttccggtccgctgagcttcgaacgcggtgtggaaatcggccaggtgttccagcttggcttgaagtattccaacgcgcttggcctgaaggtgctcgaccagaacggtaagaccgtgccggtgtggatgggctcctacggcattggcgtgtctcgtgtgatggcttgtattgctgaaacccaccatgacgagaagggcttggcatggccggccatcatcgctcccgcccaggtgcatgtggtggccaccggcaaggatgcggccgcattcgaagccgccgagcaactgatcgccgatctggaagccaagggcatcgaagtgatcttcgatgaccgtaagaaggtttccccgggcgtcaagttcaaggatgccgagcttatcggcgtgccgctgatcgccgtcgcaggccgcgacactgtcaacaatggcaccattgaagtgcgtgaccgcaatggcgagaacgccgaagccgtgcctgtcgccgacgcagcccgggtgattgccgatcgtgtcgccgcgctgctgaagtaataatcgtattttttctgattatttcaccatataaacggaagattatggatatgccataatcttccgttttttatctggaaacaggtaggaggaagcatgattgtgaggaaaacatttatggggaaaacaaacgaaaaaccatgcatatatcggcagtgcattgcggtggataagtgagatttatccaccgactatccacgactcgcccgaaatgacgtcctctatccacattcgtcagtcgagcttgtgcaagcaaagccgattcggcgatagtggttctaccgcggaaacgcaaggaagcggaaaggcgtgcagaacccctctctcgcaacccatttctccgactgcgcgttgctttcgcaccttcatcggtgctttccgcggcccctttattaccaatgcgacagaaagggccgatcatggcacaacagcaagctctcatcaccatcaccggatatgtgggcgccaatcccacgcaattcaacaaggatggcatgccccatgccagttcgttcagaatggcgagcaccagacggtatttcgacaatcgcacacagcaatggaaggatcttcccaccacatggatcacggtgaaagcgtaccggaacctatccgagaacatctgccaatctctgaagaaaggcgagccggttatcgtgatgggcgcgctcgccacggaaacgtgggccgatcagaacggcaaaccgcagtcacgcatagtgctggaagccagcgccgcagggcacgaccttaaccggggagtcaccacgttgcgtaagttcgtcaagccgaacgaccagcaccagccggaagcgaaaggaacggaaccgcgtgtgggagccgatccgttcgtcaggcagggcagtgtggcgccggtcgaaatcgtggttcccgaagatgacgaagccgccgaattctcgggagataccggggaattcgacggcgacatatattaggcggcaccgatgccttgcatgcttggctccgattgccagccgatgatgtggtttgttaccagatgcgcacgcgctgatcgggatcgagccacatgccgtcctccggcttcacgtcgaacgccttgtagaacagatccacgttgcgtgcgatgccgttcgtgcggcattcggcgggggagtgcgggtcgatctgcagatactgctccgccagctcgtcacgattcttggtgcgccagatggacgcgtagctgaggaagaaacgctgcaaaccggtgaaaccatcgatttccggcgcttcagacagcgaagcttcaatggactccatggaaccgttcttctcacggcctgccgcctcgtcaagagcgaacgcatatgctttgagcgcaatgttcacgccactcaggtcgccgatgttctcgccgatggtcaaagcaccgttcacatgcggagcctgagctggatcgtcggcgtatttttcggcaagctgggtcggcacgaatgcgtcgtactggtcgatgagtttctgcgtgagctgctcgaaattggccttgtcttcttcggtccaccagtcgttgagcttgccgtcgccgtcgtactgggcaccctgatcgtcgaagccgtggccgatctcatggccgatcaccgctccgataccgccatagttcgcggcgtcttcggcgttcgggtcgaagaacggcggctgcagaatggcggccgggaacacgatcacgttcatggtcggctcataataggcgttcaccgtctgcggattcatcagccattcgtccttgtcgacgctcttgccgactttggccagctgatagccggtctcatacaagttggcggcacgcatgttctcggcaaaaccggcattctcgtgcacatcaagcgcggaatagtcacgccaatggttcgtatagccgatcttcggcacgaacttggagagcttctccaacgccttctgcttggtttcttcgccaagccaggcggagttggaaatggacacgcggtaggcatcgatcagattgccgaccagctgttccatacgctgcttcgacgactcggggaagtgcctcttcacatattcgcggccgacatcctcaccacagatgccgttgaccagcgaaacgccgcgcttccaacgcacgcgctgctgcttctgaccagacaacgtcttgccatagaactcgaaattcgtctcatcgaattcgtgcggcagctccaaggtggagccgatgatcacatgcacgcgtgcccacagcttgagatcgtcaagatccgcggccttccagaatgcgttaagaccggtgaggaagctgggctcatgcaccaccacatggttgaaaatgcctcggaaatcaagcggctgcacctgagcggcggaagtctggtcgtatgcggtctgccaagcgtcgatccacgtgtcgagatcgtaatcggcgagcattccgctcaattccgcataatcggtgggattataggtcttcaccgaatcacgggttgccacattgtcccaatggttcgcggcgatacgtgtctccacgtcgaggaaacgctgggcttgagcttcggcctgctcgtcatcggcggcgagcttcgcgttcttcaactgcttggacaccatgtcagcgtatgcttcacgaatcggcgcataatgatcttcacggtaatacgcctcatcgggcagtcccaagccagactgttcaatatggatgatgttggtttcgggagcacccggatcgccatacacggcaatgccgatcaggtcagggccgccagccgggttcatcgcgcccaaagagcgggtgagttcagccttgtcggcagcgacgtcaatagccttcaactggtcttcaatggccgcgagtccggaagcgttgatggcgtcgacgtcaaggaaactcgcatacagggcgtgggacttctcggcagggcagtcgtcgtcttcgagaatctcacgaatctggttttcggcatcttcggcgagcttatcgaacgaaccataacgggaacggtcgtcaggaagacgatacatgtcgatccatggaccgttgacatagcggaacagatcttgcgcagggccggtcacggcggagaacgatgccggatcgatacccgaattcaaagtggtactcatggcttcacactatccatctttggtgacaaaacagtgtatctgaaacgaataatcatcattccgcaacggcatgcataaggtgagatttgcataatcgtaagaaaagccagggagagccaagcactgtagggcgtacgaagtagggttagaggcatgattgaactgaaaacaccgaaagagatcgaagagatgaagcctgccggccgttttgtcggcggcattctgcgcgatctcaaggaatttaccaaagttggtaccaatctgctggaaatcgatgaattcgtgcacaagcgcatcgtcgatcgcaagggtgccgaatcctgctatgtcgactatgctccggatttcggtaccggcccgttcgcgcactatatttgcgtttccgtgaacgatgccgtactgcacggcgttccgttcgattacaacctgaaggacggcgatttggtcagcctcgatctggcgatcaacgtcgatggctgggttgccgattccgccatcagcttcgtggtcggcgagcataaggatcctgaggatctgcgcctgatcaagtgcaccgaagaggcgctcgcggccggtattgccgctgcgcagccgggcaaccgtttgggtgatgtttccgcggcagtcggcgatgtggcccgcgaatacggctatccgatcaatcttgaattcggcggccatggcgtcggccgtattatgcacggcgatccgcatgtgccgaacgatggccgcgcgcaccacggctacaagctgcgtccgggcctggtcatcgccatcgaaccgtggttcctcaagaccaccgacgaaatctaccaggatccgaaagatggttggacgctgaagagctccgacggttcccgtggcgcgcatagcgaacacaccatcgccatcaccgacaacggtccggtgatcctcaccgttcgcgacaagtgatcagacggtagcgtaaaacgcggcaaagctccaatacgacggagcgaagcgtacgaaaagaaggccgatgcccacgattattcgggcattggccttttatatgcgtaatttcgcgcggaaatagtcgaattatttgccttgcaggaatgaagtatcggatgtcaatcgattgattttgagacgaaaccatgcttggaaacgcgcatgccatatagtgttcgatacttccgaacggttaaggagcgtgcaagtatggccacagccaatctgagtgtggaatccaaagacttcaccctgccggtggtcgaagccacggcgggtgcggacggcatcgtggtgtccacgctgcgcaacgacggctgggtcacactcgaccctggtttcctgacgactgcgcaatgcgaatcgaaaatcacgtacatcgacggcaagaactcgatcctgcgctaccgcggatacccgatcgagcagttgtgtgagcaatccgatttccttgaggtcgcctggttgctgcgtcatggcgaactgccgaatcaggagcagtacgaccggttcatttccgacatcaaccatcgcacgatggtgggtgaggatttccgtaccttcatgggttctttcccacgcaccgcgcatccgatgagcgtgatggcatccgcggtcaacgcgctcgccaccttctatccggacactactgatatcaatgattccgaccagcttgacgaggctgcgaccatcattatggcaaaggcacgaaccatcgtcagctacattttccgccgtcgccgcgatgagccgatgctgtatccggattattcgcgcggctatgtcgacgatttcctgcgcatgtgctttgcggtgccgtacgagccgttcgattccgacccgctgtacgtgcatgcgctcggacgcctgctgatcattcatgccgatcatgagcagaactgctccacttccgtggtacgtatcgccggttccgcccacgccaacctgtattccgcggttgcggcgggcatcaacgcgctgtcgggcccattgcatggcggcgcgaatgaagcggtgctccgtcagctcaaagccattcgcgattcaggcaaaaccgtcaaggaattcgtggaagacgccaaaaccagcggtcagcgtatttccggactcggccaccgcgtgtacaagtcgtacgatccgcgtgccgcgatcgccaagaagtatctgcagaagatcatggaacgcgcggacacgttgaaattgcctgccgacgagcgtgcgctgttcgacgtcgccacggaattggagaaaatcgcgctgaacgacgagtatttcgtgtcgcgtcacctgtatccgaatgtcgacttctacacgggattgatctatcgcgcgatcgggttcgatccgtccatgttcaccacattgtttgcattgggacgtattcccggttggatcgcgcagtatcgtgagatgcttgccgatccgaacaccaagatcggtcgtccgcgtcaggtgtacaccggttataccgaacgtgattacactccgatcgaccgtcgatagttgctttttcgctgtttcatggacttgtgatgctgttcgccaagccctgcggctaaagtattgcacggaaacatgcaagtaatgcaatcactgttgtgaaggagcgaagaatgaccgatcagcgcactgcgtggggttggggtctgtccagcgtggatgcggccggcaacactttggacgtatggtacccggaactgaagcttggcgaggctccggaggaggtggcacgcccgaaccataattttggcaatctcgcccatgagggcgtcgatgcgcgtggcgtgcgccgcattccggtgttcacggtgtcgaagcttgacgaaccgatcgaagacgcagccgacgcatacctgcgtctgcatctgctgagcatgcgtctcgccaagccgaacaccctgaatctggacggcattttcgcagccctcaacaatgtggtatggaccaattatggcccgttcgcggtcgaggatttcgcgctgcgcaagcttgacgtgatggccgcggccaaccagtgcgttccgggactgccgaaggttgacgtgaacgtgctgtcgatcgacaagttcccgcgcatggtcgactatgtggtgccgaccggcgtgcgtatcggcgacgccgaccgcgtgcgtttgggtgcccacctttccgaaggcaccaccgtcatgcatgccggcttcgtgaacttcaacgccggcacgctcggcgtttccatggtggaaggccgtgtttcccaaggtgttgtggtcggcaacggttccgatatcggcggcggcgcatccatcatgggcaccctgtccggtggcggcaagcttaagaactccatcggcgagcactccctgcttggcgcgaacgcgggcatcggcatctccctcggcgacaactgcgtggttgaagccggtctgtatgtgaccgccggcaccaaggtgaccatctacgacaaggccaaggtcgcggcgggcgaaccgctcgaaaccgtcaagggcgccgatctttccggcaaagacaacatcctgttcatccgtaattccgtgtccggccgtatcgaagcgcgctatcgcaagaccggcatcgaattgaacgaaaaactgcacaagaactaaatatcaaatatgaaaatctccctcattaccgtcggcaaagtcaaggaacaatatctgcgcgacgccatcgccgaatattcgaaacgactcagccgatactgcaagcttgacatcgtcgaagtggccgacgagaaaacacccgagcatgccagtgagggagtggaacggcaaatcaaagccaaggaaggcgaacgcatcgccaagcatattcgcgacgatgcgttcgtcatcgcgctcgccatcgaaggccagcagctgaccagtgaagaacttgcgcagaaaatcgacggtcttggagtgcatggcaccagccatatccaactcatcatcggcggatcgctcggacttgacccaacgattgtgaaacgggccgattacctgctgagtttttccaaaatgacttttcctcatcaattaatgcgcgttattctgcttgaacagctgtatcgtgcatacaaaatcaatgccggcgaaccgtatcataaatgacatgcaatcaatgtcgcgtaatgcgtacacaggtttcgcgaatatgatatggcaggattgcgatgcggcaaaatatggtgagatcgccgaaagataataagtagaaggccttgcctatactagtaccccgtgagtgactacagaagcgaacgcgagcagcgagaacgccgtcgccgcaccatggtgcgggcggtgtgcatcgtcatcgctgcggcgatgctgctgagtctggttattcctgctatctacgcaggtctttgacgcctttggtccggtatgatcctccccggacctgcaatcccatacgtaacgagactggttcgcggctcggcaggatgggaacgagtatgtgggtacgtggaagaagttgaggattgtgcgaaagccgtatgaggctccatgacagaatataaagaacgcataaagaaatgtatggtgtaaacgatggcagaatttgatttttcccaggcaatcggcgaggcgcgcgccaaatacgagtcgatttccaaggcgcttgacgtcgaccgactgaccgcgcaggccaaagatcttgaagttcaggcggccgaaccgggattgtgggacaatcccgaaaacgcgcagaaagtgaccagcaaactgtcggcagtgcagtcccagctgaagcgtctcgcttccgcaagccagcgcatcgacgacgtcgaaacgttggtggaattgggtcaggaggaagaagacgccgacacgttggcggaagcgcagtccgaagtcgaaagcattcagaacgatctggccgacatggaaatccagaccctgctcgacggcgaatatgacgaacgttccgcagtggtgaccatccgctccggcgcgggcggtgtggatgccgccgacttcgctcagatgctgctgcgcatgtacctgcgttgggcggagcgcaatgggtataaggccaaggtcatggacacctcctacgccgaagaggcgggcatcaagtccgccaccttccaggtggatgccccttatgcgtatggtcgcatgagcgtggaaggcggcacccaccgtttggtgcgtatctccccgttcgacaaccaaggtcgtcgccaaaccagcttcgcggcagtggaagtggtgccgctcgttgaggcgaccgatcacatcgacgtgcccgattccgaaatccgcgttgacacctactgctcctccggccctggcggtcagggcgtgaacaccacgtattccgcggtgcgtatcacccacattccgaccggcatcgtggtgaccatgcaggacgagcgctcgcagatccagaaccgtgccgctgccatggccgtgctgcagtcccgactgttggtgctgcgccacgaagaggaagccaagaagaagaaggagctcgccggcgatatcaaggccagctggggtgaccagatgcgttcctacgtgctgcatccgtaccagatggtcaaggatctgcgcaccggctatgagacttcgcagacccaggccgtgttcgacggcgatatcgacgcgttcattgaggccggcatccgttggcgtcatgagcagcgtcgcgcggcggccgaagaggcggacgcctaaaaaccacgattaccgtaatcagaacagcacatagtggaggggtacgacgatggcgctgatttcgcttgaacatgtgagcaaggtgtatccgaaaggcaccaggcctgccttggatgacatcaatctcgacattgatcgaggggatttcgtgttcctcgtgggcgcttcaggttccggcaaaaccacattgctgagcctgttgctgcgcgaggaggaggtcacggatggcgagattcgcgtcgcaggtaatgatttgaggcgcctgtcgtcaaggcaggtgccgcattaccgtcgttccatcggttttatcttccaggattacaaactcctcaacaacaaaacggtatgggagaatgtggcgttcgcgcttgaagtgattggcacaagccgttccaccgtcaaatcgttagtgccgaaagtgctgcagactgtcggtctcaccggtaaggaaaacaactatccgcacgagctttccggcggtgaggcacagcgtgtggccattgcgcgagcgtatgtgaaccatccgcagattctgctggccgacgagcctactggaaatctcgatccgaccacatcgctgggcattatggaagtgctggacgccatcaaccgcactggcaccaccatcgtcatggcaacgcataacgaggaaatcgtcaactccatgcgcaagcgtgtggtcgaactgcataccggcaaaatcgtgcgtgacgagcagcagggatcctacgattccgcactgtacttcccggatgccgaagtcgaatccaaatcgcatcaggcgttgaacggcggcgacgtcgactcgaaatatcgtgcgccgggcgcgcttgaaatgtctgatttttccgatgaggcggtggacgtggaaggcgcgacgcgagccgaaaccgcggcgaacgcggttgatgccgtagctgcggccatccacagcggcaatggtgatgcgggcatcgcgcgtctcgccaattccgtgcattccggtcgcaccggtcgttatggcgaggcgttcgctccggtggagactacgctgacctggggcaagggactgaaacttgaggatcttgccgaacaggagcatgccgattcggctgcacgttcgcagaccgaagccaatgccgacgcgactggctcttcgcctgatacaggcatggaatcaagcaaagcggctgaaaacgagcaatccgcggagccaacggttcccgctcctccggcacggccgatgcctcccgctccgcccgcgcctccggctcctccggcagcgcccgccgcgactgccggtggcgaggcgaaatccgtcgaacaatccgatgaacagcatgaaacgtccgaaagcaaggagaacgactgatgcgtttgcgtttcattctttccgaaacctggagcagcctcaagcgcaacgtgcccatgttgctttcagtgatgctcgttacattcatctcgtttctgtttatcggcgcatcggtgctcactcaggcgcagatcaccaaagccaaaggcgattggtattccaaggtcgaagtggtggtgtggatgtgtcccgatggcaccagccaatccgtgaactgcaccgcgggaaccgcggcaacgcagactcagatcaatgacttgcagaaaaccattcgcaacgagcttgccgatgatgtatcgcaaatcacttttgtaagcaaggaagatttctacaacgacactttcctcaaacaatatccgaacggtgaatatcaggggcgtacgctcactgccgacgatatgcaggattcattgtggctgaaactgaagaatcctgagaaatatcaagtcgtttccgaagtgctttctggcaaggagggcgtcgatactgtcagtgatcaacggcagatttttgagccggtgttcgcagtgctgaatcgtgcgaccattgcaaccgccgcattggccgcggtgatggtggtcgtcgccattatgctgaccggtaccacaattcgcatgtctgctgcgtcacgtcgaaccgaaacggagatcatgcgtttggtgggtgcttcgaattggaccattcggctgccattcattcttgaaggggcgatcgcatcaatggtcggctccttgctttcctgcgtcactttatcggcattggtgaaggtatttatcactgattggcttgcggcctccgtgaaatggattccatatgtgaatcagatgacggtattgtggatttcgccgattttggttgcaggagcggtgctgttgtcggtgattgcatccacagtgtcgttgcatagatatttgaaagcctgagaacattccgttttgtacggattggatacgtttatctgtgtcgcgttttaagcatgggatgctatggtatggaaccaatgatgggaggcaagtgaccgaatgacaagcaagaaagctctaaaaccggccgtcgcggtgtttgcaacgggggctttgtgcgccacgatggcgattgccccgttctcgtctgcggttccgcaggcgcaagccaatacatacagcaatctggtgaatgcccagaataagaaggctgccagctctcagcgtgaagcccagttgcgttcacagctttccggtgtgaagtctgatttggccgacaagatcgtcgagctggatgaattgacaaatacgaaaattcctgcagctcaagctgcagtcgatgaggcaaatgctactgccgcttcggcacagagtgaagctgatgctgcggcttcccgtttggaggccgcgcaaaaagataaggaaaacctcgaagcgcagatcgaacagaccggcaaggattatgatgacgcgcatgcggccgtggcacagatggctcgtgaagacctgcatggttccgatgcatccactgtgatgagcgtggtgacaggttccacgagcactcaggaattcattaattccatgcagtctcgtgatgcgttgagccgtaccgaagccaatgcggcaagtgatgcggcgaatacgttgaacacgtcgatgaaccgcagcgagcgtctttctgcaatcgagaagcagatcgccaatctgaaaaccgcagctgacgaaaaagccgcttccgcacagcaggctgctgcttccgcacagacccagcgcgactcgcttgaccagttgcgtgcagaaggcgaaacccgccgtgccgaattggaaagccaacagtcgcagctgaacggcagcgtggccaaacaggcggtgcaaacggttatgttgcagtcacaggtcgattccttcaaccgccagtatgcagccgagcaggccgcagcagctaatcaaaacaatggtggcaatcaagggcagacccggccaggcaacaacaataccaatagtggcggcaacaatgtgacgcctgctcctacgcctacgcctactcctacgcctgctcccgcgccgagtaccaataacaattccggtcagggaacctccaatggcgattacggcaatggctacgtggccggccagtgcacgtggtgggcgtacgaacgtcgtagacagatgggtatcggaaccccctcgtacttgggtaacggtggccagtggtacgctaccgcaccgtcgtatggtcttcgcgtggatcatagcccgcaggtcggtgcggcaatctccttcctgcccggtcaggctggtgccgatggcttctacggtcatgtgggtgtggtggaagcggtgaatggcaacaccatcaccatttccgaaatgaacgcggctggtggcccatatgtggtgtcgtaccgcacactgtacaacgcgtcccagttctggtatgtgcactgattcatcaaggagcgtttgagctttccttgagcgttgtgtcgcgggagcgcgccgcctgaatcgttgggcggcgcgctcccatgatattgtcgattgttgcgttgcagaacacttctttgaagaaccggaaaggaggtccgacatggccaaggagcaaggcgtgaagccgattgcgcaaaacaagaaggcacgccacgactatgccattgaagacaagtatgaagccggtctggtgttgaccggcactgaggtgaagtcgcttcgagaaggccgcgcatcgctggccgaatcgttcattaccatcgaccgtcgcggtgaaatgtggcttgagggagccaatattcccgaatatctcaacggaacgtggaacaatcatgcccctaagcgcaagcgtaagctgttgcttcacgcggcgcagatcgacaagctggctcgtcaaagccaagccaagggtttcaccatcattccgctgagcctgtatttcaaagacggtcgagtcaaggcggaaatcgcattggcacgaggcaagaaggaattcgacaagcgtcaggcattgcgcgaggagcaagacaagcgtgaggccttgcgtgccatgcgatatgccaacaagcaggtgcgataagtggtaaccggaaaatttccggtttcacatactgatatacagcggtggccgtaatctttttgtagcttgccctctctagtgttatggttcagattcggtcgaatagaccgagcgagacataggagaaggatatggaagcgaagaaaagtctgaaggcggttgccgcgtgtgcgctgagcgttgcgatgctgtttgctggagcggcatgcggcaccagtgatggaagcgacgatgcggcttcgtccgatagcggttcgaaagcgagcgaactgacgggttatgacgtttcgtcggtgcagaaagacgatgacatcgccaaactgttgcccgattatgtgacgaaggacggcaagctcaccatcggcatggacacgtcgtacgctcccgccgaattccttgcggaggacggcaagaccccggtcggcttcgatgtcgatatcgccaaggctttggcgcaggtgttcggccttgaagcggatccggaaaccgcgaatttcgattcgatcattccatcggtcggatccaagtacgatatcggcatttcgtcgttcaccgtgaccaaggaacgtttggaagcggttgatttcgtaagccattttgatgccggatcggcatgggccgtgaagaagggcaatccgaacaagatcgacacgtccgatctgtgcggcaagaaggtggccgtgcagaccgccaccatgcaggagaccgaagcgaacaagatagccaagcaatgcgaggccgacggcaaggataagcttgaagtgatctccagcaagctgcagaccgatgtgaccacgaacgttgtcactggcaaggccgacgtgttctatgccgattcgccggttgcgggctatgccatcgcgcaaaccgatggacagctggaaatgctgggcaaggtcgaaggcgtcgctccggaaggcatcgtcatcaaaaaaggcgacagccagatggatgaggccgtacagaaggccgtgcagaagctcatcgacgacggtacgtatctgaagatccttaagtattggggtgtcgaggacggtgccatcgaaacgtcggaaatcaatacgccgggcgccgaataattccatgattgaaccgtccacggatcagacggttcaaggatcgcatgactggcgacgtgctgggaacaaagcgggttttgatcatattgtgatatggcaaaacccgctttttcgtaaggaaaaacggcatatcgaatagagtttgcgtactattaacgtggccgtagcaatcgttttctatggtgcctgcaggacttcggttcggccgtattcatacggttgggaatgaagagaggatccgcgatggctttcaataatctgaggaaactcgctgtttttgcactcagcgccgccatgatcgtttcgttgggtgcgtgcggcacatcggaaaagtccgattccgcggcttccagtgattctgagtcgtcgtcgaacaccaccggttatgacgtttccggcgtgacgaaggatgacgatatagccgcgatgctgccggaatcagtcaccaaggacggcaagctcaccgtcggcatggacacgtcgtacgctcccgccgaattccttgcggaggatggcaagaccccggtcggcttcgatgttgatatcgcgaaggcggtgcaggccgcactgcagaagctcatggatgatggcacgtatatgaagatcctcaagcattggggcgtggagaacggagcgatcgacaaagccgaaatcaatccgactgacctcggctgaacgatcaaacgtaaggcaggcatcgcacacggcgatactgttaagccgatatgacggaaggcatgcgggtcaaatccgcgtgtcttccgttttcgtatatggatcttccgtgattcgacggagctacattgcgcgattcttggctgatacgtaaggtttgcgcaatgtaacgtacatgtagcattgcgctcttatcgtgcctatttgagatactgaggttctctgcaaccgaatggcgttgagattttcggtatggcaatgaagggataagaagaaggatatgcataccatgtctttgaagatcaagtccgttgtggcgcttgcgctgagtgcggcgatgttgttttccactgccgcttgcggcacctccgaggcttccaattccggcgattcgtctgattcgtcgaacgctaccaccggttacgatgtcagcaccattaaaaaagatgacgagctggccaagctggtttcgtccggcgatttggtgaaggacggcgagctttccgccggtatggagctttcgtacgctccggctgaattctatgccgaagacggcaagactccggtcggctatgatatcgacatgaccaaggccatcgccaagacgcttggtttgaagccaaacatcgtgtcttccatgttcgacaccatcattccttccattggctccaagtatgatctgggcatcaccgccatgaccatcactgaagagcgtctgcagtccgtggatttcgtgagctactaccgtgcaggttccacgtgggccgtgaagaagggcaatccgaagaagcttgacacttccgacatgtgcggcgcgaagatcgcggtgcagaccggcaccgtgcaggaagaggaagccaacaccatcgccaaaggatgcgaggccgataacaaggccgaagtgatgtcgtacaagcgtcaggccgaagcggccaccgcagtggcgacgggcaaggccgatgcgttctatgccgattctccggtcgccggctatgccatctcccagaccgacggacagcttgaagccttgggcgacgtcgaaggtgtggccaagcagggcatcgctgtcaagaagggcaacacccagcttgctgaagccgtgcagaaggccgtacagaagctgatggacgatggtacgtatatgaagatcctcaagcattggggtgtggaatccggcgctctcgacaaggctgagatcaacccgaccgatctcgactgatttcatccccactatttacatcaacaacggaggaactgaagcatcatggcgaagaaacaaatcgacggcgacggcctcgatattccgaatcgcatcaaggcgctgccggttaagcgtacgggcccgattgtggcggcggtcgtcgtcgctctgctcgccgccatgctgctgcagggcctgattaccaatccgcgtttcgaatggaatgtggtctggaagtacctgttcaacgagaatgtgctcgaaggcatcaaatacacgctgctgctgacggtcatctccatgggcatcgccattattctggcagtgattctggccgtgatgcgcaagtccatcaatccggtgctgcgtggcgtgagctggttctacatttggttcttccgtggcacccctgtgtatacgcagctggtgttctggggtctgttcgccgtgttggtgcctcgcatcggcgtgggtattccgttcacttccattgaattctggagcattgactcgcagtccgtcattaccgcgtttaacgcagcatggctgggtctcgcattgaacgaagcggcatatctggctgaaatcgtgcgtgcgggtcttgaagccgtcgatccgggccagaccgaagcggccaaggcactgggcatgaagcgttccatgatcatgcgtcgtgtggtgcttcctcaggccatgcgcatcatcattccgccgaccggcaacgagttcatcggcatgttgaagaccacttcgctggtcaacgccgtgccgttcacgctggaactgcagttcgccaccaccgcaatcgcaacccgactgtacaagccgattccgctgctgatcgtggcctgcatctggtacttggtgatcacctccattctgatggtgctgcaatctcgcctggagaagcatttcggcaagggcttcgatgcgcgaccggccggcgcgcgcggcaagcagccgccgctgccgggcaaaaccgaaggcgaaccgaaagacgatatcgccaagcagaacgaggcaacgttcgcgggcatgaccgcgtgaggggagtgagcaatgactgaaccaaccaccaacggtgttgttcccgcagtgaaggccacgcaggtgcataaggctttcggtagcctgcacgtgctcaagggcgtcgatatgacggttatgcccggctcggtgacggtgattctgggaccttccggttccggaaaatccacgttcctgcgtttgatcaaccagttggaaacgctgaccggcggcgaaatcgacgtcgacggcgaaatgatcggctacaagtacgtcgacaaggacggcaagcaggtgctgcagaccctgaacgacaaggaagtggccgagcagcgttccaaactgggcatggtattccagaggttcaacctgttcccgcacatgacggcgctcgaaaatgtgatggaagcgccagtccacgtcaagcacatggataaaaaggaagcccgcaagcttgccatcgaagagctgaatcgcgtgggcatgggcgatcgcctcgatcactatccggcacagctttccggtggccagcagcagcgcgtggccatcgcccgtgcgcttgccatgaagccggaaatcatgctgttcgacgagccgacttccgcactcgatccggaattggtgggcgaagtgctgaacgtcatgctgtctttggcgaaagaaggcatgaccatggtggttgtcacccacgaaataggcttcgcgcgcgaagtcgccgatcagatcgtattcatggacggcggtgttgttgtggaacagggcggtcctgaaatcatcgacaatccgcaggaaccacgattcaaggacttcctgcagcacgtgctgtaaatcgccgcaagcataatcgtaagaatcagacacctcttcgtcgtaaggattgcgatcaagggaatggctgagaaaatccccatgttgaaaactgtcagcatggggatttttgtgttcatatatcaaaggttcagcgcgatgagacggtttcgtttcgaaaatgacaccattacccgataagctgaggtgttatgtgtggaatcgtaggatatgcaggaaatgtggaaaccgcgtgcggcaagccgttggaagtgtgcctccaaggcctccagcgtttggaataccgcggatatgattcggccggtgtggcattgacagcgcccggcatggaccatgtggaggtgcgtaagaaggcggggcgtctcgccaatctaatcgaagacgtggaacgcaatccaatgccgatggccaccgtgggcatcggccacacccgttgggccaccaacggcgtgccgaatgacatcaacgcgcatccgcatacttcgcgtgacggcaaggtcgccatcattcataatggcatcatcgaaaacgcctctcagctgcgtcttgatctgcagacggaaggttaccgtttctcatcggaaaccgatacggaggtcgcggcgaaactgctaggcaaaatcagcgagaaaatcgttgaggaaaccggcaagcctgatctgttcaaggccgtgcggcgcttggcgcgcatgctggaaggcgcgttcacgattctcgccaccgactgccgtcagccgggtatcgtggtcggtgctcgccatgattcgccgctggtggttggtcttggcgaaggtgagaattttctcggttccgatgtggccgcgttcgtcgcctacacgaagcgtgccatggaaatcgaccaggatcaggccgtgatggtgtccgccgataaggttgtggtgtctgatttcatgggcaacatcgtggccgatccgaagacctataccgtggattgggatgcttccgcggccgaaaagggcggttgggactccttcatggacaaggagatccacgaagggccggcggcggtgcagcgcacgctgttgggacgtcttggcaaggacggcaatctcaatcttgacgaggttcgcatcgacgagcatgatttcaaggcgatcgacaagattatcgtcatcgcctgcggtaccgccgcctacgcgggcatggtggccaaatacgccatcgagcattgggtgcgtattccggtggaagtggagcttgcccacgaattccgttatcgtgatccgattctcaccccgcgcacgttggtggtggccatttcgcagtccggtgaaaccatggacacgctgatggcattgcgtcacgcgcgtgagcagggttcgaaggtgctggccatctgcaacacgcagggcgcgtccattccgcgtgaatccgacgcggtgctgtacacgcacgctggtccggaagtggcggtcgcctccaccaaggcgttcgtggcgcagattactgccgcctacgtgcttggcttgtatttggcgcaggtcaagggcgcgatgttccgcgacgagatcgcgcaggcgttggattccctcaaagacatgcctcgcaagatccagtgggttcttgatacgcagaccaagaccgtgcatgatgctgccgcgcagatggtcgatgcgaagtccttcctgttcctgggccgtcatgtcggctacccggtcgcgatggaaggcgcgttgaaattgaaggaaatcgcctacaccttcaccgaaggttttgcggccggcgagctcaagcacggtccgatcgcattggtggacgaaggcgaaccggtagtgttcattgtgccgccggcacgtggccgcaatgtgctgcacgccaaggttatttccggtatcgaagaggtcaaggcccgtggcgcgtacattatcgccgtggccgaagagaacgaccccgatgttgaacgctatgcggatgtggtgttctggcgtccggcctgcccgacgctgatgagcccgctggtggacgtggtgccgctgcagctattcgccatggacatggccaagctgaagaattacgacgttgacaagcctcgtaatctcgccaagtccgtcaccgtggagtaatcgttcatacgatgcatcaacagcgtcagcagaagaggtatcgttacgttcttgaagaacctcgcattccgttcgaatgtgaggttctttacgagaacgatgcgattatcgtggttgacaaaccgcattttctcgccaccacaccgcgtggcatgtggtatcgcgaaaccgtgttgattcgacttcgggaacagtatggcgaacctgatattgttcccgcgcaccgtttggaccgacttaccgcaggcatcgtcgtatttgtgcgcaaaccggaattgcgcggcgcttaccaaatgctgttccagaatcgcaaaaccatcaaaacctatgaatgtttggcgccgcttgcccccgaacagcatccgcagtacggaacaatcgtaagaatcgacaggcatcaaccctttccggcaatccgagcatcgcatatttgcaaggatcgcgggcgacttcaggcgtacgaaattccggaaaccatcaatgcgcaaacgttgattgagcggggaagtacggtacgttgcctcgacggcaaagcatatgtgaattacgtgctgcacccgaaaaccggcaaaacgcaccagttgcgtgtgcatatgaattcgttgggattgccgattttgggcgatgatttctacccgaatattgtgcagcgttcttacgatgatttctcgcagccgttggaattagtggctcgtgagttacgcttcgacgatccggtgacgggagagcctcgtacattcgtttcgaaagtgccgcttggctgattaacggtctgatcagcaggtattgctcgctgaatcaagatatataaaaactgtccatcgctgtactcatatttgctcgcatcgctatggcgtgttgaagttgcgcgtccctataatcggacattttacatttcgtgttatcgagcgtgattaggatgtgctcttgttgtgctggctggcaaaggcaagccggctggaaagaacgagagagaatatgaaccatatttcaaaagcgcttcgtggcgttgccgacaaatataacggcgtatcactgattatccgcattatcgtcggtcttatcgcgggtaccgcactggcattggttgttccgcatatgacgtggatcggcgaattcggcaccctgttcgtaagcgcattgaaggccgtcgctccgattctggtgtttgtgctggtggcaagcgctttggctcaaggcaattccaagcttgacggccgtttcggcacggtgcttttcctgtatctgttcaccacgttcctgtccgccgtcgtggcggtgctgacgtctcgcatgttcccgcagaccatatcgttgggcgatgccgctgacgccgatgtggtgccgcagggcttgagcgaggttgtgcagacgttgttgaccaatatcgtggccaatccgattcaggccatgatcgacggcaactacatctgcattctgatgtgggcttgcctgttcggtcttgccatgaagggtattgccaatgaaagctccaaggcgttccttgccaatgtggccgatggcgtgtctcaggtgattcgttgggtcatcaatctcgccccgttcggcattatgggcttggtgttcaccagcgtttccgaaaacggcttggcggccttcaccgagtacggtagcctcctgctcctgctcgtcggtaccatgctgctgatggtgctcgtgttcggcccgctggtcattttcctgtacctgcatcgcaacccgtatccgctggtgtaccgctgcttcaaggaatccggcctgaccgcattcttcacgcgttcttctgctgcgaacattccggtcaacatgcagctgtgcgagaagcttggtcttgataaagacatgtattccgtgtccattccgttgggcgcaaccatcaacatgaacggtgccgccatcaccatcaccatcatggccatggccgccgccaatacgatgggcattcagatttcgttgccggccgccattctgctgtctgtggtgtcggcgctcggcgcatgcggcgcttccggtgtggccggtggctcgctgctgcttattccaatggcctgctcgctgttcggcatcagcaatgacatcgccatgcaggtggtgggtgtcggcttcatcatcggcgtcatccaggattccgtggagacctgcctgaattccgcttccgacgtggagtttgcggcgaccgccgaatatcatgcctggctcaagcagggccgtcagcttcctgcgttcatgtattccaagaaggaacgccagcagctcggcatcgaagcctgatttcacccgatttcagcttttcgttcaatctagaaggcgtctctcccacgtggttcacccacgctggagaggcgcttttcgtattggctgatttgattgattgcgttgattaaagtcgcgagatattgcgattagtcgagttccgccacggatccgcggtcgatgaattcgggggtgataagtttcttgattccagaaggcacttttttgccattgcattgttgctcgatcatggaaaaagcctcttttcccacagttctgagcttgagccgtatggtggtcagttcaagacggggcacaacgccgcggagtgaatcgtccacaccgatgatgctgacatcttcgggaacgcgctttcctgctgtcctcaggccaagcatggcaccgtatgccatttgatcgttgcctgcgaaaattgcggtgcaatccttttcgtgagccaaggccaatccggcttggtagccgctatctgcttcccagtcgccgtaatacatgggtggtgtgggaatgccgacttgcgctaatgcgtcgcgccaccctctgatgcggctctgtgctgcgcgtgaaacggtggggcctgcgatgtggtacacagttttatgccccttcgacaggaaaaagtccacggctgcagtggcgcaaccatacgagtccgaatcgatggtggggcagtggtttgccggttcctcgcaaataagcactacaggtaggttgtcggatggcttgaactggttgaagtcggtgaaatcgcgttccataatcacgattgcaccatcgagggggaggccttccacaagtttcagtgcgccggcgagtgactgatcctgcaggttatccaaggggcgaatggtgatggaatagccgctattcgcggccgctgtagtgatgccttcgaggatacgtgagttcccgtaggccgacatatgcgaaagcagtacaccaacattgttgaaatgtccgcttttcaaagcacgtgccgcataattcggcctgtatccgagatgctccatggctgcctcgaccttaagtttcgtcgctgggcgtacggcatcgctcccattagccactcgggaaacggtctgcggtgaaacccctgcttccctggcgacgtcttgcagcgagactgagttgcgtgccatgtgtatctaccttccgaacgaaaatgcgtactgtgcttaattttacatgcttacttctgtattgttttcgtcaccatgcaatttgttcgatgaagtgaatatgtggtctagaatgtgcgaaaagtagacacttttggaatatggtgttattatgataacgcaaacatttggaaggagctgttttacgggggtgtaaattgccctgtgaaatggtattgcctcgaaggagaggaatgatgtcagcaacggaagttgttgccaatatgccactgcattcggcaaccgtgcgtgtcaataaacacaaggcggattggcgcggttggaagttcatgtggccgttcgcgttggtgttcgtgttcgtgttcgtgatcccgatcctgtacgcgatctacatcagcttcttccagaagcagatgatcggcggcacgaagttcgtgggaatcagcaactacattcgcctgttccacgaccagcagttctggagctcggtcggcagggtcgcgctgttcacctgcgtgcaggtgccgatcatgctgttcctgtcggcggcgatggccctggcgttggattccatgaagctgcacggcgcgaagttcttccgcatcagcacgttcctgccgtacgcggtgccggccgtggtgtcgactttggtgtggggcttcatgtac

SEQ ID NO: 881 - DNA, 728 bp, Unknown
  gut microbiota DNA sequence
cctgaacgactggctgggcacgaacctcgacgtgctgagcccgaacgtgctgctcgcttcgatcggcaacatcgtgacctgggagttcaccggctacaacatgctgatcttctacagctcgctgtccacgatcccgcattcgctgtacgaggccgcctcgatcgacggggcgtccgagtggcagatcgtcaagtccatcaagctgccggaactgaagggctcgctcgcgatcacggtgatcttctcgatcatcggctcgttccagctgttcaacgagccgagcatcctgcagaacatggtgccgggcaacgcgatcaccacgtactacacgccgaacatgtacgcgtacaacctgagcttcgcgggcaaccagtcgaactacgccgccgccttggcgatcacgatggccgtgatcacgatggcgatcgcgtacgcggtacagctcaacagcatgaaggagcagatgaagtaacgcccggtggcgcgaaccatccgcatataggggaagaaacgctaaggagcatcgaaaatgagtgacgcaacaatcgccgcgggcacggagcagaggctcaccgctcaggagctcaaagcccaggagaaggccgcgaaaaagaccgagaaggaacgcctcaagagggtcgcgcgcgacgagaaggccgagcgcaagagggctgcgaagtccggcttcgcgaacgtggcgaacccgcgcaggagcacgctgctgacca

SEQ ID NO: 882 - DNA, 2235 bp, Unknown
  gut microbiota DNA sequence
atgtcatcggttgcgacagctggcgaggttcctgaagaaccccataactgaacccttcttctctcttctctctctcagccggcggcctttctctccgccggctttcttcttttctgaacaggattcatgcgattgcgattggtgttttcggttgggtaaaaggcgcatcgaaagaaacggtcggccgcgcgcttgtttgcgtatggccgaccgttgacggtctgtgattatgcgtggttgcgtgttagcgtttgtgagtcagcagcggtcgtaggagaaatcacggatgcgttcgagacaatccacgctggccgtcagccatggcatgccgatcacgaacacatgccccaatgcttcgtgacggcccgctttcgggtcgaaaagttcgaaatcggcacccttgcgcgatagggctgtggcaagcgccagattgtctgcctccagaaaatcgtcgctgcaggtggtaatgaacagcggcggcagatcaacgttgttgacgagtccttctgcagtgaggaatcgcggatcagccgcttcgaggccggcgaagaattccgtgccaagagcttcgtcgagcgcgattcgcgtgtctggggagaatgcggtagatcccaagccggcttcgtcggcggtctgcttggaagccaggctgtacacgccacaaaccggagctgcgccggcgaaaccgatgcccgaaggctcgtcaatgccgaacgcggccgcagcttcggcgctgttttcaatggccaatgtcagcatggtcaatgcgccgccggccgaatcgccggtgaggaatacggcgtttggattgactggataatcggccagatgcgccttgatccaacgtaatgccgcttgcacatccgccagctgacccctcaagtcggtctgcggggccgggcgataattcagtgagaacacggcgaatcccatatcggccagatgcacgttgaaattacggttcagttccttatatccgtaggtgaaaccgccgccatgtatatcgatgtacaccggtgtcgtgtgcccggcgcgcagtacagcatcatgtggcagatacagatcaagcaagtgtccgcggcactgcccggcttccgtatcgtaaccgccgtcaggcaggtatggaaggtcttcaatcacatcgatcgtgtccggagtatgccacagttcggaacgtggagtgtcaactgcgatcgcgctgaaacgcaggtcaagaattccacggactcgcttttcggaaagtcccgcaagatcgccgtcggtttccgtccaacgttccgcatgcttgatcatctcgtcggtaagaccatatttttccgcatattgcgcgatgagtgcctgttcgtccgccatcattgccgtcctttcgtgattgttcatacgattgcggtcgttgtcgtcatcggaatgccgcacctcgatatatcgtatcggttcgatacggaaagcgctactgcaatcatccatattttcggtgcgctcacagcgagtttatgtaacggtgcatgcgttgcttttattgcgattgcgacacgccgtaatcacctacgttgcatcgaaaaacggttcgcatagaatgagtcgcgtttgcgaatccgaacaggggtttcgaccgagagagacggcaacgggacgctcgacaaacgacggacgtgaatcgtaacggcaacgaatagccgtaagagcaacgaatcaacgcaacaacagcccacgaaaacctaaatacccaagcaaacaatctgaaggaacgctacgtatgtacgtcgatccgaatcgtaacaaagaagcaggcaacctcaaatggatcctgccatactgcaaacccgacctgccacgggtggccggcgcgatagtgctgttctgcgtcaacaacaccatggctctcatcattccgctattgtcgggcctcatcgtggaccgtgtgatcgtgcaaggacacgtcagcgaactgacacgactgtgcatcatgatgatcgtgttcaccatcgtgcgcgtcacctcacgctacggctaccaaatgtggatggaacgtttcgggcagaactccgtatttcgtctcgtcagcgacgaatacgagaaactgcacgaacttgacttcacgtatttcaaccacacacgtaccggcgacattatgagccgcatgacctccgacaccgacgccatccgtcacgcgttgagctgggtgagctaccaggcgctcgactgcgtggtcatgttcgtcggcgctctcgccat

SEQ ID NO: 883 - DNA, 743 bp, Unknown
  gut microbiota DNA sequence
ctgggtggactgttgctcgccgccagctgggccattatcggtttggtgttgtgcatcaccattgtgggcattccactgggcattcaggcgttcaagatggcggggctcacgttgaccccgttcggtaagaccgtggagtatggcggcggcgtgggatccgtgctgatcaacatcatctggttcgtactggccggtttgtggatggcgattggctacatacttgccggcctgctgaactgcgtcaccatcatcggtattccgttcggtatccagtcgttcaagatggccaaattagcgctatggccgttcggctcgcaaatccgcagcttgtaaatcacttcagatcacttcacccagcatagacggccatcgactgccgtcttgcatataagtatcgaggagctgcggtccgaacaggccgtgaccactgcaccctaagcaacgaaacacgtctcatttcgcttatggcagctccagagcggcaaggctcaaaaaactgaacagtcgaacatacctacccaaatgattgctaatgtcagccgccttgtgaacaggttaaagaatacttgcgatagcggcttctccaactgtacgttatcgagaagaagacatcctccccccgtcaaatacggttactcacgcagcttgcttgccgcgaagataaacaatggcagcgcggcgaacgcgtagttctcgcactggatatacaggtacacgatcaggacaagccagcagataacagt

SEQ ID NO: 884 - DNA, 229 bp, Unknown
  gut microbiota DNA sequence
cgttcctcctctcacctgaagtttctggcttcgatcttgtcatattcggattgcacgctgttcaggaatttttcggtgttgcccgactgaaccagcgtctgcaggaagcctgcggggttgatgctggctggcacgtaatggtcgcagaagtcggccagtttgcccgcctggtagaagtcaagcacaccgttcagcgcttcatcgcccacatacgtgtctttgtaggggg

SEQ ID NO: 885 - DNA, 739 bp, Unknown
  gut microbiota DNA sequence
tccttcagcatgatcaacggcaggaagtagttgttccacgtcgccacgatcgtgaacagggccgtcgtcacgatccccggggcgagcagcggcagggatacctggaagaacgtgcggaactcgccggcgccgtccacgcgggcggcttcgagcagctcggtcggcacggcctggtcggagaagatccacatcaggtacaggccgaacgtcgacaccaggctcgggatgatcatggcccacggggtgttcgtcaggttcagcttggcgaacagcaggaactgcggcacggccagggcgatgcccggcaccgagatggcgccgatgatcaccgcgaacacggccttgcgtcccgggaaacggaacttcgccaggccgtacccgcccatgatggcgagcagggtcgcgccgccggcgcccacgaccacgtacaggatcgtgttcaggaaccagcgtccgaagatgccgtcctggtaggtgaacacggtcttgatgttgtcccacaaagcgaacgtgcggccgaagcccagaccgaacgtggacgtgaagtccgcctgcgtcttcgtggcgttgatcagcaggtacacgaacgggaacaggcagtacaccgcgaacagcgcgcacacgatggtcagcagcgtgctcctgcgcgggttcgccacgttcgcgaagccggacttcgcagccctcttgcgctcggccttctcgtcgcgcgcgaccctcttgaggcgttccttctcgg

SEQ ID NO: 886 - DNA, 199260 bp, Unknown
  gut microbiota DNA sequence
cctgctagtcagttcgattccatgcgacatcgatttccgcttcccaatctcaaatgacaccaaaatacctgcaaccgattgtgcaatcccgtgggcgggagtgggttgcaggtaaaaggtgtcgagttacagcccagaatcacccctaactagtaccgaaatacccgcaaccgcagtaactaacccctttatacctgcaatccggcaaatatggttcagacaatccgcacatccagaccgctatccgaacacaccgtttatactagatcacacatcgaatcaacatctagaaccgaccgtctccaacgacccatagggagagcacatggacgatataagaccacgctgcggctggtgcaatctcagcaatcccgtctatgttgcctatcacgatgccgaatgggcggttccgtcgcatgatgaccaccacctctttgagatgctggtgctcgagaccttccaagccggactgtcatgggagacgatactgaacaaacgcaagcgtttccgtcaggcgttcgatgggttcgacatcgaacggatccggcgctatgacgagaacaagatcgccgaactcatgaacgatccgggcatcatccgcaaccgtcgcaaaatcgtcgcgacggtcggtaatgccaacgcattccgggatatccagacgtcgtacggcagtttcgacgactatatttggcggttcaccggccgtcacgtcatctacgagacaggcatgactacatcccctctgtccgacgccatcgcagtggatctcaagacgtacggcatgcgattcatcggcaccaccatcgtctacgcctatctgcaatccatcggcgtcatcaatgcacatgagcctggatgcttcctgcacagggaaaggtgacccgcgcaaggatttataaggtcgctcgggcagaatctctccgagaggaacccgtgcttctagttattttgcttatcgagttcttggtagcgctctttgaccccggtaaggattccggcagattgttcacgctactgcgcggtgagcgcttcgagcagttcgccgaaagtcaacccaccttcactaccggatgacggataatggttttgagattttccggtttggctcggcgcgggtcggataggtagatctcgtgatggcggcgggcgtcggagaagtcgagcccgtagccttgcgaacgcgcgtagccgtccagaatcgtcacggttgcgggctcgtcgtcgtacgggcctttgtgcatgacctgcgcgaccacgccttcatcgaagtcgaagagatatgcacgattgatgtcgacttcgggatgcttggaggcaaacgatgccttggcccacgcaaagacctcatcggtcacgaattccggcagacgaatcatcgaagtccaatagaagtcggttttacgcgtgtaatcgacgccgggcacacccttctccatgctccataagccctccagcggaggcacggtgtagtcgaagtacccgtcaatgtgctcgtccggattatttgacttcttgttcattttgatggtgaacgaaatgccgtacagcagttgcatcgccttggcgtagtcgccgccttcttcgttcggatctcctacaccgtccaccgcgacgaaccgcatcgccggcaccgtgacgatggcgggcatcctcttcggctgatacaggtccttatattcctttttatagtcgaatgccatcgctcatttcccctccgccaccgcatcgatctcatcctgacgccgccaccgcttgaggtttggcaacagcgccgacatgcagtcctcggcctgttcgacgctgatatggcaggattccgccatcatcggcgcacacgcggcgaccaattcatcgctattggcataggcctgaagaaaaacgccgtcttcatagcagtagttgcaataatctccgtttcgcgttccatccggttcggtgccgtgatcttccgggcggtaaaacggcatggcacaactttggcaaaaaccattgtccggcatttccataagcctcgccatcggcacctcaaaacgggtgctgataagccgaatcatgtcgatgctcggctctgccgttcccttctcccagcgggaaagcgcctgttgggtgacgaacagctcgtgcgcgaactgcgactgcgtaagacctcgctcctcgcgcacgactttgataacctgaccgatcgacatgactacctcccgacatcggaaaacgattcgcgcgtctcgctgtgcgcttgctgattccagtctaagggcatgtcccgttcgccaagcgcgggtacaacaaaccgttgttcgcgcttgtatcccggaggaagaaacagctcggtcgaacctatttcctctccaccccttcaattctcccggttcctctgactcctttgcgagcgccgcggatgggatgagcacgcttacgtatggggttgcgccagacaggacgtcgtcgtagaagcgctgtttggcgtcgatgaagtcgatggaatcctggatttccgcgagctgctcgaccagccgcgcccgcttgccggcgagcatctacttgcgttcggggatgctcggctcgtggaggagcgtaaggggcgcgagtaggggttcgcggctttgctgcggtctctccctcacccggctacaccgggagctccctcgtcagagggagcttaaattcggtctggttataggcccatgggcttcttgggctttttggcgctcatgagcatgaggaagctgcgggactgggcggtgatcatgaagcccgcctcatagctcagcgccggctcattcgggttgtgcgtatccacgaccagctgccatttgcggccgtatcgctcatccggcagggtgaacataatcggctcgtaatgcgcgttgaagatcaggatgaagtcattgtcgaccatccggttgccgtaccagtcgacctccggaatatccgaaccgttcagatagatcatcatggagaacgcatgcgtgttctgccagtcgtccatatccatgatcgagccggtgtggtcgaaccattcgacctgcggaatcatgttcgaatcgtcgccgggctcacggcctgtgaagaagcgacggcggtgcaacaccggatgatccaaacgcagatgaatgagtttggaaacgaaggcgagcagttccttgcgtcccttgtcaagatgccagttggtccaggagatctcgttgtcctgacagtaggcgttgttgttgccctgctgggtgcgggccacttcgtcgccaccgcaaatcatcgggataccctggctgaacagcaacgtggcgaacatgttgcgcatctgacgctgacgcaagtcgttgacgtccggaatattggtcgggccttcaacgccgcaattccaagagcgattgttgctctcgccgtcgcgattgccctcgccattggcttcgttgtgcttttcgttgtagctgaccaggtcgttcatcgtgaaaccgtcatgcgcggtgatgaagttcacggacgccaccggtcgacggccgttgacctgatacagatcggagctgcccatgaggcgtgatgcgaattcgggcaacgtggagggctgtgagcgccagaagtcgcgcaccgtgtcgcggtagcggccattccattcggaccagctggacgggaagccgcccacctgatagccgccggagcccagatcccacggttcggcaatcagcttcacgcgcgagatgatcgggtcctgctccacgatgtcgaagaacgcggacagcttgtcgacctcctggaactggcgtgccagcgtggcggccagatcgaagcggaagccgtcgacgtgcatttcggtaacccagtagcgcagcgaatcggtaatcaactgcagcgcgtgcggcgagcgcataagcagcgagttgccggtaccggtggtgtcgaagtagtgctgctggtcgccttccaccagtcggtagtaggaggcgttgtcgatgcccttgaagctcagggtggggcccatatggttgccttcggcggtgtggttgtacaccacgtcgaggatgacttccatgccggcgtgatggtaggccttgaccatggacttgaattcgttgacctgctcgccgcgttccccggaggaggagtaggcgttgtgcggcgcgaagaagccgatggtgttgtagccccagtagttcgacaggcccttctcctgcaggaaggagtcgttgacgaactggtggatcggcatgagttcgatggcggtgacgccgagcttcttcaggtattcgatgacgctcgggtaggccaggccggcgtaggtgccgcggatgtccggcggcacgtccatgttgaggttggtcatgccgcgcacgtgcgcctcgtagatcaccgaatcgtggtacgagatgtaggggtgctggtcgttgccccaatcgaagtagggattgatgacggccgacttcatggtgtgggcggccgagtcaaggtcgttcatcgccgaggtgtcgtccgggcttttgaaccagtaggagaacaggctttcgtcgccgtcgatgttgccttcgatggccttggcatacgggtcgagcagcagtttgttggggttgcatctgaggccgtgcatcgggtcatagggaccgtagacgcggtagccgtagcgttggccgggctggaggccggggatatagttatgccatacgtatgagttctgttcggtcatttcgatgcgcgtttccgcatcgtgctcgtcgaacaggcatagctcgactttctgcgcaacctgtgagtacagcgcgaagttcacaccggcgccgtcatagctggcgcccagcggatacattgatccaggtctgatctgcatagttttcagtatcccactttcttgtgtcactgatgtgccggggagttgaacgtcaggagaacagcgacggcttgtctttgtcggagttcctgacgatgagtctgcgtaacgcctcatgctggatggcgatcatcgaattggatgaggtgatgcgcgtggcggcaaggtcgctccacggaatccacgcggattccacgtgctcgtccgcgtcgaaatggcgctgctcccgcctgaacgggcccaaatgcaacaccatgatgtgggccagttcgtcggtcatgccttcggacgagtagaaatcgcccacgaagtcaacacccatggtgtcacggtccggcaccacgccggtttcctcggccagttccctcagggccgcgtccatgatgtcctcgccctcgtccatgagaccggcgggaagcccgtaggcgaacatgtccgatccggcacggtattcgcgttcgatgaggtaacggtcggtggacatgtcgtgcacgagcatgaccacacagggggcgtgacgcagcacctggcggccgatctcgtgttccttgccctgcttgtcggtcagagcgatgcgcatgtcgtccacgtggaagatgcgcccggtataaacggtttcgctactgatcactttggcgggcacgtccatgtcgatgccgtccgaggaggcgttcagcttatggtcgagccgatgctccagttgttcctgcttgcttccgccagacatgtcatctcctcggaaaaaacgtttttgccacgttactatagcgtcttaatctcgatgcgcggtaatggacagcgtccatggatcggtcgtgtcgtggaaccactcgacttcaggccttgctccggtcgcttgttcgatggcggctggcacgtcatcgatcgcgtagttgaaccacatggattcgatggcggcatgaggggtgttgatgaagcagggacgcacatggctctcccccgccattccatggccgagcatgatgccttgggacctcatacgggcttcataccgggcttgttcgatggcgtcggtcaccgggtggtgacgcaaatcgctggttacgtacacgtccgcaccggtggcacgtacctcgttgaacagggagtccccggagccaggcagaatggccacatactgaacaaaagtgtccgaatcgccgcatacctggatgccgagcgcgctggtcatgccatgatcggacacttcgtcgaatactcgctgagcgaaatccttcagggcaacaggcttcggcaaacgacccacacgccccaagccgaccggatgagaggcgtttgcatcgtcaatcggcacgagtggtttctggtcgatgagtccgaagtagtcggccgccgcctgtcccacgccgcgatacgcagcgtcggcattagtgtgccctacccacagcccgcagccgtgctggtagagtctgcggacgatgtcgccccggaaaccgagtccgctcgtctcgtgtacggaacggaagaacaacgggtgatgggtgatgagcaggtccgcgccagtagcgatggccttgtcaatgatggcggaggtcgggtcggcggcgaacacgatgcggtgcacgtcgtgactcagatcgccgacaatgaggcccggctcatcccattcctcggcgtagcgcaatgggtacagggtctcgagaacgtcgatgacttgcttgagattcggcatatgtcccattgtagtgggctattgctgcaagggactcattctgcaattgcggacaagccatgctcgtgctcttcattgctcgactatcggctcgccttcgcctacaaacaatccactggactgtttgctcaacggctcagccccctcacccgaggggagctagaaattgtcagtgtgcagcgagttgccagtcggaaccgatgccgcacgatacgtccagcggcacggcaaggtcgacggcgtgttccatggcgttgcgcaccagttcggtgacctggtcgccttctcccggcgcgatttccactaccagttcatcgtgaatctgcagaatgatacggctcttgacgtgagcctcggccaaggtctgctcggcgcgaatcatcgcaatcttcatgatgtcggcggcggatccctgaatcggtgcgttgagtgccgcacgttcagcggcctcacgcgcaacacgattggtcgaatgcagggccgggaagtagcgacgtcgtccgaaaatggtttccgtataccccttctctcgggcattggccaccagcgattcaaggtaatcgtgcaccttgccaaaggtatcgaaataccggtttttcaacgcttccgcttcacgtggcgcgatcttgagttgctgggcaagaccatacgtgctcagaccataggccaatccgtagctcatggcttttacgtggctgcgctggtcgccggtgatctggtcgaccggcagcttgtagaccatcgaggccacgtatttgtggaagtcggctccggagcggaacgcttcgatcagcgcctcatcatcggacagatcagccataatgcgcagctcgacctgtgagtaatcgcagctcatcagggcctcgtacccctcccccggcacgaacacgccacgaatctcacggccggcggcgttccgattggggatgttctgcaggttcggatccacggagctcaatcggccggtggcggcaacggtttgctcgaaagtggtgtggatgcgctcatctgatgtgttggtggcatcgatcagcgtttggacgatctgcttgagcttgttgatctcgcgatggcgcagcaacgctccgaggaaaccgttggcccgctcattgtccactgatttgacatacagatcctgcaatgcggccgcattcgtggtgtatgagccggacttggtgcgtttggtgggtttcaaacccatatcttcgaacagcaccttctgcagctgcttggggctttgcaggttgatttcggtgccggcatactcccaagccatttcctgcgcttggcgagcctcggcggcaaactggtcacgcatggagacgagtcgaacgctatcgactttggctcctgtgtgctccatgccgtgcagcacgcgggaaacaggaagttcaatcgcgcgcatcagccagcattgttcacgctcgtcgataatcggcccgagcgtgacggcgaggctgcggataatggccaaatcacgcagacgatgttcgttcggatcttcttcgacctgatcgtcgtcgaagtccaacgtgccttgcgaaggctgttcggtttcggtgaagtggatgtcgaggaagtgctcggccgcctgcttgaggctatcggcatggaaatccggttgggccagatacccggcaagcttggtgtcgaacatcggcaggtccatgtcaagatcgaccgcgcccaaaagatgcagcaattctttatacccatgcacgatggtgcgggagtgttcgcttttcaggaaccgcgcaagctgtgctcgcagggtatcggtgattggaaggggcactatggccgctgatgttgccgtggccacggcaatggcttgtgccgtggcacgccccggcctttcgtcgccccatgcggccacggtccaagcgtggccgaccgcgtcgccgcagatggcatgccgctgcgagccatcgccatagtcggaaaccgtgaaatcggcgatttcaccgggaaccttgacttcgacgcgatgggccttgacccattcgtcgaactgctccggagcagtgatgctcgtgggttccggcaggttcagatcgaggctgctatcctgctcgttctgctcattattcgtagactcgccagctccggatgtgttggatgccttggccccggtattgaaggttttcagtacacgactcttggtgcgaggtccgaattcaagctccttgaacagggcgtcgatctgtgccacgtccacggtgccgaatgtcagatcctcgatatcgacgcctagatcgacgtctcgtaccagtgcgttgactttgcgattgagtttgacctggtcgatattggcccgcagtgattcgccttttttgccgccgatttcatcggcgtgctcgcaaatgccgtcgagggaaccgaattggttgatccacttggccgcaaagccgtcgcctacgccgggcacaccgggaatattgtcggcggtttcgcctcggagtgccgccagatccggatattgtgcgggagtgactttgtatttgtcgatgatggactgcggcgtcatatgcttcaggtctttgaagtgatggcccgggtacaacacggtgacgttgtcatccaccagctggaaagcgtctcggtcaccggacaataccagtgtgtggtaaccggccttgtctcccatggtggcgagggtggcgatcacgtcgtcgccttcgaatcccggcttctcgatgtaggtgacgccgagggccgtgagcatgcgttgaatcaatggcagctgggtgagcagctcttcgggagccgcctcacgggtgcctttgtattgcggaagcatctcattgcggaatgtgccgcccttcacatcgaaggcgacgcccagatggtcgggcttctccgcatcgatcacctgcgcgagcatggtggcaaaaccccagacggcgttggtggcctggccgctggaggtgctgaagttgtcgaccggcagggcgaaaaatgcacggaaggccagcgagtggccgtccaccaccagcaatgtttcattggtgggtacggtcacgctggcctctcccatagtgtgtttgtgttgctttacgactcagtacggcgacgccgataatcagcgttcgcccgaatcagaaggcttcggatcgccgtacttggcgatgatggcctgagccaggcgcttcttggggatgcgctggtccatggaggtcttctgaatccaacggaaggcaccctgctcggagaagtccgccttgtccatcagcagacccttggcgcggtcgacgagcttgcgctcctcaagcgtgtcttcggccttcttgagcttctcttcggtttccttgagctgatcggtggtttccttgagcttacgttcgctgcgctccacgctgtccagcaaatcgttgatctcggcgaaacggcccatggccacctcgagggtcggcagcagcttggattcctcgtacggcttggtgacgtatgccatggcgccagcgccggtggccttcttcaccagatcggtctgggagaatgcggtgagcatgacgacgggggcgatgttttcatcgcagataatgccggcagcggtgatgccgtccatacgcggcatcttgacatccatgcacaccacatcagggcggtacttgcgggtcagttccacggcttcctcgccgttggcggcctgaccaacgacctcataaccgttgtcttccagcatggcgaccagatccatgcggttcacggcttcgtcctcggccacgacaacggtacgcggaccgtcctcgggcttggccttgcgctcagcaggttcgctttcattggccacggccttgagctcttcgtcggtcagcacctcatcgatgttgatactcggttcttcggacttcttccttgcagccatgccaacctctttcttgaattacccaacaatggggttcacaataatttcagcgaactcctaactaaagtgccctcggtgggactcgaacccacactgcgcagattttgaggctgcttcctctaccaattgggatacgagggcgtgccaaagcactctgaagagagtagcataccaattcgactcttgcgacacaagacacgcgccaatcctccattccccccggtgaaacaggcgaaacacgtcgatatcgcggacggcgcacccgtgtgttgcccgttctcctgcgtggtttcaccgcttacaatgggctgtagtttcgatgtatcgcttttgttaggagggcttatgagcaacgaaacttaccgtcagttcgatccctggcgcccctctccggtcaaggagatttcccgtagacagattgtggagacgcattatttcaatgtcgatcacgtctcctatgagtcgaatcaaatcggttcgtttgaacgctactttgttcaggagaacaatggcgacactgtggctgtgctggccgtcaccgatgatggcatgattccgctggtcgagcagtatcgcatcgccaaccatcgttggacgttggagattccggccggtcacgccaacaacccgtccgaacgcccgaccgatgtagctaagcgcaagctggccgaagaggccggtttcgacgccaccaagcttacgcagttcacccgttttatgaacacgccgagctattccacccagcacaccgcaatcttcttcgccaccggtcttaccccggcttcccgtcaggaaatcggcccggagactccgcgttccgacgtgcgtatggtgtcggtggacgatgcctatgagatggtggtcaatggcacgattgtggatgccaagaccatggtcgccattttgcgcctgaagagcggcacgctcgatcatctcaacgactgatcgccacgctcgatcaccgcggtgactgtgggccattgcaatcaccacacaatcgcaacataacagataacgaaagcccccatccactttggatgggggctttcgtgtgctatatgctagctgtcagcagctaccagaagcctgaaatcagtcgcaagcgccaacggtgtgcacgtagatggagtcagtgcggcccggctggtgatcgccctgagcagagctcaggatgacgatcttgtcgccgtcagcaaccttgccagcatccttgaggaccttgtccgtgtagaccatgagatccttgcgggacttgtcgtggtagtcctccttgagcaggaaggcttcggtgccccaggacagagccagccagtggtaggtgtgctcgttgctggtcaggccgtagatcggggcggccggacgctcacgggagacgcggtgcacggtggcaccggtctgggtgtaagcaacgatggccttggcgttgagcttgtcggccaggtccacagcggcggaggagacagcgccggtggaggacatgtcaaggttcttgagctccgggatacggtcgaagccgtggtcggtggcgtagccggagatacgggccatggtggccacggtcacatccgggtacttaccaacggcggtctcgttggaggtcatggtggcgtcggagccgtcgaggatggcgttggcgcagtcggaagcctctgcacgagtcggaaccggggagttcaccatggagccgaggacttcggtagccacgatgaccggcttggcgtactggcgagccagctcgatgatgcgcttagtggccagcgggacctcttccagcgggcactcaacggccatgtcgccacgggcggccatgacgccgtcgaaggtcttgacgatctcttcgaggttctccagagcctgcggcttctcgatcttggcaatgatcgggatgcgacggccttcctcgtccatgatctcgtgggcgcggtcgatgtcggtggcgaaacgcacgaaggacatggcgatgatgtcggcaccggtgcggatggcccaacgcaggtcggcctcatccttctcggtcagagccggcagggagacggcgacgcccggcaggttgatgcccttgtgggaggacacaggaccggccacgacgaccttggtgtacacgttgttgccctcgaccttggtgacctcaagacggaccttgccgtcatcgatcaggatcgggtcgcccgggtggcaatcgcccggcaggcccttgaaggtggtggaggtgatgtgctcgtcgccctcgacgtcatcagtggtgatgacgaattcctggccgagctgcagctgaaccttgtcttcgccatcggcgttcttcttgaaccaaccgcagcgaatcttcgggccctgcaaatcaacgagcgcggcaacgttgcgaccagtggcttcgctggccttgcgcacgttgttgtagaccttgaggtgatcctcgggggtgccgtgggagcggttcagacgagcaacgtccataccagcttcaacgagcttcaggaggttgtcgtaatcctcggtggaaggaccgatggtgtctacgatcttggctttacgcatgaatgcctgcctattcttgttcaatttggttcgaggcgcgattgccccatttgccgaaacccagtctactagcgcgagccgactcatgacaagttttcttcacggtgtgttgtgagcgctcacattgttgtgttgactgggtttaagggttgtattctctaacgatttcaggccttttcagcgctttccatgctcttcatcttgatcacggaagccacggatgcgccgccaattgcgagcacaatcacagccagcgacagccatgtgggcacctccggcacccaatggacgccttcgccgccgttgatgaacggcaaagtattgccgtgcagggcctccatgatgagcttgacgccgatgaagcccagcaccacggacaggccggcaggcaggtagacgagcttgtcgagcagagcacccagcaggaagtacagctgctgcaggccgagcagtgcgaacacgttggaggtgaacaccaggaacggatccttggtcaggccgaagatcgcgggaatcgagtcgaaagcgaacatgacgtcggtggtgccgatggtcaggaacacgatgagcatcggggtccagtaacgcacgccgttcttggtggtgcgcagcttctcgccgtcgtagtcgtcggtaatcttgatgatcttgcgcagattacggatgatgccgttctcgtgatattcctcatcttcatcgccgccgagcaccagtttgacggcggtgtagatcaggaaggcaccgaacaggaagaacacccacgtgaagcgggagatcagggccgcgccgatcagaatgaaaatgccacggaaaatcaaagcaatggtgatgccgatggacagcacatacttctgaatctgcttgggcaccgcgaagttcgacatgataatgacgaacacgaataggttgtcgatggacaacgagtattcggtgagccagccggaatagaactcgatggcgggcttggagccggcgaagaaccagatgcatccgccgaagatcagcgccataaccacgaagaaggcgatatgctgcacgcattccttggtggagggcacatgcggtcgacgcccgatgacgaacaggtcgacgataaagaacaacgcgagcaccacgaaggtgatgatttcaaatgcgagtggggtttctgccatgattccctacactaacttatgtatgtgacggttttggggccgttccggtagcgctgatcgccaggcagtcaggggatgtgttgttcgacacgctccgggccgctcaggccaagtctttacggtcgacaacgcatcccctgactgcccgcctcgggtatgggaatttggttacttgttggcttccgtcatttgacggagttcttttttgaggtctcggatctcgtcgcgcagacgggccgcaagttcgaactggagttgttcggcggcggtgtgcatctgttcgctcagttggcgaatcaggtcggcgaggtcctgcgcgggcaggccggccttcaggatctcctcgtggcgtttgtctgcctcgttgggatcgagtaccggcacgcccaggtgcgtgttgccggccttgcccgcgttgcggtagccaccttcaagcaaggtctgggtgtccacatcctccttggcgagcatgtcgttgacgtcgctgatcttcttgatcaggggcttgggatcgatgccatgctcctggttgtaggcaatctgcttggcgcggcgacggtcagtctcgtcgatggcttgccgcatggcttcggtggtctcgtcggcgtacatgatcaccgtgccggacacgtttcgggccgcacggccgatggtctggatgagcgaacgataggagcgcaggaatccttccttgtcggcgtcaagaatcgccaccagcgatacttccggcaaatcgaggccctcacgcagcaggttgataccgacaatcacatcgatcttgccttcgcgcaacatgcgcagcagttcgacgcggcgcaacgtatccacatcagaatgcaggtattcgaccttgatgccgcgttccagcagatagtcggtcaagtcctcggccatcttcttggtcagagtggtgaccagcgcgcgctcgttcttggccacacgggccttgatctcggcgagcagatcgtcgatctgccccttgaccgggcgtacgtcgatcttcgggtccagcagaccggttgggcggataatctgttcgaccaccccatcggacagtcccatctcatagtcgcctggcgtggcggacaggtacacggtctggccgacgcgctgcaggaattccggccatttgagtggtcggttgtccatcgcggagggcaggcggaagccgtgttcgaccagcgtgcgcttgcgggaggcatcgccctcgtacatggcaccgatctgcggcacagtgacgtgtgattcgtcgatgaccagcaggaagtcgtcagggaagaagtcgagcagcgtgtgcggcggggtgccagcggcgcggccgtcaaagtggcgcgaatagttttcgacgcctgagcacacgccaacttgggtgagcatttccagatcgtaggtggtgcgcatgttgaggcgctgcgcttccagctccttgccttgtttgcgcagttctgccaggcgttcgtcgagttcctcgcgaatggttttgagcgcccgttccatgcgttcggggccggccacataatgggaggccgggaagatgtggacttcgttttcctcgtcgatctcgtcgccggtcagcgggtgcagcgtggagatgcggtcaatctcgtcgccgaagaattcgatgcgcacggccagttcctcgtagacggggatgatttcgaccgtatcgccgcgcacgcggaaggtgccgcgcgtgaaggcgatgtcgttgcgcttgtactgcatggccacgaattggcgcagcaggtcgtcgcggttgatttcctgcccgactttgaggaagagcatgcgaccggcgtattcttccggcgtgcccaagccgtagatgcaggagacggtggccacaaccacgcagtcgcggcgggtcagcaggtttgcggtggcttggtggcgcaggcgctccacatcgtcgttgatgttggagtccttttctatataggtgtcggtctgcgggatgtatgcctcgggctggtagtagtcgtagtagctcacgaagtagctcacggcgttgtccggcatgagttcgcggaattcggcgcatagctgcgcagcgagcgtcttgttgggctcgataatcagggtcggtcgctgcagcttttcgatcagccaggcggtggttgcggttttgccggtaccggtggcacccataagaaccacatcattctcgccgttttcgatgcgttcggccagttcggcgatggcctgcggctggtcgccggatggcttatatggcgatttgacgacgaaaggcttgtccgcgcgctcgatattgaatcccatagggcctcatcttagcgacctgcgcaccatcctgcgtatatctcacccacttgggccagcatctcgggcaatggatgggtggagtcgatgacgatatcggctatggcccgccgctcctcctcactggattggtggcggatgcgggcctcggcctgttccaggctcatgccgcgttcctcgaccatacggtcgagccgcatgcacacgggagcttcgaccgtgacgatatggtcaaaggcgaatggaatatcgtcaatgacctcggcgagcagtggaatgtcgtgaatgatgatggctgcctcggggtgctcatgctccagtcgcgccgcctcggcatagatcaatgggtgctcgatggcgtcgagccgttcacgtgcgcccggcgcggcgttcgcgccgaagacatgatcggcaatccatggccggttcatagtgccatcggcgagcaatgcatcaggaccgaactcggcgacgatctgtggcagcgccactcccccgggttcgacgatctgatgcgccagcgcatcgtagtcgatatgcaacgcgccgagttgcttgagttgcgccgccaccgtacttttgcccgcggcgatgccgccggtcagtcctattcgcatcatggtgcccatgatagctggcgctcccctcggccggctatcgccgacagctcccctcagggaggggagccggctcgcgtagcgagactgaggggagtcattggcggataactccaaaaacacaagaaacccggcccaatcggaccgggtttctttacacgctaagcgctagcttcgcggcaaactcacttgccgagcagctggtcgcgcagggcggcgagctgatcggagtcggcgagggtaccggtagccggagcagcggaagagtagttggaggtctcctcgaccggcttctcttccttcgggccctggccgtcggcggctgcggattcggcagcgttctccagctccttggccacgaactccttgtgctcctcccacagctcgtgagcggcggcgtactgagactcccactcctcgcgctgcttctcgtaaccagcgatccactcgttggtgttcgggtcgaagccttcggggtacttgtagttgccctgctcgtcgtactcggccggcatgccgtagatggccggatcgaagtcctcggaagccgggtcaacggagtcgttggcctgcttgagggacagggagatgcggcgacgatcgaggtcgacgtcgatcaccttgacgaacacggtctcgcccggcttgaccacggtctccgggttctcgacgtgacggttggcgagctcggagatgtgcaccaggccctcgatgccgtcctcgacggagatgaagacaccgaactggacgatcttggtgaccttgcccttgacgatctggccgggaacgtgggtgcgagcgaagcgctgccacggatcctcctgagtcgccttcagggacagggagatacgctcacggtcgagatcgacgtcgagcacctcgacggtgaccttgtcgccgaccttgacgacctcagacgggtggtcgatgtgcttccaggacagctcggaaacgtggatcaggccgtcaacaccgccgagatcgacgaaagcgccgaagttaacgatggaggacaccacgccctcacggatctggcccttcttgagctgggacaggaaggtctcgcggacctcggactgggtctcctcgaggtactggcgacgggacaggaccacgttgttgcggttcttgtcgagctcaaggatcttggccttgatcttctggccgatgtacggggagaggtcgcggacgcgacgcatctcaacgagggaggcaggcaggaagccacgcagaccgatgtcgacgatgaggccgcccttgacggcttcgatgacggtgccctcaacgacgccgtcagcttccttgatcttctcgatgtcgccccaggcgcgctcgtactgggcacgcttcttggacagaatcagacggccttccttgtcttccttggtgacgacaagggcctcgatggtgtcgccgacctcgacgacttcgtcaggatcaacgtccttcttgatggaaagctcgcgggaggggatgacaccctcggtcttgtagccgatgtccaggaggacttcgtcgtgatcgatcttgacgacggtgccctcaaccagatcaccatcatcgaagttcttgatggtggaatcgactgccttgatgaagtcctcttcggtgccgatgtcgttgatggcaaccttggtgacttcagtgttgttctctgccatgtaaatatatggtttctaatagtggatggataatttctcgatattcagttatacgcacaccctacaggcatacagatactcacaatacaagcaactctgcccaaatttcctaggaaactctaggcgtgtcgttcggccatttccacgacgttggctaggagcatggctcgggtcatggggcccacgcctccggggttgggggtgtaggcggaggccttgtcgtagcaggccttgtccacgtcgcccttgatgcggtagcgaccggcttcttcgtcgtagacgcggctgacgcccacgtcgaccagcacggcgccgtccttgattttgtcgggcgtcacgaatccggccgaacccattgcggcaacgatcacgtcggcgcggcgcatgtggtcggccacatcccgggtaccggtgtggcacagggtgacggtggcgttgacggcgttgcgcgtgagcattaggccaatcgtgcggccaatggtgatgccgcggccaagcacgcacacttccttgccgttcagatcaatgtcataggcgtcgagtagctcgagcacaccgcgcggagtgcaaggcagcggcgtcgaaatgtcgccgcgcacatgcagcaccagttcgccgaggttgtacgggtgcatgccgtcggcatccttggccgggtcgatcatgtcgatgatcgcgttctcgttgatgcccttgggcaacggcagctggacgatgaacccggtgcaagccggatcttcgttgagttcgcgtacggcagcggcgatgtcgtcgaagctggcgtccgccggcagttccttcttgactgaggtaatgcccacttcctggcaatcggcgtgcttgccggccacgtacttcatcgacccggggtcctcgcccaccagcagcgtgcccagccccggttggatgccctgcgccttgagcttgttcactcgctcggcaaggttggtcttgatttcggccgcaatctgcttaccgtcgatttttgtggacatcaacgccctcccctgtagtttcggtgcattctatcgaaacgataggctatcgttggaacaagtcaggattatatatcgttcgctctcacgaagaaggcgtgccatggggactcaaatcacacgacttacgcgactcgccgcagccggcctgagcgccgtcctgttgttcgcgaccaccgcatgcgcagccacctcccccgctgaaaccgagccggacaacaagaccagcgttcccgcaccgaccgggccgatcaatgtggtggcctccctcaatcaatggggctcgctggccgccgagctgggcggcgatgatgtggaagtcacgtccatcgtgaactccaccaatgtggatgcccacgatttcgagccaaagacctcggatgtcgccaagctgtccaaggcccaaatcatcgtggccaacggtgcgggctacgattcctgggccaccaaatcgatgaccaagaccacgaatatcgtatccgccgcttccgtcatgggtgccgtcgagggcgataacccgcatctgtggttctccaaagacgctcgatccagcatggccacggccatcaccgatgcatatataaaggcactccccagcaagaagaaagccttccagaagcggctcaaggcatggcaggcggacgagaaatcgttggaaacatgggcgtccgagttcaccaagtcccactccaacctcacctatgcagccaccgaacccgtggtctattatctgatggccgatcttgggttcaaagatcagacgcccaaggggtatacgcaatcgaccgcttccggcggcgaaccggcacccgcggacctgcagtctttccagaaactcatcgaagacaagggcgtggatgtgctggtcaacaacacgcaggaagccagtgacgcgaccaatatgatcactggcgctgccggtcgcgccgatgtgccggtagtcgacgtctccgaacaaatgcccaaggacgccgacacgctgaacgcctggatcaaccagctcatcaacaccatcatcgacgcggtggatccaagctatggctgcgaagacgccacggacggcgataccgcggacagcaacgcgaattccgatgattccagcgccgaaggctccgccacggatgatgccaatgcgcaagactccaaggccagcaccggttccagcacggaccccaagtacatccgtcagtgcaaggcggccgcatccagtgactcatctcaggattcggcaaaggccgatgccgccaatggcgatcccggcgatgcctccggcaacgaccagaccgactccggcaaatagttaggagcaaaggacaccggcatcggattcgcgccaatgccaatagacgccttgcatgagaagggttgtgcgaccattgtcgagatggccgcacaacccttctctttggttatcaccatccgtacacgatattgagaacgattgtcagcatcgtttgccacaatcgggcgttatgagtgaaacttccgattgcatcgtgttcagcgatgccgccatcaagcgtggcgaccatatcatctggcagcatggcaccttcgccattcccaccggttcggtcacggccatcgtcggcaccaacggcaccggcaaaaccacgatgatgagggccgagctgggccttttgccgctctgccatggcagcctgaccgtgctgggcaagcccgcaggcgagatgaacaaacgcatcggatatgtgccgcagagctatgtggcgaatgtcgattccaatctcaccgccgaacaatccgtgttgctgggcctgaccggcacccgattcggcatccaccccatcaccaaggcccagaaagccaaagcgctcgaggcgatggagttcaccggcatcgccgacaaggcgcggtaccgtctgtccgaactgtccggcggtttgcgccagcgtgtggccatcgcccaggcgttggtgtgcgacccacaactgctgatgcttgacgagccgttggccaacctcgatctggccagtcagcgcgccaccgtacacgtgctggccaagctgaaccgcgaactgaacatgaccatccaggtggttgcgcacgatctcaatatgctcttgccgattctgaccggtgccgtctacttgctcgacggtcacccgcactacgccgatatgcacaaagtgctcgactccgacctactcacccacctctacggcacacaggtgcaggtggtcaccactccgcagggagacatgttcgtgaccccgacgccggatgagctccaggaccagccgcaggatatgcacacggcagccgaagtggcgcaattgcaccatcacgagcacggcaatgccaccaatggcagtgccgccatcagcgccgagaatcgataacatcaagcgagccgacccacagcccatcaacggactgcagctcaggcatggagaaaatacagagacatgagcaccatcaacttttcgtatgatcccgaatggctggatacactgtccgctccattcatgaccaacgccttcatcgccggcctgtgcattgccctagccgccggtgtcatgggatacttcaccatcgcccgtcgttccaccttcgcggcccatgcgctggcccatatcggtctgccgggcgcgaccggcgcggtgttgctcggcctgcccgtgtcactgggcatgggcgtgttcgcactgggcggcgcactggtgatcggtgctttgggcaagcgcgtttccgagcgtgaaatcgccaccggcaccgtgctggccttcgccaccggcttgggtctgttcttcgcgcgattgtcgagttccgcctcccagcagatgcagtcgatcctcttcggctcgatcctgaccatcaccaccggccagatcatcggcttcgccgtgttcgacgtactgctgctggcattgttggccatcatctaccgcccgctgctgttcagctcgctggatgagcaggtggcacaggccaagggtgtgccgatcgggctgatgaacgtggcgtttatggcgattatggccggtgtgatcaccatcgccgtgccggcagtgggcaccttgctgattttcgcactggtgattacgcccgcggccaccgccaatattctggccggctccccattcaaggcaatggtgatcgccagcgtgctgtgcttggtgtcgatttgggccggactcgtgctgtcggcgatgttccccgctcccccgagcttcatcatcgtgacgctttccaccctgttctgggctatcgccaaagccgtggagacgatgcggaagtaatctcatccattttttcttgcccccgctggcgaattcatagcgggggctttgttatatcttctccaccaaggcattggcgatggcggcgatgccttcgccgcggccagtgaatcccatatggtcggtggtggtggcagtaaccgataccgggcaaccaaccgccgcagacagggcggcttcggcttcagcacggcgtgtgccgattttcgggcggttgccgatgatcgccaccgaggccgatgccggcgtatacccgttggatgccagatgcgccacaacttcttgcaacatatcgatgccatgcattccggcaccatgcgcgtccgcaccgacaccgaacagtgaaccaatgtctcccaagcgggcggcggcaagcaacgcgtcaatcagagcgtgcgcggccacatcgccatcggaatcgccttcgatcccctcgtatttggcggcatcggcctcgctgcatgaatcagacgccggccagtagagcccggcaatccacagttcacggcctgagccggcaggcgcaaaacggtgagcgtcaaaaccctgccctatcaacactcctgcagaccccatgcagtccccttcgatggcgctgcccagacgaacggcagcaaacgattatgaatcacgaagccccggcgtatcgcataaggacacgaccggggcctcaacaatcaaatcacttcttcttggacttcttctcggcttcgacacgagccaaagtatcggccgcggcctcttcgggctcggcggtgtgatgcttgtcgtcaccgggttgagcgggctcgtagcccaggttcacgtcgagcagacgctgggcttccgcctcgtcgatcttctcggacaaggcgatctcagaagtcagaatggcgcgggccttggtgagcatacgcttctcccccgcggacaggccgtgctcgtcgacatcgcgctgggcgagatcgcgaaccacttcggcgatcttgttgacatcgccggtggcgatcttttcgacgttcagcttgtaacggcgagaccagttcatctctttctcgatgatcggggtccgcaggatgccgaataccttggccacttcggatgcggagacgatgtcacgcacgccgaccttcttggcattgtccacgggaacgttgatgaccaaaccatcggaagagagtacggacaactgcagatattcgcgcgtcactcccttgaccgtccgctcggtaatggcctccaccttcgctgcaccatgacgcggatagacgaccatatcgccgactttgtaagacatgtaccctccgagaactgacggcttacacacaaaaactcgaataattatgccatgcggcctggaccgcccctatgagagcgctcacaaccacgaagacacaccgaaaagggcaagaattcgccattttcgacgcgccaatgtagcgtttacgactccaacgcacgtagactttgggtcatggctgaagaaacgaagatcaaggaagataccgtcaccgtgcctgtcgcccaaggcgacctcgatgcggtgagcaatgctgaattctacaatccccacggagttctcggcgggcatctcggcatcggcaagcatgccgacaccgccacaatccgcgtgctgcgtccgcttgccaagtccgtgaccatcctcacccaggatggcgaatacccgatgacccacgaatacaacggcgtgttcgtggttaccgtgccggcttccggcactaagaagcagcccacgattcccgactaccgtgtcaggaccgagtgggaaagcggcgcagtgctcattgaggacgacccatatcgctatatgcccacagtcggcgacatggacacctatctgttcggcgagggccgtcacgagaagctctgggagacgcttggcgcgcatgtgctgcgctatgacgatccgatgggcggcgcagacggcacgcccggcgaacaggtggtaggcaccgcattctccgtgtgggccccgaacgcccatgccgtgcgcgtagtcggtaacttcaacgcttgggatggccgccgtcatgccatgcgcgagctcggctcctccggcgtgtgggagatcttcatccccggaatcggcgcgggcgagacctacaagttccagatcctgaacgccaattacacgtgggagatgaaggctgacccgatggagcgtcagcacgaagttccgccgaacaccgcctccatcgtcaccgaatccacctacaagtggaacgatgacgcctggatgcagcaccgccgcaccaccaacccgcatgatggcccggtctccatctatgaggtgcacgccggcagctggaggcagggactgacctaccgcgacctggccaagcagctcgtggactacgtcaagcaggaaggcttcacccacgtggagttcatgccactggcccagcacccgttctccggctcctggggctatcaggtcaccggctactatgcggtcgactcccgtctcggttcccccgacgacttccgttacctggtcgaccagttccatcaggccggcatcggcgtgatcatggactgggtgcccgcccacttcccgaaggatgccttcgcgctcggccgcttcgacggcaccccgctgtacgaggacccggacccgctgcgcggcgaacaccctgaatggggcacctatgtgttcaacttcggacgccgcgaagtacgcaacttcctggtggccaacgccctgttctggcttgaggacctgcacgtcgatgcactgcgcgtggatgccgtcagctccatgctctacctcgactacagccgcgaacccggccattggcgcccgaacatctacggcggacgcgagaacctggaggccatcgacttcctcaaggaggccaccgccaccgcgtacaagaacaaccccggcgtcatggtgatcgccgaggagtccaccgcatggccgggcatcaccgcccccacttccgccggcggcatcggcttcggcatgaagtggaacatgggctggatgcacgacaccctcgagtatctgcacgaggagcccatcaaccgcaagtggcaccacaacgagatcaccttctccatggtgtacgcctactccgaacactacgtattgcccatcagccacgacgaagtcgtgtacggcaagggttccctgtacggcaagatgccgggcgatgactggcagaagctggccggcgtgcgttcgatgttcgcctatcagtgggctcacccaggcaagaagctctccttcatgggcaacgagctggcccagtggggcgagtgggatcacgacgcctccatcgattgggattgcctgaactggcaggagcaccgtcaggtccagaccatggtcgccgaccttaacgccttctacaaggcgcatccggcactatggagccaggacttcgacccggccggcttccagtggctgaccagcgacgatgccgaccacaacacgctgagcttcctgcgcatcggtaccaagggcgagaccttggctgtggtggtcaacttctccggtgaggcctggtccgattaccaggtggcgctgcccaccggcggcaagtggaccgaagtgttcaccaccgatgacgccaagtacggcggctccgacatccacaacggcaccttcgaagcggtcgagggcgaatatcattcacgtccgttctcggcgaagatcaccgttccggctctgggagttgtattcttgaagccggaagactgaactggtcaacaggctgaaaggtaaccggtttatttatgctcaataccacagcgcgtcagaatacgacaccgcgcacggtgctggtggtcgaggacgagcccacgctcgccacggccatcgcccagcgcatcaccgctgaaggatggaccgctcgcgtggccggggacggcgcttccgccgtccaggccgcgtcccagctacgccccgatctggtgatcatggacatcatgctgccggttatggatggtctagaggccaccaaacgcatcgtcgccgaacgtccggtgccggtgctgatcctcaccgcacgtgatgacgaggccgacaaggtcatcggtctgggagcgggtgccgatgattacatgaccaagccgttctccatgcgcgagcttatcgcccgctgcaaggcgctgctgcgccgcgtggagcgtgcgaaggtcatcgccaagaactcggagaacgagaagctgctcgacttcggttcgatggtcatcgacccggcccagcgcatcgtcaccgtgaacggcgaacaggtgcatctgacccccaccgagttcgatctgctggccacgctggcccgccgcccgaagtcggtgctcacccgcgaaaagctgctcgaagaggtctgggactgggtcgacgcatccggcacccgcaccgtcgacagccacgtcaaggcgctgcgccataagctcggtgccgataccatccgcaccgtgcatggcgtgggctacgctttcgagccgccgaccgcgtgatggcatccaaaaaacaacagcaatcccggcttgatgcgatgaaacctcgcgtcaagccggttgatttgttctcatctctgaagctggaactcagcgcactgatcgttatcgccactgccatcgcgtttgccatgtgctggttcctcctgaaattcggctggtccggttggatcgccatgccgctgactttggtggtggccttgggcatcacctatttcttctctcgcggcatcaccgctcccctacgccagatgcgcgatgtggccgaagccatggcggatggcgattacacggtccgcgtggatatcgatcaggatcgtcatgacgaggtcggcaagctggctcgctcgttcaacgagatggccggcgaactcgagcatgccgataaaatgcgccgcgacatgatcgccaatgtgagccatgagctgcgcacgcccgtttccgctttgcaggcgatggtcgagaacatggccgacggcgtcaccgagcccactcccaccaatctggagagcatcctcacccaaacgcagcgtctctccgatctcatcgccttcctactggacctgagccgtatggaggccggtgcggcgagtctgaatatcgaaaagttcaacttcgccgactttcttgacgagaccatcgagccgttggaaatcgccgatggtggccacgcccacgacatccgcgtcaccgtgccggccgacatcacgatggaaggcgatcaggaccgcctgcgccagctattcaccaacatcatcgccaacgcgctgaaacattcggccgacggcaccaccgtgctggtcgacgcccacgaggacgaaaaccaaggcaccatcgtgaccaatgtggtgaatttcggctcccagattgcgccttccgaccgtttggacatcttccggcgctttgtcaaaggcaagacgggtcccggcaccgagtcgggcggcaccggtcttggcctgtccatcgcgcgctgggcggcccaattgcacggtggcaccgtcaaagtggtcgacgacacgcgaggtgccgatttcgaaatcatcctgcctaaatatcacatcgccgaacgctgatattgtccgacgtcctaccgtatactgtattcgaacagatgttcgaatacagggtgggaggcgcagcatgacacagcaatccgagtcacaggccatggcgcacgaggccacgctgtttgttatgcagatggccggcgattccatgatcaatgcgggtattcacaacggcgatctgctgattgtcgatcgttcgttggcaccagtccccggagatgtggttgcggctgtcatggacgacgaaatcgccatcaagcggctggtttcacgggccggcatcaccatattgcacgccgagaatccgcgataccccgattacatgccgagcaacggcgcttcgcctgctatctggggcatcgtcaccgatgtcattcacccgttgatatcgtcatcggaccgtcgcaccacggcatccgccaataccagcacgcccaccaccttggtgccggcctgctgaaacgcctgaacgcattgccgcacagtggcacctgtggtgacgatatcatcaacgagaagcaccgcgtcgccattgccgatgagatcacgcttcaccctgacatgaccggtgatacgacgggcacgctgtgccgaagagacctgctgcacggagcgtgccttggtggaggagctcagggcattgcatggtcgcgcatcgacgccgtacccacgcaatgcccctgccaccgatttggccaacggtgccgtatgggcacgtcctcttcggcgcattgacgcccgcgatgatggcaccggaaccaccaatacgcgatgacccaagcatgatgatggtattggcgtcttgttcagcagcgacaccatgatgcggccgaacgggccgtcaagctcggtatcgtcgtggtccttccagtcgagaatggcacgacgtaccgctccctgataaatcgatgcggaccatatacgggctccgccaccactgtctgcatcccgttcccggcattgcgcaaacagggcccagcatgccgcacacaatacctcatccggcgcgtcacacccagcgcagccgcgtggaaacagcagattgcagacctgtgcccacatcgcatgccaccacttgtatacgctcggcccgtccataacgcgtcactatcgagctggagtatcgaatcgcgcaagcagtgcatccagcagttgtaccgtatcttgcggattctcaacacgaacaccgatcgcaccggcctcaaccgcgggatagtcattacccgtaggcgtcatgcgatcacccacgaacaccatttcatcggcccgtatgccaagtgtctgcgtcagcttgcgcacggcataggccttatcgatgccgcattcgctgacatccacactggtgtatccgccggccctggcccgcatatgcggcagatcggccttgaccgcttcgaccagcgcctgtttcttcgtgttatcgcgatcccatgcctgcttggccgctacgggcgcgaactgcccaagagcggagaaggtgatctggctgcccctgttctcgattcgaggcccccatacctgctgttcccacaatcccagttcccgggcatgtcgctcaagactttccgagacagcggccacggtggcttcggacagatcatgcgcatacaccaaggcccattgcgtgccatcccaccggtaataccgggagccggaggtaggcatgacatgcagattgccgcgcctggcattcggggtgagtacatccagcacctgcgaggtgaccaccgccatgccgccccctgagatcagggccaccaccgtatggtcgagcaacgcacagaaccgttcgatcatcgcgggcttcatcggctgttttgagctggccagtgtgttgtccaaatcgaaaccgaacaccttggcgttggagcagacattatcgaaatcaagttcggaccacgaacgtaccaccatttgtcgtgcctccctcgttgacgaatgttcacagccaatgaaccaatcctaacgcatgttgcctccgccatgccctatggtgggaaccatgcttcagccaccttggaacgcacgaatctaccgcaaccgccacggtcgcggcacacgaaccccgatgttcggcacccgtctgccccgttaccgcactcgcaccggcatgttcgacgatatggtggcggcccaggttcgcaggctcggccaagcgtggccggaactgatacgtccgctccagttcgcggtggaggatgtgccgccttcggatccgacgccttggcagaccgagccgaatatgacgtcccagtgcttccccgccagccacggcattcccgcacgagtcgtgctctaccgcatgccgttgcagaccgaggcacctaccaagctcgaactgcaattggccgtcagggatgagctggtggcccgcatagcggaattgtatgggcgcaggcccgaggaaatcgaccccgactggggcctgtgacaacactgcgggccgtgtcacttgtaataaggtagtggcacggcccgcagctatatcgccgccgaaacatcatcagactgacgcttcggcgagcatacccttctacttgacgatggaggaatcgttccgagcccagacatgaaccgtggcgggcatcagcgttgaagcgtcgatgacggacaatccggcgatgtccttgtcttgcaacgaatcgtgactgaaccgcgctccccagctcactttcttggatgagtcctccaacatcagcacgaccgcggtgccatgatcgccggaaagattgccggcttcaatcgtttgtgctgcgttcgcatccagtgtgatttccttggaggttaccgaagcaccggcatcatcgtaggcgcgcaaggtgaccgtcctgcgcgcattggacgtattggccagcgtgatggaggcctttactccgtcgggaagggccaaccccgagaattcggatggctcgccggcattgaccaatgcgaaatcggcttggccggagtcaccggagcgtgtggccttgacggagaacgacacggcgtcctctgcggtggacatcacgcccaacgccccatcaggagcttctcccaagtcgatcgccgtcactttatcagcagtgacggtggcatctttggcgggaaccaagcctttggcggtaatccatgacagcccggtgctggtgtctgccttggcgaacagataagcggtgaccgcatcgccggcagtgatggacggcgccaccgatgcattggatgcggtcggcagcggcagcgcgaaatcagaacccttcggtgtcagaccatccatggtcaccgtgcgcaccacggacgcgataggagtctccttgctggaaacggtcacgaacagaccatgctgcccatcgaccgcggcggacagttccatcgaggactccccctcggctggcacagacagcgtggattgggtggacaatgccattttcccggctgtctcggaaccccagacggcaatgtcgacggtggtcggcttggtggagagattcgagacgatgagctgctgtgtggtaccggtcgtgctgtcggagagcaggaacgactggctgagcgaggtcgatacgcaggatgccgccgatatgcctctcacatcgccatcatcggcccatgatgcgatggtgccgacggtgccggtgccagctgcggcctgcagcatacgggtattgatcagacgagctccctgattgatcttctgagcaccggttttcaccgaggaatcgtcggtcgaatcggcgtctttcaaagttacgtcatctgaactggacttttgcccgatcgccgagacagtggcgctgtagacggagccgaacgccgcatagcgcgcttgtgtgctcagattgccgacagtggcctggaaggcgctgtcgccgtacgtgccggtatcggccaatcctataggtgccgggcagtaggtttcggactgggtcggactaacggtctggtcgatggcattatcggaagcggccaccttatccacccagatattggggatgggggccatgacgagaacgacgaacagcgcaatcaacaccagcatggtgatcacaccgagcacgatgccgatcgcacgtttgaaaccagaagttttgttgctcatgcctgctcctccaatccgtaggacggtcgtctgcgaggcatggcgaccaagcagtacaacgccgtgatcacacctaggcatatcagccaggcgtgcctccagacactatgctgtgcacgttgctgccatgaggtatccacctgctgtgaggcgctgctacgcagcgtcagacgatagtagctgccgctatccgtggagaccagggactgggtgccgttcgatgcggcgatattcgcgctcaactgttcatacggcatgtcgttcaaggaatcgccggtctcgggaaccacgtagatgccgccgaatccaagcgcgctgatggccgcgatggcctcttcgtcgggattggacagcagcgaggcacaggcctgggccagttgttcgtcaaccgcatcatgcttgccggacagcaggcgcgcccgctggaccggagagctgtcgatcaaatcgccgcgcgaggtgcgcatcaccgcatagttgacaatgttgcgggtctccgcgctcacggcaagcacacgatgatcggcaccggcctccagataatcggtggtgaccatgggcaggccgttttcagacacgcccagtcccgcatccttatgacgttcgatgccatacatgcattggatgccaatgcagcacaccagtatcagagcaagcaccacacggccagacacgatgagcacatgcagacggtcctttttcgatgcgggatcactgccagacgcatgcaacggttggaatcgcttcaccgccccaccagcgacgagacacacgcaggcgaggaagcccaatatcatcatcgcgatgcccggctgcgcggaaccggccacgacaccatcggcatccacggttatggccacacggctggagaccagggcgagcgcgcctccgcagacgattaccacccacatcagtcgcgaggtccgcaacgcgaacggcagcaccagcgaagcaagagcaagcagcgtgatgacgccaaacagcacagtgaccgccaaatcggcataatcagtcgaccccattcgccatcccagcgcacgctgtgcggcctcaagcagactcagcgacgccggcgacccgttggcggatgacgttggcaccgtgatgtcgccgaacagttgacgccacatgcccaaatcggcgtaacgcaccgcattgacgagcgtaggagccaccgcaaaggcggcaggaaccggaattagcaacagcatggcgcgcttgcgacgcacgaatagcaggaacatcaggaacacgacgatcagcgcgaacagcagctgcggttcagcggccaccacagggatgaagcacagtgcggcgatggccgcggcctgaacggatgtgcgcggcttgagcgggtcttcggtatggtacatgcccacggcacggaacacgaatgcgaacgcggccggcaggaacaccattacggtaagcatcggcatattggcctgcgcataccagccgaacataatgccggtggatgcccacagcagtcctcccagcacacgaaccacgtccgagcgggtgaatacgcccgccagcgcccagaacgacaatgcgctcagcggcgcggccacaaacagtatcatcgccaaagcggcggtcacatggccgagcgtgaccaacgaggccagcatcagcaccagcagccacggcgtgggcggcgcaggaatgccggtgccgctgccaaacacccacggcgtggtggcggactgcaccagttgcgtgaagctggcaccggtgggaagcaacacatcggaatacaacgatccgccggagaatatcgaacggaacaccggccaatacatcaccgcgatggccgcaaagcacaccagcgccatcaccacggccgcactccagcgatatatggtgcgtgtccgcagatgggcacgttccagcggactgagcagcactctgccctgctgggattggaatgcatcccgacgatcatggaactgcttgatctgctggctgtctgcgaacaagacatgcagggacgatgcggcgaccttcgattgtctggccaccagactgcgtgatttcatgtttcccgcgatatcggccaaggccagccatggcaggcacaattgcacccatgcttcatacggcttcttgccgaacatcatggatatggccatgccaaaactgcggagcagcctccacagccagacgataaaccaggacgacatggccaggtccgtgtacagataccgctgttgggagcgatgcaccgtcatcgcatgattgaccgtgtgatcgtccttaagcggttccccgcctcgcgtacgaatgccctcataccgtgcgcgacgatgtgatatctccgcttgcgggacaaccaccacgcgtccgccgctcaggcagacacggcggcagaaatcaaccgattcgctgtaggtggtcagccaggcattgatgccccgcagtcgcgtgaattgcgacatggacaccagcgcgcctgccagcgacaccgcaaacacatcctgccgcccgtcatactgctcctgatcgggttctccatcgaccaccagggaatgcacggcgtggtgacccgcatacataccgacatcatgcagatgggagccttcccaatcgcactgtttgcacccgagcacactggcgcccggcgtattgcgccacgcctcaagcaatcgttcaaggcatgagtcatccgaagggcgggaatcatcatggagcagccacaatgcgcggggagcgtcatccagatcggcacgatccaatgcccggctgaccgcatcgccgaaggagcgtgcgcccttggccgagacgatgtgaatggtcacatgcttggactgcggcacctccatcaccggccccgatggcgaggggatgacctcgaacgaggtggttatcctcgaactggtgcgcccggtcgcgtcggcgatgatgacgacccccggaagaacattctgcgtcaataccgaacgcaatgtagaccggaggaaacgcatatcctcctcaacggtgatcacagccgtaatgccggtatccacatcctgcctatgcgtatatggtcgagaagacatggcgtcggccaacgcctcatgaatatcgctattacctgtcggactcataaactcccagtgtacgcaccagacttgaagggggtgtgtggagctacgcccgctcccggtgctctcgcttatatcgacggcgttcgcgctcgctcatgccaccccaaataccgaatcgctcatcatggtcgatggcccatttcaggcattgctcacgcacttcgcattttgcgcacacacgtttggcatcacgggtcgagccccccttttccgggaagaacgcctccggatcggtttgcgcgcacaacgccttgtgctgccaagatacatcgccatcaggtcggaatagtccccacaattcgtgccatggctcttcggctgaatcgtcgaccacaccccacatgcgattctccttgcctattgagcttttcatacggactaaattacacacatgcaatttcggttttgtcaaattctttctcgtgtcattacatcatttttatggaactgtgtgctatggcgtgaacgcgatgccctgacgccgttgcacatgatattgtgccgttcctgcgcaggaacaccatagcgcaggaacacccggcggatgctgtgtcaaagtgtcattcagacaatcgacagtttcaggaggggttatgacgcaggaatcaggtggggcggatccgcatatcaacccgccaagcttcattcctgcgggaaatcgacgcacccggccttccgggcaggtgccacgctccttcgcccccgcccgaacctcgcgccagtcaggtcaagctccatcggcccgtccgtccgtcacgggaaatgacatcgaagagcctcaactgaacgccaacgccacggcaagcgccaacgtcgcggacaacggcaggcggactccgcccagtttttctccgaaaaccggacgcgccactcgcagcacggctccggatgccgccgcaccgcgcagcattccgccgtcgcgagcgcggatgtcttccggctcatcccgcaacgccgtgcgcaatccgtcggatatgccggtttcccggccctcatcgccagcagcaaacgtgtccacgaagttcagccatcttggccggccggcggcggcaacggcgaaaacggtaacggcacgccgtccgcgagccttacgcatcaccctatgcgcaatcgcggtactggtggcggcgttgattctttccgttttcggtgcctggcaatgggtggacagcaaactgaatcggagcgactggctgaccgacacccccaacacgccggcctcgacttggctgattcttggctccgatgagcgtgacggttccaccgattacggcggcgtagacaatatctctggcttcaggaccgatacgattctggtgctgatcaagcccaaaagcgggccgagttcgttggtttccattccccgcgattcgctcatgaacgtcgataaccagtacatgaaaatcaatgcggtggcgctgattgcgggcaagaaggctttggtaagcaacgtcgagcagatcaccggccagaaaatcgatcatgtggcacagatcaagttcggcggtctgcagaacgtggtgaacgccttgggcggtatcgaactgtgctatgacgaggatgttcaggattcctattccggactgaactggaaggcgggatgccatacggcggatggttccaccgcattgtccttctctcgtatgcgatatgccgacgcgcgaggagacttcggacgcaacgaacgccagcgacaggtcatctcggccatcgtcaagaaggcttccagcagtgagaccctgaccaatccgtccaaaatcgtggcagtgtccaatgccgcgatgagcgcactcaccgtggacgagaagaccaacccttacacgttgctcaccatggcgttggcgttcaaaagcgccaccggctcgaatggcatctccggcagcgtgtactggtccgaccccgattattacgttgatggcgttggttcctcggtgctgcttgacgacgccaagaacaccgaactgttcaatcaacttgccgacggcacgtataaggccggcaccgtgggcaatctggcggaaggctgaccgacgctttcccggagcccatcggcttcatcatcggcgcatgatcgtcaccgttgcctacaccgccaatcatgcacgggcaaaatgtcatgtggataactcggcaagctagaaccacataccttgattcggcttgcgctttcggcatgcgttcccccacgctggaagcatgacatcacagcagaacgattcgaagcgacattccgtccatacggcatccgccgtatcccgggcgaagcaccgtttgggcgcgccgccattgcgcgcccgcctgaccatgtttgccgcggcatgcccgatgatcgcgcaggcattgatgatggtcatactgctgttgcacgggcaatggctgttcgccgccatgatcgcaccgggcatattcgcctgtctcgtgtccctgctgctgacgctcccctcgcctccaggcccggagaaggctcccgatccgcaacaggcaacgatcgatgtcggtatcacgggcgacgccgatgaccgcgccgcagacctccgtcatgcgccgtcgcagccgatagaatcgctgctgcacttcgcacgcctgccatggcgcgccattgtgggccgctggcttgaaccccttgaccttgcggtgccgatcggcatgaccggaagcgagccgctgatgctcgatctgaaccgtcaggggccgcatgctctggtggccggcaccactggttccggaaaatccgtgttgctgcaaagctggtgtctggcgctcgcctcgatgaacgggcctgagcatctgaatttcgtgttcttggatttcaaaggcggttccgcgttccgcaaactcgaacggttgccgcataccgtgggcagcgtatgcgatctggatctggcgcatgccgtacgcgcgttgcgtgcgctggaagccgaactgacacgccgtgaacagctgtccgccgctgtccatgcttccgatatccgcgatatggtcaatccaccaccgcgcctgatcgtggtcattgacgaattccatgccctgaaggaccagctcccggattatgtgaatcgtctggtgcgtattgcctcgctcggcaggtcactgggcatgtatctgatcgcctgtacgcagaatcccatgggtcaggtcagtgccgatatgaaggcgaatatgtccgtcagcatttgtttacgggttcgggaccgtctgcaatcatgcgagctgcttggcgatggtcgtgccgccgacctcagtccggcaatgcccggtgcggcgttctgcaacgattccgaacaggtgacggcattccgctgtgcaacggcacgcgatatcgatgcggtgtgccgccagatcgcgttcgcatcgcggttcgtcggaagcccgccgcaaccgtccctgtttaccgcgccactcccccggcacgtaaaagaccggactgtggccgaccacgcaccgcaacgcattcgatttggacttgccgacgatggcatcaacctgcgagaggcgacggtatccctcaccggtggcaatatcggtgtcatcggcccgcaggggcgcggcaaaaccacgttgctgaaaacattggctcgacacgccagcatggctgatggcttggcggtacgtgtcagttccccgcatcgtcgggtatggagctcgcaatggcttcatggcggccgctgcacgccgtatgccagctcggatgcaccaccgcctccgcatatcgtgtggttcgtcgacgacgccgatgagttgttcgacccattccgcaccgacgagcaggcgctgtctttcacacatgcgttggccgatgagtccgtcagcgtggtattcgccgtcagcacgattcgcccgatacgtataccggagcattgcaataccagaatcgtgttcccgtgcggggagagaacgtccgatcttatggccggagtccccgctcgcctattggatatgatgagtcatatcgatgccgacaacgcgggccgggccgtgctcatcgagggcacatcggcatgtctggtgcagtgcgcttcgtgaaaacttcggttttttctcggcaaaacctcttgaaaatcaccacggttcgtggttaccttggtactggacttaaggaacaacaccagccacggggcttttaagggaggcaagcaatgagcagcgcttttgattggcgagccaaggccgcatgtcgtgacaaggatccggaactcttcttcccggtgggcaacaccggtgcagcctatcagcagattgaggaggccaaggccgtgtgccgcacctgcaaagtgattgacgcatgcctgaagtgcgcactggacaccaatcaggattacggcgtgtggggcggcttgagcgaagatgagcgtcgtgcgctgaagcgccgcgccatgcgcgcccgccgttctcaggccatgcagatgcaaatctgatgttttgattatcgcttcgtcatactaggaaaccctcccgcttgggagggtttcctcatttcgggcttcgcatcactcgtcctgagcagccctgagcttcatatcaagcaccacgcgggtgccgccttcgcggcgcggctcccaatgcacggaaccaccgaaatcattggtcacaaaggtgttgatgatctgcgtgcccaaaccggaaccggaagaacgagccaatccaccctgttcttcggagccgagaccggaaccgtcatcctcgaccaccacattgaggttcgggccggagcggcccacggaaatcgtgatatggccatccttgcggccttcgaacccatgctccaccgaattggtgatgagctcggtcagcacgagggacagcggcgtggcatcctgagcgggcatcatgccgaacttgcccatgtagttgatatcgatgtgctggtctttcatcgtggctaggtccacggccatgcgcagcaggttggcgatcaccttgtcgaagtcgacgacctcgtcggcggtctggctcaatccctcatgcaccatggcaatggtctgcacgcggcgttgcgcctcctgcaattccttcttgacctcatccgacttggtcttacgagcctgaagcctcagcaatgcggagacggcctgcaggttgttcttgacacgatggtgaatctcggaaatcgtagcgtccttggtctgcagctcctgctcacgacggcgcagctcggtgacgtcacggcatagcagaatcgctccgatacggccgttgttgtcatacaagggcaacgagcgcatcgagacggcggaacggttggcgttgagttcggagtcgaccgcggctttgcctgtcaacaccaacggcagggtttccggaacagggtcgttctccttcaatagctgtgtgccgagttcgctgaggtaatggccaggcatggtggtcagcagaccgagacgcctaaagcagctgatggcgttcggggctgcgtatcgaaccacgccgtccatggtcaggatgatgaagccgtccgccacgcgagcgatatggcgttggctcatcaccgaatccttgtaggggaattggcctcgcggaatcatctcgtacagatgcttgccggcgttgatgctttccgactcatatcggccgttggattctcgtgtggccatattggtctcacgcacgaccaagcccaaggtcttgccattgtgccgaaccggcgcgtacacgttgcagacggtcgccttgcccacggttctcaataccgtggagcggaacaccacgctggagagcatggcggcgtccaattcgccgaccatgtcgtccggcatgacgtttcccaccacgtcttccgcccgcagcgtcataacggtggatggacggcattgctcggccaccacgtatttgccatcgccatcctgtaccagcagcagcagatcggcaaagctcaaatcggcgatcacctgccaatcggcgacaagatgatgcagccactcgcggtcctcgtcgtcgaagtcggggcgcgttgcaaggatatgtgaaaaatcagccatatccctatcatacgcagacgcaccgccgccgtcgcggcaagccacacgggcaagtacgacgactatgacgacatcgcatcttcaataccgcgccaatcgcgttgcacggcttcccgcccgtggccaaggtgccggcatgttgcttatcgtacacggcaagcatcacgtacagtttgatatccgaagccgccaccatattgccggcattgctgtgtccatggaacccatcatcgcgtttgcctgcgctttggcgttgtcatcgccattgtcctgggccgcaagatagaccggcagatagaaatcggcagccacgaattgcttgccggactgcgacgtggtcgcgatggtggcgtcctctgaggagtcggcggatgttccatcgatgaccatggcggagacggccacatcggaggacgagtatgaatccgcgatgtcagacaactggctggatgtgatcaccggagtggaaggcttcgacttctccgtcgagcttttcttggacgaatcgtcgctgttcttgtctttggcgctatcagacgtgttcttcttggccttggacttggcgtcagaagaatccgtcgtgccatcatcggcggaatccaacgcatcggccccggtcgactgtgccgatgtttgcgcctgcggctgagctccccacaatcccatgctatgggtgatgaacaagccgatgactaacgccacgacacaaatcagcgcgatgagcacaatcaccaccgctttggtgtgatcgacgccaggacgcccggcgggaggttcaggagaagcaggggccgccggattggcctcgggctgctccaatgggcttccgcactgcgaacagaaggcatttccttgctcgttggcaaacccacactccgtgcaatacaccatcgccgagccctttattgctgcgacgttctcatcttcggattccatagtatcgccgccattgggtgatagtgttcgtgcgagtcggtattgacaagcataaaagttacgctaacgtaggttacggcagcgtaagaagcgtatcgtcaactcgtgaaacgggggcatcaccatggcatcaacaaccggcgactcggaaaagacgatgcatcacgacgctcataacagcgcgacgattgcagaggatgccaccatcgcatccaagcgtcaggcggctatcgaggcgcgcgaacaggcgttgcaggccaaggctgatgccgtacgggccaaggcccagttcaaggccgaggccattcgagccaaagccgaggagaaggcccggcacaagctcgccaaagcggagaaccgtgcgctgaaaatcgagggcattgcccctgcggaagtggaacgcaagattcgtctcgacgtgcacggacggccaaagccgttgatgcgcggctggattcacgcgattgccgctcccctgtcattggcggcaggcatcgtgcttatatgcttggcacatggcgcgagtctgaagtgggcgtgtgccgtgttcatgacagcgtcgctgattctgttcaccaattcggcctgctaccatctgggcgattggagcccgcgcgtcaccgatgtgctgcggcgtatcgatcatgtcaacatcttcctgctcattgccggcacgtataccccggtttcgtttgcgctggaaccgttctggcgcaatgtgatcatcatatcgatgtgggcgtgcacggccatcgccatcgtgattcatgtgatctggatcaatgcaccacgctggctgtatacggtggtgtacatcatcttcggcatctacggcctggcttatatggtgatgttctggaattcgccgtatgcggggccagccgtggtggtgctgctgtgcgccggcggtgcctgctacatcctcggcgccatcgtctacgccttgcgcaagcccgacccttggcctcgcgtcttcggattccatgagattttccactgcggaacggtggccggatatgcctgccatatggtggccatctacatggtgatcgtctcgctgtggcaataagcgctacgacatataagtatgcccccgcctacgggggcataccagtcacttaactcaggccagcggcttggcggccttgacagtcacggacagctcgcggccgttcggtgcggtgtaggaaacgacgtcgcccaccttggcgccctcgatggccttgccaatcggggaatccggggtcatgatgtcgtagtcggtgccggccacgatgtcacggctgccgagcacgtaggtcatctcgttgccgttgagctcgatggtcaccacagagccctcgcccacggtgccttccggagcattctcgatgatcttggaatcgcgcagcttgacggtgagctcggtgatgcggccctcgttcttgctctgcgcctcacgggcggcctggtagccgccgttctcggacaagtcgccctcggcacgcgccacggcgatcttgtgcgcgatttcctcacgcagctcaccttcacgatgggcgagctcttccttcatcttgttgtatgcttcctgcgtcagcaggtagaccttgtcctcagccatatcgtcctcctgaaccgttgtcgatgctgaaacaatcttcgttatttatgacaaaacgccggctatgaccccggcgttcgtcatgtgctgacctatggtcagcgggtggaaatgatgtcgatgacgaacaccagcgtgtcctcgccgccgatgccggcctgcgggatgccgcgggaaccgtagccgtattccggcggaatggaaaccaccagacgcgaacccacgttatggcccggcacagtctggtcccagcccttgatgacctgtcccacgccgatgccgaaactggcgggctgatgacggtcgaagctggagtcgaatggggtgtccttaccccacaccacgccgtggtagttcacggtgacggtgtcgccgcgacgcacgatcgggccgtctccctcggtcagctccacaaccttgaggcccttcggggcttcgggcgtcgggaactcgataacgggcgtggtgccaaattcggcgttcacctgaggcatctgatctgtcattagtcctccttcaaagacacaatgcgccctaccttagcaccatcggcgaatcggcggtagtccttcatccctgtgcgatacgacacgctggccgtatacgtcaattccggtcatcatgctggtgaataccggacatgtcaatcagcattcgacgacattgacggcaagtccacccttggaggtctccttgtatttggccatcatgtcttcaccggtctgcttcatggtttcgatggcctgatcaagggtcacgatgtgtgagccgtcgccgagcatggccatacgcacggcgttgatggcggtgttggcggccatggcattgcgctcgatgcatggaatctgcaccaatccgcccaccggatcgcaagtcagacccaagttgtgttcgatgccgatctcagcagcattttccacctgttccagcgtgccgcctacgactgcggcaagtccggccgccgccatcgaacaggccgagccgacttcgccctggcaaccgacttccgcaccggaaattgaggcgttgcgtttgaacaggtatccgatggcaccggcggtcagcagaaacgtgaccacgccctgttcattggcgttgtccacgaaatgccagtaatagtgaagcacggcgggaatgatgccggcggaaccgttggtcggagcggttacgatgcgcccgcctccggcattctcctcagagacggccaaggcgaagagatccacccatgcggcgtcggaagactcgagcacggcgtctttgcgccggctgtcgcggcgcagcacatcggaattcgaggcgagacgccgatacattttcggcgcgcggcggggtacgtcaaggccaccgggcaatgtgggttccgccgaggtgcatccgtggtccacacaggcgcgcataacacgccagatggcatcaatatcggatcggacctggatgcccgagcgtgaagcggtttcgttggcccatacaagttcggcgatgctgagatgatgttcccggcataacgacaccagttcagtgcatgatgagaacgggtagggtgcctcgacgccgaaatcagtggatgatgactcgtccgcatcggcaaaggaggcgccttccggagggcgttcatgaatgccgatcatcgggtcttcgggagcgcctttgcgcacgaatccgccgccgatggaataccagacctgttcgtcgaccaagcttgcggcggcgtcgaacgcctggaatcgcatgccattggggtgcgcggccatgcgcttccattgttcgaacaccacgtcacggtcgtagtcgaaatggatgcgtttgaggccggcgaggttcagagtatcatccaacgcgcagatctcgcggatgtgcatcatgtggtcggtatccacggtggccggcagattgccttcgagcccagccatcgcagcacgatcgctgccgtggccgagaccggtcagcgccagagaaccataaagcgtgattttgacacgtgcggtgcgatcgaccaaatggtcggcctgcaacgaggaggcgaaagcatgtgccgcgaccatcgggcctacggtgtgcgaggatgaaggtccgacgccgatggtgaacatgtcaagcacactgaacatttggctccttctcccctgctggttcggcatgccggtgttaccaggcgtcataccatcacgatatcgtatcccagcccagcgcccggaatcgctttcgccttgtgcgatgatggccgcgcgcgtcatgccggcgagcgataagtcagtcagtgagacagtgcggagaacatcatgaccagtacgatgataccgatgatggccaatacgatctgcaccaccatcagcccgatggtcagtcccttcttggtggcgattttgggcgcgtacgcctgtgccaacaggaaggcgatgaagccgaacaccgcgtagttgacggtcagggccatcacatcgccgttcgacaacaccacgccgttcagcggctggttcagcgtgttcatcatcgcgctcatcacgaacatgccccacacgccgtagccgattaatccgacgacgccgtacagccatggcttgagtttgtcgttggcacgcagggtcagggcttcggcacaccacaacagggcgaagccgacgatgtaggtgaacgccacggcgatcagtatcacgatagtcgcccatggcaggagtgcggccacattgccgatcatggacagatagaatcccgagcaggcgatggcaccaacggtgagtgcagtgcccgcaatgacggcttgggcaagcatggtgggcagtgcgccttgttcgactcgttcgacatcggtccagcgtgaagccatgtggattcctcgtttcatcaggtacatcgtcacaacgccacatagcctaacggccttttgtttcggccttataagctctccacatagtgagctgcgagccccctctgacgaggggggctgtcggcgaagccgactggggagagaccacggcacagccgcaaaaacggcatcggccacaggccgatttcaaggtgcctccggtgggactcgaacccacaagccgaagcgatcgattttaagtcgactgcgtataccatttcgccacggaggccaacttttctattataagctatctcctgccctgagcattgcttgcgggttgctgcacttcgtgcagccgtcgcggcatagccgctcccctcgcctacaaacagcccaccgggctgtttgcttaacggctcagcccgctggaggcacttaccacttacgctattgagccagcaaccggcgaccataatcgagcacaatgccgtccagcagaccgtgttcgctggcaacgaacgaatcgatggcttcaccatgatcggccttggcggcttcgctgacacgcgccagcacacggctccagaccacagcgccgccgccgaccacatcgatacggccggggtggatggtcttgtattcgcggcgctcggcgcgcgtcatcctaaggaacttgtcgtccacggcataggcgtcttcaaggctcagccgatgcccgtcgaccacggtgtgatcgtattccttcaatcccatggccaaggcggtcatcgtggtcaccgtgccggacacgccaatgatggtacgggccttgcctgcgtccacggtgcggaaggcctcatcgatatgttcatcgacgtccacaacggcctcatcgatctgtgtctgggtcggcggatcattggtcagatgacgttcggtcatgcgcacggaaccgatgttcatggaaaacgcgccctgaacctgggtagtgggcgcactgacgccgtcgccaccgatgaccagctcggtggacccgccgccgagatcaaccaccagatagggggcgggcagatcgtcgcgattgaccacggaagtggcaccaaggaagctcaggtcggcttcttcggtgccgggaatgacttcggggcgcacgccgaggatacgttcgatctcatcctcgaactcctcacggttttccgcgtcacgagttgcagaggtggcaacgaaacgcaggccgtcgatgggatgttcggcaatcacaccggcgaattcccgagcggccacataggcgcgttccaacgcttcgtcggcaaaacgatgggtcttgtccacatcctggccgagacggatcacacgcaggatgcgcggcaccacctcatgcatgccatcggcatcgacacgtgcgattttcagtcgaatggagttcgtgccgcaatcaatgccggcgacggttacggattccttgctcattgccttctcctcgtatcccttagtgcgtatgaatggactgttcgcgctggctcatctgttgatcaatcgtccagcgtgcagcggcagacggtcggatcgaattcgtctttgacgcgttccagtaccaaatcgccaatggggttgacgcccggccccataaccaaggactgggccagcagggcatgcaggcacttgacgcgcaccggcatgccgccggccgaagtgccttcaatatgctcctcactgtcgccaagacgtcctgccagttcgtggcggaatgccagatacaggttatgggcctgctcatatgcggccttgagctcctcgtccaaggccaacatgtcgttgtattgctgcatcacgccggcggcctcgacatgggaggcggccttgacggcttccggaccggtcagatagcacgtggtggggaaagggattccgccgggcaacaccggacgggtgattacggcaagtggcctaccgcagacgcatcgcgcccccacggcgaccatgccgcgcgggtatcggccgagctgacgctgcaccaggtcgatgtcatgatcgttggcgggctcggcaagcacggtatcgacaagggccttggccttggcggcgatatcgatggtcactgttgggttccctcccctgtgttctgttgggtgttctgttgggtgttctggtctgacttatcggaccgcttggatgagtcgttggatgacgagtcagaggaaccggaaatatcggatttgccggactcgctatcggtcacaggctcatcggcctttttgagcgagtaagacagttcgctgtaccatggcaggacttttttgttgctgctactggaatcttccgttttctgggattcgctatcggagccggtcacggcttcgggatgaagtacacgcacggcctgttcgccggggaatacgaagccgaggcgttcacgggcctgggcggtgatgtaggccttgtcatcccaacgcttgatgtcgttttccaactcctgctttttggcgatcagcgaagcctcctcacgcttgagaccattgagttcggccaggttcagggcataggtgtggaaggtggagaccagctggatggcgccaagggcgataatgaacagggagacgaagaacgctataggccccgccgacccttttttcctaacttgtgctttgccggttttgccaggtttgccggtacgggacgacttgctcatgtcacacgaaaatacccgccgcattcgacttgacgaatacgacgggtatcgagcttcagtggaaactcacgcctttacgggcgtttcagctcacttggccaggtacttcttgcaggccttgaaggcgctgtagccggcgtactgagcggtggagccgagctcctcctcgatctcgagcaggcggttgtacttggcaacgcgctcgccacgggccggggcaccggtcttgatctggcgggtgttcttagcaacagccaggtcggagatggtggtgtccggggtctcgccggagcggtgggaaaccatggaggtgtagccgttggcggtggccagttcgatggcgtcgagggtctcagtgacggaaccgatctggttcagcttgaccagcagggagttggcggcgccgaggtcgatggccttctgcagacgagccgggttggtgaccagcaggtcgtcgccgacgaactgcagacgatcgccgaggcgagcggtgatggcagcccagtcttcccagccttcctcgttgaacgggtcctcgatggagacgatcgggtactcgttgatgaggttctcgtagtagtcgagcatgtaggcggagtcacgctcttcaccgtcgaagcggtacttgccggtctccttgttgtagaactcggaggaggcgacatccaggcagatgccgatctgcttgccaggctcgtagccggcggcggagatggcgtccatgatgtacttgagggagtcctcgttggacttcatcttcggggcgaagccgccctcgtcgccgaggccggtgttcaggccttccttcttcaggacgttcttcagggtgtggtagacctcaacgccagcgcgcagagcctcggagtaggtgtcgaagccgtacggggagatcatgtactcctgaatgtcggtggcgaagtcagcgtgagcgccaccgttcatgatgttcatgttcgggaccggcaggatgtggccgttggtgccgccgatgtagcggtacagcggcaggccggcggactcggcggaagcgtacagagcagccagggagacgcccaggatggcgttggcgcccagcttgcccttgttcggggtgccgtcgagctcgatcatcaggtcgtccagagcgcgctggtcagcagcgtccatgccgatgaccttcggagcgatgacctcgttcacggccttgaccgcgttaagaacacccttgccgccgtagacggacttgtcgccatcgcgacgctcccaagcctcggcctcaccggtggaggcgccggacgggaccaggcccaggccctgggcgccgtcttcggtgtccagaacgacctgaacggtcgggttgccgcgggaatcgagaatctgacgcgcgtacacgctttcaattactgccacaactactccttaaaacggttgtgtatcttgaatgacattcttaagagtagtgcgatttgtggacgttgtgaacaacacgcccaaaatttagcgttagcgctcacaatgccagtgtgccgcctgattgcaaggcagtacggacgaaatcgctcagtcaacgtccttgccattgaggtagccgatctcactgtcggacaatttcagttcgctggctttgaacgagtcctgaatctcctgcgggtttctggccgagggaatcgtgaacagatattggtattgcgcaagttcccacgcgagcgtgacgcgctggtaggagcagtcgtgaatcttggcgacttcgcggaaccggtcgaacagatgctcgttgaacgggtcgaggaatccgccgagtggcgaccagcagacaaaagccaaaccgagcttttcgcaggtttccaacgtgtgttcagggtcgcggtggaccggggagaactggttctggacggccacgagacgatcgcccaaaatattgcgggcggtttcgatgtccgcgttgtcgattctggagatgccgacagctttggccacaccttcgtccacgagctgcttgagtgcgcccatctggtcttcgtacggcacctgcggatcattgcagtgcgagtagagcagatcgagcgtatcgacaccgaggcggcgggctgattccttggcattggcgatcatggtttcaggtcgggcgtcggcctgccagccgtagttgccgttgccgtcaagcgtgcgcagccagccggttttggtggctacgagcacctgatctttggggccatgccacgagtgcagagcatcgcggaccagatattcgccatagcccatatcctccggttcgccggtgccgggtgcgctgggcagataataggaccaagccgtgtccaaataacggactccggcatcgagcgcggcatggatggtctcgatcgcctgattacggttggaggggcgcccctcgatggcgagcgccatcgtgcccatgccaaggcggggaatctcatagccggcaagtgttgccgtggtcgcgctctggttcgtgcggctcgtagtcgtttcgctcatagcagtcacttaatctcgctcgctggacagtcggaacgattccgtctggggtgaatcatcgtcacaaacgacggcatgaatatgaatatggctcaccggaggttgcccggtgagccatagctggctcgactgtcgcctcgcaccccgtctacaaacggctctgccgtttgcttgacgacggggtccatgccaaatcatcaagtaactggttggtccagaggactacctggtcggagctcatgggaccttggcccagggagccggtgaacggggtggggacgatgagttggtgggtgaccgggcggtattgggtgcctttgtaaatacggcccatacgcatctggatggattcgggcgggtcgatgcgaccgatgcgcacgcggttggattgcgcgagaatctccgaaatgccgagcttgcgggccttgaacttcagacgggccacgtcgaacagggtctcgaattcgaccggcggcttgccgtaacggtcggtaagttcctcttccaaatccttcagatcggcctcgttgcgggcggaggcgagcttgcggtacgcttccagacgcagcttgtccgaatcaatgtactcgatcggaatcgacgcttcgatgggcaggtcgatggacacggccaccggctcgacgttctcttcgggctccttgtacttttccacggcttcggacaccatgcgtacgtacaggtcgaagcccacgccctcgatatggccggactgctcgtcgcccagaaggttaccggtgccgcgcaattccaagtccttcatggccacgtcgaaaccggagccgagcgccgtgttctgcgcgatggtggcgagccggtcatgggactgctcggtcatcggcttggacgggtcgtacaagaagtaggcgtacgcgcgctcgcggccgcgaccgacgcggccacgcagctgatggagctggctcaagccgaaacggtcggcatggtcgacgatcagcgtgttcgcattggagatatcaagaccggtctcgatgattgtggtacacacgagcacgtcgatgtcgcgatgccagaagtcgcggatgatctggtcgagctgcttctcccccatcttgccgtgggcgatgccgacgtgcgcctcgggcaccagcgtgtgaatcttgtcggcgatggacgagatgtcctgcacacgattgtggacatagaacacctggccgcctcgcagcagttcgcggcgtacggctgcggtgacctgcgcatcctcgtaggcgcccacataggtcagcaccggcaaccggtcttcgggcggggtggcgagcgtggacatctcgcgaatgccggtcacggccatttccagcgtgcgcgggataggcgtggcagacagggacagcacgtccacgttggtgcgcagggctttcagcgtctccttgtgttccacgccgaaacgctgctcctcatcgatgatgacgagtcccagatccttgaacttgattttcgggttcagcagcttgtgcgtgccgatgaccacgtccaccgtgccggtttccagcccctcgatggcctcgttgatctctttggtggtctggaatcggctcatggccgccacattgaccgggaaaccctcgaatcgttcgctgaacgtctcgtaatgctgctggacaagcagcgtggtgggcacgagcacggccacctgcttgccgtcctgcacggccttgaaggcggcacgcagtgcgatttcggttttgccgaagcccacgtcgccgcagatgaggcggtccatcggcacgggcttttccatgtcggatttgacctcgtcgatggtggtgagctggtcggcggtttcctgataggggaaggcgtcttccagctctttctgccatggggtgtccgggctgaacgcgaagcccttggcgcgctggcgggcggagtacagcttgatcaggtcgtcggcgatctcgtggacgtgcttgcgggccttggccttggtggccgcccagtcggagccgccgagcttgttgagcttgggggcttcggcgccgatgtatttgctgacctggtcgagctggtcggtggggatgaacagtttgtccgccggggcgccgcgcttggaaggcgcatattcgatgaccaggtattcgcgagtggttttgttggcgccggtgccgatgatgcgctgacgcatttcgatgaaccggccaatgccgtgctgctcgtgcaccacgtaatcgccttttttgagctccaccaagtcgatggccttgcgccggcgtttcggcgttttggccacggccacggctgaagtgcggccggtcaggtcgcgttcggtgagcagggcgattttggcggctttgtccacgaagccgtcgatggcctgagagcggatgacgtcgaaattggcgatgccggtagtgttgatcgcacgcttgagcctggccaaggtgccggccgcagcggcggtgatggtgacgtggaagccggcatcgagcaggccttcgatgccttgggaggccttggcctcatcccctcggaattcggccgggttctgggcgtcgagctgcacatggccggtcaacgtggtgtccacgccgaaactggtgaggcgaatcaccggatgttcggagtattcgagggagctgatggtttccgcatagtcgaggaagctggcttcgtcgaagctgatgggcgcgccggcgccgtggccggaggcggccacatgccagcttgcggccaggaactcgttcgcggtttttgccaagtcttcggcggagcggcgcagtttctccgggtcgctcaggaggatcacggcgtgcttgggaagcatggagcccaccggttccagatggtccacgagtgcgggcatcagggattccatgccttcgaccggaatggcgttggcgatggattcgagcatgtcctcagcattgggaatcgaaccgaccaaggctttggcgcgggtgcgcacggcgtcggtcagctgcagttcacggcatgcggtggcccagatggtcttgaggccgtcgccgtaggtacgctggtcggaggcgtggaattccttgatggtgtcaatttcgtcgccgaagaattcgatacgcaccgggtgcggtgcggtgggcgggaatacgtcaagaatgcctccgcgcaccgcgaactcgccacggtccatgaccaggtccacgcgcgtgtaggcgttttcgatcagacgtttggcggcttcgtcgaggggcaggtcctcccccacggtgaacacgagcggctcgacatcgcccagtccttggacgactggctggatgagcgagcggatcggcatgacgagaatgcgaatcgggccgaacatcgaatcggtatcgctcggatgcttgagtctgcggaacacggccatgcggctggccacggtgtccgcgcgcgggctcagacgctcgtgcggcagggtttcccaggcttcgagctgggcgatgtcgttcgggtcgccatcataccaggagcgcagcgagcccacggtctcttcggcttcgcggccggaggccacgaccagcacgaccggcttgccgggtttgccggccgcaccctgcccgatggcggcggccaaagccgggcgcaaaccttcggggatgccggccaggacggagttgtcgacgtcgtccgaagcctcgatgtcgccggcggcgagcttcaggaaggtcttgtcctgttccagctcagacaggatgcctaccagtgagccgttgatcaggtccgggtgcgtcgcctcaccggccattgaacttctcctgggtcttggcaagaccgtggaagatgatgtcctcggcggcgtcggcgccgtcagccaggaatttgggcagctgcttgcgctggtccggaccgaatccgcccagcacccagttcaccgtgttgtcatgcgcgttcgcaccgcgcttggagtgaccgacgcccatgcgcacacgcgcgtatttcggcgtgccgagggaacggtcaatcgacttgatgccgttgtggccgcctgcggagccgcctgccttgaccttgatacggccgaattccaagtccatgtcatcgtgaatcaccacaatatggtcgggctcgatctggtaataggcgctaatggaagccaccgcattgccggaatcattcatataagtcagcggcttggccagaaagaacttgacggtgcggccgtccaggttcatcacgcttttaccgagcatggccaagcccttgtgatcggcgaagttcaccgtccaacgttcggcgagcacgtcggcggtcatgaagcccatgttgtgccgcgtgtcctcatattttttgccggggttgcccagtcccgcaatcagccagaaatccgatgccataatccgctcctcgtccgtcttcctttattcccgtatgcacgttctgtacgttccgtacgtcatgcgcgcgttcgcctcgcgcactggcccatgcccggccggatccaaccgtcaagattgtactcaacgccgccgtcaagctcgtttgctccggcatcctcacacttttcttgactgaaatgacttactgcaaggctacaggtccaaataccagtaggacatgtcccgcatggtgccggtggagtcggtggcagcggcgggcatgagtccgaattgggtgaagccgaagcggtgcatgagggcaatggagccggcgttatcggcgaaaatgatgccgcaggccttgcgcatgtggcgggccagcgcctcggtgagcagcctgtcaagcatgaacgtgcctactcccctgccttgccatgccggatcgatgtaataggccaaatcggtgacaccgtcatatcctgcgcggtcatagaacacggagagcgcaccgaagccaatgattgaaccgtcttccgattccacaacaaaaacgccgtagggcggcgtatgggattcgacccaggcgcggcgttggtcgaaggtgcgcggggtgaggtcggcggtcgcaccgccggccatcactgaggcgttgtagatgtcggcgatggcttggacgtcggattcgacggccggacggaaggtgtatggcatgaggttcctttgaatacgcaaatagcccgtccttatgataaggacgggctatgtcagttgaggtaaccgactcccttcagtcgccttcggcgatggctcccctcaccctgaggggagccaattcctgtcggaactacttgtcgagctcgatggccttgttgagggcgtcttcaagctccttctgcgccttgccgtaggcggtccagtcgccgttcttcatggcggactggctgtccttcatggcttgggcggcatcgttcagcgcctgctggagttcggggctacggtcggaagacgagccggaatccgacttgccgtccgtggtgccggactggccaccattggtatcggaaccagattggtcaccggatatgccggacgactggtcaccagacgatccgtcaccggacacgttctcggcatcgcctgcggccgcgccggaatcaccaccgaacacctgatccaaggcctcatccaacgtatccgcaaatcctacctgatcaccgaacgcgaccagcgtcttcttgagcagcgggaatgaagtcgcacccgaagacttgacgtacacgggctgcacgtacaccagtccgccaccgagcggcagggtgagcaggttgccgcgcaccacttgcgtgtcgccggattgcagcaggttcagttccttggacacgtcggcgttggcgttgaagttgttctgcgcctggccggggcccggtacgttcgaatccttgggcagctcctgcaatcggatggtgccgtagtttgagcctatcttgcccttctcattgccggcatccgagtcgaccgacaggaagccggtgaggatctcacgggtggactggccagccggaatgtaggtggagctcagcgagaacaccggttccttggtgccaccggtctgcaaggtcaggtagtacggcggctgcaggatgtcctggtcctgctgggactgggattcggtcgggtcgaccggcgtctgccagaagtcctcgccggagtagtactggttggcggaggtcacgtggtacttggagagcagctcgcgctgcaccttgaacaggctttccgggtagcgcatgtggctcatcaggtcgccggagatatcggagagctggtggtactggccggggaagatcttctcccatgccttgattaccgggtcggattgatcccatacgtacagatccacggaaccgtcgtaggcgtccacggtggccttgaccgagttgcggatgtagttggccttctgcgagcccaaggatgagaccgttgcggaagagacggtggtggaatccttggtggcggagccgaggtcggtcatctgcgagtatgggtaggcatcagaggtggtgtagccgtcgacgatccacttgacgcggccatcgaccacggccggatacacacggccgtcaagcgtcaggtacggcgccaccttggccacgcgctccttgggggaacgatcgtaaagaatctgcgattcgctggtcacacggtcggagaagagaatctgatcggagccgaagcggattgcgtagagaatacgggagaacaggttgccaaccgaggggccgccgtcgcccttgaacgtggtcagggcgccttccgaaccggtcgggtagtcgaactcccaagcctgcgtgccctccggtgcgccgacgatcgagtattcggtggtgttcggcgagaagtagatgcgaggctcatacttttcggattcagtgagcttgccctgagtggggatgccggattcgaagaattcaggctggccgtcggcggtcaccttgttaccgtaagcggccaccacgccgtaaccgtgggtgtacacggtgtggtcattgacccaattgcggttgtcgttgccggccaggtcaagctcgcgggcggcaatcacggtgtcttgggaaacgccgtcgatctcgtacttgtcgactgccaaagtgtcggcgaaggtgtagtactgcttggactgctgcagctgtttgaatgtggggctgacgacctgcgggtcgagcagacgaatctgcgcggtggtgtcgccctccttggccagagcgccctgctcgcccttgtcggttaccttgtattgctcggtcttgagcttgtcaagaccgtaggcggcgcgggtggcgtcgatattgcgctgaatgtaggtggattccatctcctgtgcgttcgggttgacgcggaagcgctgcaacagcaccggccatgccacggtgagcacaagacccaccacgaccacgacggcaatggaggtcaccggcacacgccaggccctgagcgcggcggaggcgcgcacgccgatggacgcctggccttcgagcgtgtgggaacgcatgagccagatgcccagcaccacgccgaggatggcggtcagcgcggccatgatgaaggtgacggggatgttggcatgcacggcggtgtaggaggcaccggtgatgcgtgaaccctgcacggtgagctggtcgaagacgccgatcatctggcgcactgcccaagcgaacatgttgagcatcagccagatgccaagctggcgacggcaacgcttggtgatggagaacaggccgcgtccgttaaccggcatagtaatgcggataccacccatcagcacatgagtgaccacggaaaacacaaggcccacgcccagcagcatggccacggcggcgagcacgagcttcaggcccggcagcacgaacacgtagaagccgttgtccagaccgaactgcggatcggtggtgccgaacgactgcgcgttgaacatgagcagaatctcgctccagttcgcgttgaactgagagccgaagatgacgccgacgatcagcgaaatcaccacggccacgcggcgagcggttttcgagctgacggatttgccgacctcgaccacatcgccgttaatgcgaatggtggaaccgtcggccgaatcagggcgtgctcgaatggccagccaggcggaaacgaagccggtcaaggccatgagcagcgcgtaggccacccacagaccgattttcaccccgagctgggtccagaccacggactggaagccgagctggccgtaccacatcagatcggtgatgaatcgggacaggccgaagaacagaccgacgatgatggccaaggccagcaccacgccgatcagaatcttgctgccacggctgcctcctgagccaccggacgctggcttacgggtgatacgcggattggccgggccacgtggagggcgggatgacccggaggggccggcgttggtgttgcgggccggaccgtccccatcggcctcgacatcgaggatgatcggatcgtcattgttcgcattgttgcgtcgtgaatcgccgccattgccgaacagtattgagaaaggatcgttaaaagacataactcaagcctatcgaaagggcgggaggtaggttatgccctgagcacagaatgaggcagcgttctgttctacgctccgttctacgcttgccggtatgaacagccaacggccacaacatatgcgtccctcagcacacgccacacgccaacttcggcacaggagcactccaatcgtggcgacaatatgtgctttggcagtggtgttggccggcgtggcagcctacggatggcatgtcggatggttcgccaaatccacatcaaacggcaacaccaccactccccagacctcccagacaagtgcgttaccacgcgccgacgttccttccccgaagaagaacgaaccggccgcacaagcccaacgtgcggtatccgccatgacacttgaggaacgtgtgggacagttagtgatggtgccgttgcttgccggttccgatccctcctcgttggcttcaacaatcgccgatgagcacattggctcggccattctcattggcaattggaataccggcgccgatacggtcaagaccgcgaccgcgcaactccaaggatatgcgccggccggcaatcgtctcatcatcgccaccgatcaggagggtggtcaggtgcagcatctgactggtaccggtttcgacacaatgcccagtgccgttgagcagggcacaatgtccgctgacgcattgcgtcaatcggcaggcacgtggggttcgcaattagctgctgctggcataaatgtcgatttggcaccggtgctcggcacggtggtgggcgatcgtgcctcaaatgctccgattggcgcgctggatcgtgatttcggattggatgcggccggcaacgccgaacatggcatcgccgttattgaaggtttgcgagacgctcaggtcggcgcggcggtcaaacattatcctgggttgggcgcggtaagcggcaataccgacttcaccaccgaaggcattctggatacgaccaccacgttgggcggggccgaggcaggtgcctttgaccaggcgatcaccaagaccgatcctgcgatggtgatgatgtcgttggccacgtatcaatccatcgacccgaataatccggcggtgttttcttctacgattatcgacggtcatattcgcaacgccctgaagtacacgggcgtggtgatttcggattcgatgtctgccgaagcgttaagcagctacgatgtaagccaattgggagtaaagcttgtcgaggcgggcggcgacatgtcctgcatcggtcagacggattacgtaaagccaattgtggacggcctcaacgaacgggcgaagtccgatccggctttcgcttcgaaagtgacggcggcggcgactcgcgtaatggcattgaaaatcaagatgggactggcctgactgcttatcctttgcactggtgaggattgctgcgcactgattcgcgctaatcctcaccagccctcgtacaaatgcacactagtcctcgtacgaatcgtcagtcctcgtatgaatacagaccatgcttgccgatgtattgcaccacgccgtcaggcaccagataccagaccggctcgtcgtgttcggcgcggcggcgtacatcggtcgaagagatggccaaggccgggatctcaagcgtatcgacctttccttcgggcaaggtcacgccgtccggactggagtagccggggcgcgtgacggccacgaagtgggcgaggtcccacatgaggtcggcgtccttccactgcataatttcggccacggcgtctgcgccggtgatgaagaacagctcggcgtcgggatgttgggcgcggatatcgcgcagggtgtcgatggtgtaggtgacgcccggacggtcgatgtcgacacgcgagacggtgaatttggggttggatgcggtggcgatcacagtcatcagataccgatcttcggcgttggtgacgtgcttgtccagcttgaacacaggtcggccggtgggtacgaaaatcacctcatcgaggtcgtatacccaagctacttcggaggcggcgaccaagtggccgttgtgaatcgggtcgaacgtgccgcccatgatgccgacgcgcaggcgcgtatgccagttgccgcgtgcggaaagcctgcctttgccatggctgctggccccggccggcgcggacaggtcagacatgcgccgttcggtttcgccttgggtgacggcaacgatttcggcgggctcggcggattccactgatttttcggactgaactgacgcagccgttttgtggctgtcggtaacaccactcatgcctggtcgccctcgccggcggcgtcatcggctgattcggtttcctcttcgatttcgccggcggtgggattgtcttccctgggatcgatcttgcccatgtcttcatcccattcgtcctggaccacgcgacgaatttcggcgaaggtgggcagcgggaagtccggctggtagaggcggcggacctcggccacacgctcggtgatgcggatgagcgtgtcggtcatgccgtcaaggtcaccgtcgtgctccatctggctgtatttgccgatgtagccttccatgagctccatgtgttcgcgcacgatcttgagctgggcatcgtcgaggtccgcgacttcgggcgaatcggtctcgggccaaccgatgagcacggcgtccgcgtattcgagcgacgcacgctgggcggcggaggcgatgccgtcctcgatctgcacaaggaacacgtagcggacgatgctgagccgttcggccgcgatcttcaggccgagcttgggatcgttgaggtcgatgtcgggccgcagttcgcttgccttgtttgccgtgtcagccgtaatgttcatgttgccgtcctcgttcatgcgcgcacctgtcctgttccgtaaccgatccacttggtggtggtcatctcccgcaatcccatgggaccgcgtgcgtgcatcttctgcgtggagatgccaagctcggcaccaaagccgaacacgccgccgtcggtgaagcgggtggaggcgttgaccatgaccacggccgagtcgatgcgcttggtgaattcctcgatggccgcataatcctcggcgatgatggattcggtgtggcctgtggaatgcgtgttgatgtggtcgatggccgcgtccaggtccgacaccaccttgatgcccattttgagggccaggtattcggtgtcccaatcctcttcggcggcgtggttgaggtcaaggccctcgattgccgcgccggagatgatgccgtacgacgtggtgtcggtctgcagcacgacgttcgcctcggccagagcggcggcgatctgcggcaggaattcggcggcgacatccttatgaaccaatagcttttcggcggcgttgcacacgcccacgcgctgggttttggcgttgatgatgatcgggatggccttggcgagatcaccggacttgtcgatatagatatgcacgttgccggcaccggtttcgatgaccggcactttggagttgcgcacgacggcttggatcagacccgctcctcctcgcggcacgagcacgtcgatatggcctcgcgcctccatcatggcggtggcgccggcgcgcccgtactggtcgacggattgcaccagtgcggattcgaaaccgtgggcttcaagcaccggggcgatgacgcccaacgtggcggcgttagtgcgttcggcggcgtggccgcctcgcagcaacgcggcattgccggacttgaggcacaggctggccacgtccacagtgacgttcggccgggcctcgtagatcatgccgatgacgcccatcggcacgcgcgtctgggtaaggcgcagaccgttgggcaggttgtatccgcgcacgatctcgccgaccggatcgggcagggtggccacatggcgcacgccttgggcggcggcggccacgcgcggcacgtcgaacagcaggcggtcgagcttgcccgcatccatgccgttttccttggattcgagcatgtccagcgcgttggcggcttcgatgtccgcagcatgctcgtccaacgcgtccgcaatggcaagcaacagttcgtttttggcttcggtatttgcctgtgcaagacgctcctgtgcgcgtgcggcctgatcggcctggcggcacaccgcgtcgaacacctcaggactcaattcatcgctcataaaaaacaagagtaacccacaatgggccgcattgcccgtttcgacccatattgcaccgaagatagccggggatataagcgcggctccctctgatgagggagccgcgtacatccgcaaaaaatcagtgaatctggtccaggtcggggtagagcgggaagtcttcggcgagcttgtcgacgcgggccttcagcgcggtcacgtcggcggacgggccggcggcgagcgcggtgccgatgatgtcggccacctcctcgtattccttcggtccgaagccgcgggtggccagggcggacgtgccgattctcaggcccgaggccaccgaggccgggcgcgggtcgaagggcacggtgttgcggttgatggtgatgccgcaggcggcgagcagatcctcgccctgctggccgtccatctcgctgttgcgcaggtcgaccatcaccagatgcacatcggtgccgccggtcagcacggagatgccgttggccttgacgtcgtcggccagtagtcgttcggcaaggatcttggcaccgtcgaacgtgcgctggcggatgatctccgggtcggtgcggaaggtctcggggttcacgccgtacgcctcggcgtggtagaaacggccggggtagccttcggcgtatttgttggtcagcacggagccctggcattgcagtaccgctcgcggcacgaagttctcagaggcgatcatctcaaggccactgcgctggcggcccagttcggagtccagcagttcggcgatctcaggatcggtttcgcagatcggcgcgttgaaagcatcggttgccttctgcgcaaggggtgaagcggtcatgggtgctctttggtataagcgacaattgattcgccgttgtcgccttaccgtatggcccgtttgcagccggcctgtttcatgatatggccggtccccgttcgatggcaatggtgattttcgccggtgcgaccggtcggttatgcgagacggacggcccttctgcccacggcccacgctagactggtgtggattcatcatccctttcaggcagaaggattcatcgtgacaaccaccttccattccacccgtagcaccaccgattcgctgaccgccaagcaggcgattcgtaagggcatcgccgatgacggcggcctgttcgtttcggacgcgttgggcaagaccaaggtggacgtggcctccctgccgggcaagtcgtaccagcagatcgccgccgaggtgctgggcgcgctgctgccggacttcacggccgaggagctgggccagtgcatcgccgacgcctacggcgaacagtggtccgatgagcgcatcaccccgctcaagcccctgggtgacgattacgtgctcgaactgttcaacggtccgacttccgcgttcaaggacgtggcgctgcagatcctgccgcgcttcatggcgcacaccacgccggccgatggcgacgcggacgagaagatcatgatcctcaccgccacctccggcgacaccggcaaggccgcgctggccggcttcgcggacgccccgggcaccgcgatcaccgtcttctacccggaaggcaaggtctcccaggtccaggaactgcagatgaccacgcaggccggctccaacgtgcaggtggccgccgtggaaggcaacttcgacgacgcccagtccgcggtcaagcgcatcttcggcgaccgtgccctggccgagcgtctcgccggcaattcgcacgtggtgctttcctccgccaactccatcaacgtgggccgtctggtgccgcaggtcgtctactacttctccgcttacgcccagctgctcgccgaccaggtgatcaacgtcggcgatgaggtcgagttcgtggtcccgaccggcaacttcggcgatatcctcgccggctactatgccaagctgctcggtctgccggtcaagcacctcgtggtggcttccgacaagaacaacgtgctgttcgacttcctgaccaccggtacctacaaccgccagcgcccgttcttccagaccatctccccctcgatggacatcctcatctcctccaacctggagcgcatgctgtactacttgtccgagggcgacacccgtctgatctccatgctgatgaacgacctcaacaagtggggcacgtacgagatcccggaagaactgctggccaagattcgtcagatcttcggcaccggttgggccgatgaggatcaggtacgcgagtccatcaagcactgctgggacgagaaccactacgtgatcgatccgcacaccgcctgcggctactacctacttgagcagatgccgcgcgacccgctgaccccgcgcgtgctgctctccaccgccagcccctacaagttcccgcgcgtggtgaacgaggcattgggcttcgacgccaccggcaccgacttcgagtgcatggatgtgctggcccgcgaaaccggtaccaccgccccggccgccctgcgtggtcttgagaccgccgacgtgcgcttcaaggacgtcgtggccatcgacggcatggaagattacgtcgaaaaggccgcccagacgctgtaaacataccagcaccttggctcccctcagagaggggagccattttttacatcagaattgcgtttacatcagtatcgcggcgactggcagtcctatggcgattgccaacagcacgatagtgccgatgatcacgctggggcgtgcgaggttgacggtccagccgacgccgaaacgtttaggaaccatgatggccggatcgtcacggttgatgtagatgatgccgccaatccagtgcaggtcatcgtcatacggcataacatcatcgtccgaatcgtcaccgccgtcactgtgccgaacaccggcatagacgcgcgccccgttctgcccgtaatacacgccgatcatcagcgcgccgaccagagccgccacagcgatgaacatgccgatgatgccgattagattgacatccagcacgccaatggcgacaagctgaacgcctaggcccaatccaccggctgtcagcagtccgatgaccagcacgtagatgctccagacccgcgagaacacaccataggcatacccggtggtggcggggtggtcgggatcaatcgggtgcttggcgtagatgatcgcgacatggctggccaccatcaccgctgccagcaccacctgcgcgagcacggcgtaccaaatcaccatcggactcttctcggcccagccgttcacattgccggcgatatccgcatgaatcggcacccgctccggcatccggtcatagcccagcagcccgaccgcaatggtgacagcgagacaaacgacttgcagcaattcccacttcaggctcagcgggtcgggattgtcccgctcacctatcaatgccgcacggcgagcactggacgcctcccatccctgattggttttgatggacagtactttgcggcgaaacacctgctgcagcacaaaaccacatatcgcaatcaccaccgctgcgatggacacggtccagaacgccgcgtcgactccacagagccgccagacggccaacgagaccagcatggcgcacacaccgattgccactacaattcccgaaaacgcgactttgtattcgcgaatgcgcgtattggtatgggcggcggccggcaccgtgacaccgaacacctcatgccggtcggtaacccatggaacccctgccaggccggcggtcactatcaccggcaacagcaagaacgcacacaacgcgatgttcatcgacacgactgtattgttcatcgttatctcccctgattttcttttgttgcaccgtcagtaacgctctgcgaggagcgcacgccgtatgcccgttcgcattgccgtttggcggcatcgaggaatgcggccgaatcaccgccgcgcgccttgtaggccaaggcaaggcgatagagttcctcgtccatccgctcatcctgtgcttcggcagttcggttcggcgcttctcccccgccgttacgctcagcgacggttgcaccggcaccacgacgcataacgatgtatccctcgtcacgcaacagcgcatatgccttgttcaccgtgtgcaggttgatgccaaggtccacggccagcgagcgcacggacggtaacgaatcgcctggcgacagctcatcgcccgcgatggctgcgatgaactgccggtgcagctgctcgtaaatcggcacgtcactgcgctgatcgatttccacaatcatggtcgcctcctcccaaaccgttctatttgttctacatcaactataacacttaccgaatacaccgcaaggcacaccaaacataacaacatatttaatatgtctgctatgatggtgcccaagttgcggcgcactggcgaggaggcaatcatgtggtcggaagaggaaatcgatgctttgctgaacccgctgcgttccgcgcaatcggacagtcaggatattgaggtcaaggaggccgtgggcggattgccggtttcgctgcctgagaccatttccgctttcgccaatggacgcggcggcaccatcgtgctgggcattgccgaaaaggatggcttcgaacccgcccaagggttcaaggcgcaacccgtcgccgaggcattggcgcagatgtgcagagacaaaatcaccccgcctataaggccagtcatcgacgtcgcttcgtatcatgattccaccgtggtcatcgccgtcatcgatgaggccgatccactggataagccatgttacgttcgcaatagaggccggtacagcggctcgttcatccgagtttgggatggcgaccgcaaactcagtcattacgaaatcgaccggcttttggaaaaccgcgcgcaacccatgtatgaccgagggctgatctacgaagccaccgtcgacgatctgctaccggatatcgtgcagggcattcttacgttatgccgcgaacgccgtccacgtgtcttcggaaaactgaccgatgaagaggcgatgagcgcgcttgggatagtcggaacaggagatgacgggaagcctcatccgacgcttgccggactgcttgtcgccggcaattatccccagcagtttctgccacgggtgaatatcacgttcacgtgctaccccggatatgacaaggtgtttgccggcggggtgaaattcatcgacaattattcactcgacggccccatccccgagatactcggagaaaccctgaacgccgcacagaagaacatgcgcatcggaggcgtattggacggcccattccgcaaagacacctttgaatacccagaggacgccatacgtgaggccgtggtcaatgccatcatgcatcgcgactattcgccgatggcccggggcggccaaattcaggtcaacatgtacaaggaccgccttgaagtgctgagtccaggcggattatacggcgacgtaacgctggattccatcagcgagcccggctccacttcgacccgcaatcagacacttgccaaattgcttgaatgcaccccgttccgcaatgccacagtcgcggagaatcgagggaccggatacagcctcatcaacagactgctgctggataacggcaatggcgagcctgaaatatacagcacgctgaatttgttctcggtcaccttccgctcagcggatacctccaagttgccggacagccgcagggatccccgttacgcgggttggggcgataggcccgatatcgattacagcgcggcgcaagggctgatcaacggacagcttccgacaccggcgcacccgaaaatcgtgccattccccaaaaacagcatcaaaacggaagagctcagcgacgaagagatgtacgagcgatatctcaaagatattcccggattggggccgaccattgcgcggatagccggactggacgttccgcagtccgcggacatgccgctggttcgtgatgtctcatccatcgaaaggccatcagctcgcagcgcgtcggcatccgcattggaaggcagcgcccgctactccatgctggaagagcaactgttgcaactgatcaacaagcacggcaccatgtccacgcccaaattggtggaggccaccggagccccgcgctccaccgtcacctatcagctgcgcaaactcctggaatcaggcacgatcgaacgcacgcaaccagcccgctcccccaaacagtcctaccggataaagtccgcctgaggcgtgcaaagcgaaaaaaggcgcgttggcctgtgcctcggcatatgtccaacggcgtgttgcttgtttttccaggaaggcgggaatcgccatgccgcgcggtacgcgagtgatattacgcgggtttcagtgcgttgtgtcaaccaaacgcgagaggaacatatgaccacggccaacgggcagacgcccgctgacccgatgcttatcatgcttatgatcgctgcggccatcaccctgggcgtcaacatcacccgctccatggccggcggccacgccgacattctcgaatgcgtgggcattttcttcgccatcgccctgtccgtgaccatcaccgtggtgatggaaggccgcagcgccaaggcattcgaagcgctgaacgatatcaatgacgacacgaccatcaccgtggtgcgcgatggcgagttcggcaaaaatcgtccgcgaactgcgcgccgccgacaccggtatgacaccgctgcaggagaagctcgcaaagctggacgaacttcatgggcggcaccgccgaacagcagtcgaccattctgttcacgctgttcgtggtgttccagccgttcaacgccttcaacagccgcgagccgggcaacgccagcctgttcgccaatctgttacgcaataaggtgatgatcggcgtgttcgcgctgatgttcgcacttcaggtgctggtggtgcaattcggcggcgcgatgttccgcaccgtgccgctgccgatcgacatgtggctgaagatcatcgcggtcggacaaatgcgcggctagagttctttggctcggtagatgcggatggctataagcatggagccaaaatatgcgagcagacacagcacggcgagaacaagcgccgtatgccaccagatcgtcaggaaatcggtaatattcagcaaaagccattgccagtcaacaggcaatcgggccagcagcgcaatgacggcatacaagccaaccatgaccgcgacagaggccaccatcatcttgcggaaggtgaaccggtatgcacaggccagcagcaccgacccaagaatgatagccaaagcgaagatgaaagcacctgctgccaaggtaccgatccaccccatatctgctatatcgccaaagacaatgaagacgccgccgcatatcaccacgtccaaagcccagagcaggccaaccaccaacagaaaaaggtaccgacctacaacttgtgcagtgcgtgaaacaggaatcagccctcgcatggcactgtgccctgcagattcctcggatgacgcaggccccaatgcactcatacatgccatcgccgatgccaaacctccgagtccgcccatcagaccactaacaacgtgttcatcgacgtgggtcgatatcatcaccagcgataccacgatagacagcaccgggaaaaccagcagaaataccatattcgccacgctaaacagacccgtcccgacacaatcgaatcgacattgctttactacggatttccagctcatcgtcaccattcccttgaagcaaatatgcgagaggcaattacatacgagattccatatgccacaaccgtcgttgtcaataccgcaataaccagccacaatcgttgcgcgatgatggcattcgcggcatgggccaatcctctggtcaccgaagcaggcaaaatagatggcagtatgaatacagccaatacaacgacataaatcaccatcatcgtgactcgaagaccgcctagtttggtccacagataacccgtgggcacgataagcgcgaccatcagcgcggtgcagaaacctcccaacggcgccgcccacagattgcccgcgaatgaccaatccggattgaccagcacttgcaacccgtcaatcagaacaatcatcgctatcgacaatacggaaatcaccaatccaaccacatatcgcgcagccacctgactcttcctcgaagccggaataatgccacgaagtcgatatccgttctgtaagtcagcaaccgccatggttagcacccacatggcgcagatgaataccgtcatgatgacacccatgcgatagccgaagccatcaccataagcttcaccttgaaagatgacggagaacaacggtgccaacaacaacgagaacacagtccgtacgtcgacgcacaggtaggccatatcgacgcgcaatgcagtggtcaatgcatgttgccgagaccgcgacaccctcagtattgcctccatggccgctcacctcccgctcaagtcacgattggaatcatgggcattggtcagtcgaatgatgtcatcaatggaagccgattcaacgacaagccccgaaaccaccgacgcaacagcatcaagcctgtctgaccggaccagcgcatcgaatccggtggcatacgtatgtgagcccagcactacgtccgcaggcagttgtgccagttcgtctggaccgcccttaatcaggcggaacgattcctcaaactcgtctttcggaccggtgtagtagagacggccatcggtgatgtaggtaatgaagtcagcagcacgttcgaggtcggcagtgatatgggtgctgaacagtaccgaatgctcgccatcctcaatgtaggcatgcaggatatccatgagttcgtcgcgggcaagcacatcgagtccgctggtcggctcgtcgagaatcagcagcttggcatcatgactcaatgcgatggccagcatcagcttcatctgcatgccgcgggaaagatccttgatatgtttcttgccgttctgtgcgtcaccaaggccaaaagtatccagatacttgcgatagcatccaccgtcccatgatggatacagtggcgcaacgatacgttcaatgttcttgacttgccacagttcatgcatgtagctgaagtcaaacaccacaccgagttgttctttgacgagctcctcgttggcgatgttgtcgaggccgagcacgtgaatcgacccggcgtcgcggtggatcatgttgaggatgagtttgatgagggtggatttgccggcgccgttcgggccgatcagtcccatgatgtagcccttgggcaggtcgaaggtcacgtcgtccagcgtgaagccggaatcatagtgtttggtgacgtcggtgacctgcaacgccatcgcgtcggattcggatatggcggtcatggccatggtcctttcttgaggttatttcttgcggtattcctcttcgagcatgcggtccaatgcgtccagcggaatgccggcggctttggcgccccggcttgcctcggccaggctttcgcgaatctgggtttcgagctgacgttgcatcagttcgttgcccttgtccatcacgaaagtgcctttgccttggatgttctgcaccacgccctcatcggccagttcgttgtacgccctggtgacggtgagtacggagatgcgcagctccttggcgagtttcctcaaggaaggcagggcctcgcccgccttcaactcgccgctgagcaccgccgaatggatttgggttttgatttgctcgtagatgggttcaccggacacggatgagatgatcagtttcacctatgcccctttcgattgtggttgactagcaccccagctgtttagctgttatacaacacagtataactgttctgcttaactgtcaaggtgtgttacataacagttgaacagtgaacaaacacctcgacaacatacagcgtcgaaacatgggccgtgcctacaatggcctcggaaaggggcacctatgccaaacaacgccgttacgccgacagccccgccagcgggggtgtaacttttttatcacagcacgcgcggagcgtcgtggaagtcgaagaggacgccgtcggctaggtggcagatctcgggccaatcggaggcggaggagtcgtcgtgcatggcccagaccttcatgccgaccgatttggccgacttcatgccgaccagcaggtcttcgaacaccgtgcagtcgaccggcgcggcgcctaggcgcttggcggcgagcagatagacgtcgggctggtccttgccgacgtcgttcgcgtcatcgacggagacgatatcgttgaacagatcgaacatgccgacgtggcgtagcgccggctcacgcagatgcgggggcagcgaggtggcgacacccagtttgacaccggaggctttcagatcgcgcagatagtcaagcgcgccgggtttggcttcgaccgtggtggaataggcgacgctggccatgtcgtcccattcctgcatgagctcttcgggcgtgtctgtaaggccgaagcgtgcgatggtgtattcggcgatctggcggaattgcatggcggagactttggtcatgtagtcgggcggcacttcgattccgcgcttgttcaggaagtcgatgtcgacttggtcccagactcccatggagtctaggagggtgccgtcgaggtcgaatatggcggctttggtcataggacactttccttcaacagttctcgggcgtggtctagggaggcttcggattcgctgccggagagcatgcgggcgatttcgtggacgcgggtttcgccgttgacttcggcgatggtggtgaccacgcccaaatcgtcgtcatcggcatccggcggctccttggtgaccacgaactgcgcgtccgcccacgaggcgacctgcgccaagtgggtgacgacgatgacctgcgcgctgcgggccagccgtgccagacgtttgcccagttcgaccgcggccttgccacccacgccggcgtcaacctcgtcgaagatgaaggtctggtcggcaccgccgcgcgtgtcggcggccaccagttccaaggccagcatcagtcggctcagttcaccgcccgaagcgcttttgcccatcggcaactgcggcgacccctcgaacggcgtaaacaggaacgcgatatcgtcgcgaccatacgggccgagcggatcatcggccttgtctcgcggcgtgacgcgcacttccaaggaggcgcccagcatggcgagcgagccgagttcttcagtgacgcgcgcgcccaagtcggcagcggcagccacgcgcgcggcgctcagcacgtcggcggcggcgagggccgcatcgtacagcgtctgccgttcggattcgagttcggcgaccttttccggcgaggcgtccagatcctccaaatcgaacgccgccttgtcccgccaagcgagcacgtcggccaaggtggggccccaccgacgggtgaggtcgccaagctcgtggatacggccgttgatctggtccagatcctccacgctgccttcgtcgcccagctcctggctcagggcgaacaccacgtcgcccaaatcggcattgatggattcaagccgatcggcctgctctgcgaacgtgccgccgacgcgaatcgcgcgcaacgaggtcaccgcatgattgatgagttccacggccgaagcgccgtcggcggcgtccacatccacctgcgaggcatccagcgcgcccagcgccgaacccacgccttgggcgatgtcggccgcgttttcgatgcgttcgcggcgcgccttcagctcctcatcctcccccggctgcgggtcggttcggttgatgcggtcgatggattcgcgcaggtagtcggcctgttggcgggcagaggattcctgcgagcgcaggcgttccagccgctcatccatggcggccagcgcatcccacgccttgcggtaggcggccagttcggcttcgtctccggccacccggtccagaaactcgcgttgccgtgcggcggccgcgattttcagctgatcggtctggccatgaatggtaaccagttcgccggcgatggcccccagcaccgaacgcggtacggacttgccgccgagcacggcccgcgaacgtccggaagcgcgtacggtgcgggaaaggaacagttcgccgtcttcggggtcgacgcccgcgtcatgggccttggccacggccgcggcagcaccggtgaacccactgtcggcatcgccagaaccggcatcgttggtgtcgccggaatgttcagatgcgacggcatcatccgagagcgcgaaaatcgcctgggcccaagcctcgtccgccccggacgagacgcgcgaggattcggcggccccgccggaaaccagtcggatcgcggagagcagcatggatttgccggcgccggtctcaccggtgatggcggtcatgcctgcggccggcgcaatggtggcttctcgaatcggtcccagattgcggatatcgagttcttcgagcatcaggatcctgccttgccgtcacgttcgcccgacttgtcgggcccggtaccagcgacgccagcgtcaccggcaacggcaacgccaaccgcatacgcggccgccgggaacgtgtgcccgtgatgcagcgactggctcgaggcctcgttgcgcgcgtgctcgcgccaaccgaccacgggcagatcgaacttggagaccagacggttggtgaacggcacgccggagagtcgggcgaggcgcaaggtatcgcgcgattcgcgcaccatgacgcgcgtaccctgcggcagggcgcgctgacggcgtccatcgcagcaaatccagccttcggacatggaatcgtccagaatatcgatggtgaaggtcgagccggagccgatgatcagcggcctggcgaacagggcgtgcgcggccaacggaatcaactgcagggccttgacgttcggccacatgactggaccgcccgcggagaaggcgtaggcggtggaaccggtgggcgtggagacgatgacgccgtccgcgccgaacgagttcatctccacatcgtccacgcggatggacagttcgaccatcttgccccggtcggcgcgttccagtgtgatgtcgttcagcgcccaatcctcaatgggcttggtggcgccgggcagccagacgtccacatgggcgatcatgcgttcgtcgatcgaatagtcgtgggtggcgatccggcggatcgcctcgtcgatctggaagctttcgaattcggccaggaagccgacatgccccatgttcacgccgagaatcggcacctgggtgcagtggacgagttcggcggcgcgcagtatcgtgccgtcgccgcccaggaccacgacgatttcggtgtcgtccgatacgcacggcggctgcacgccgaaatcgggggcctcggtgttgtcgatgatagtgacttcgaaaccggccactcgcagctggctcaccgcctcgcccactacggttccggtctgcctgagcctggtatgcgtcaccaccaccgcgttgcgcttggccatggcatcctcctgtcgattcggtcgcactgctcattattctagccgcagacaccgtcatcagtcgtacaggtgttcgaaaaatgctgcttcgtggcgcgtcgccggcaacgttccacagagtcgattatcgtaaggcttcggcatacaatggcgtacagccgcgcaatcaccgtacgcgtgccgtgcgcagcgcgatggcatgccgtatgaccgtacagcagtatcagttgaggagcttgaggacccatggccaatgacttcgacgaatcctccgccaatgaggaggcctcgaagggcctgtcatggtggtattcagccgatgtacagagccgagacaaaagcgataaaaccgccaagcgcattcgacgtatcagcatcaccgaccgtctgctcaggcacccgggccgtctgtccatggtgtatttcggcgcactgatcatcatcgtcaccggtttgctgctgctgccgatctccacatcggacatcatcttcaccaatttcccggtcgcgttcttcaccgccgtctcggccctgtccacctgcggcattccggtggtgaacaccggcgaatactggtcgatgttcggccaggtcgtcgtcctgttctccatccagttcggcggtctgggcgtcatgaccttcgcctcgatggtggctcttggcgcttcccgcagactcaaggtctcccagcgtatgctcaccgcgaacgagctgggcaccacgaagctttccgaggtcaaaggcgtgctcaccgtggtgctgggcacctccatcatcgccgaggtgctgacctttgtgctgctgctgcccgacctgttccgcgtgaaccatggcaatatggggcgtaccttgtggcaggcgctgttctacgcggtgtcggcctataacaacaccggtttcacgccggatgccactggtctgcatgtgaaccgttggggcgtggggctgccgattctcatcagtgcattcatcggaacgctcggcttccccgtggtgctgaatctggtgcagtgcgcacgccggcggctcagcccgaaacgttggacattgcacaccaaactcactttggtgaccaccgctgtgctggtggccacctcactggcttggttcctgctggtcgagtggagcaataccggcctgttccccgcagatgaccccggcatgaagatgcgccgtgcgatgagcgccgccgtcatgccccgctccgccggtttcgatatttcctgggtgcccgaagtcacgaatgagaccaaggtgttcatgagcatactcatgttcatcggcgcaggttcctcatccaccgctggcggcatccgtgtcaccacgttcgcggtgattctcttgatttgccgcgccgcattcaccggccatcgcgatgtcaccgtgttccgccgccgtatcccccgccgtattcagatgaccgccgtgtccgtgaccacggcctgctttgcgttggttatggtcggtgcgatgatgctgatgttcaccaccggctgcgcgttcgtggacgccgtgttcgaagcctgctcggccttctcgttgggtggttattcggtgggcgtggcaagcgccggcaatccggccagcctgtttattctgtccgccgagatgattgtcggacgacttggcccgttgaccatcgcctactccatcagccgaccgatggctcccgaacctattcgttatccgcaggaaaacattatcgttggctgatcggccattcaatcggcgcccagcaatctgacatagagaggaccatcatcatggcagcaaaaccgagcggcaacaaaagcgtgctggtcatcggactgggccgtttcggcgggtccgtggccgccaccctcgaccagatgggtcaggatgtgctcgcagtggacaagaacccggagcttgtggcccgttggtccgcgcatctgcccaccattcaggccgatatgaccgatgtgctggccatcgagcagatcgacgcctcccagttcgacacggccgtcgtggccatcggcgacagcatcgaggcttcggtgatcatcaccggcaacctgctggacgccggcgtttccgacctgtgggccaagtccgtgtcccaggagcatgcgcgcattctgcagcgcatcggcgcccgccacatcatcaacgcggagaccgatgccggcaagcgcgtgggccatctggtggccggcaattatctggattacatcgaaatcgacgggccgtacaccgtcgtcaaggtccacacgcccctgtacgcggtaggccgcagcatcgaggacgtacaagtacatgacaagtacggcgtgaccgtggtgggcctcaaggccccaggcaaggagttccagtacggctccaaggaactggtcatgcatcgcaacgacgaactcatcctcatgggcaagcaggatcagatcgaccacttcatccaaggctaaccccctaactgcgctcgctataccccctatctgctcacatcgtgaccgatataaccccctcaacatggatgcgctcattattgtggcaataagccataaagctgtacgtccatattaataaggggagttttatcatcatgggcaagcatacgcagaattgcacgctgataggcaaaggagtctacggcaccataggagtggaccaacgttcccgtcttgccgatggcgcgcattttcacaccatgattgtgaccagcaccctcgaggcctcagttatagaaggggacaaactggtcatcaaaagtggcattgtgcggtgtgatggtgatattcgcgtatccagcatcagcggcagcggcgacatcgaagtcggcggcgacattatttgcgatgaaataacctttaccggcaaactacgatgcaacggcgatatcgtttgttccggaaatctgtccgtcaatggctccctaggcacccgtcatattagcggtcagacagtccgcttgaacggcgtgttgaagggtcatgacgtcaacagcagggctctggaagttcatccactccgcagtacgatgttttcccgttttgatatggatgggtatgaggatggcagcacggttcgccatatcacagccgtcacggttgaagccaaccatctgcaatgccggactttgacggcggactccgccatgctacgcaacggcagtgcggtggaaagcgccacgtgtgccaccgcactaggcatcgaccgtacctccagcgtgctgctggtgaacggagactgccaacgcattcatctcaagacagcgtaaagcaggtattcctcattaccgtgggtgccgatgatgggactatcggcagtggccaccacgtcaagtccgtgctgttcagcacaggcgaccacgtcgtgtaatgcccgctcccgcaatgccggatcttcaacgatgccgtttttgccgagtcctgcccggccgacctcgaactgcggtttgaccagtaacacaatctgcgcaccgggagccgcgatgcgcgcgattaccgggatcacataggtcagggaaataaaggagacgtcggaaacgatcatcgccggccggtaaggcaggtcgtcggcctctacttcgcgaatgttgacgccgctcatttcgatgacgtgctcgtcattggcgatgcgcgggtcgagctggccgtgcccaacgtcgagcgctacgactttggccgctcccccgcgcaacagtacgtcggtgaagccaccggtggaggcaccgatatccagacattccaagccttccggcccggtaaggccattgccggcaaaggtttcgaacgcgcccaagagtttgtaagcgcctcgggagacgtagtcgtcgcccttatccacggcgagttcgctgtgcccggctttgaccatgaacgatggcttggtgatggtctcgccgtccacgcgcacatgcccggccttgatgagtcgctgcgctttggcccgcgattcgaccagtcccgaagccacgagcatcatgtcaagtcggtcaagtggagtcgcgggatcgatatgctgctcggtcatatatcttcctttcggcccaccatccaccaacggggtggctcggcatggagccaccatccagcacttcacgtcatcttccgctggcgggagaatgaatcacctctgctagctgcggctgttatcaagctcgtgttgtaaggattccagcacgttgcgataggtctcaagcttgcggtcgttgtcttgttcatcgatatccgcaagttcggggtatcgctcggtgaccggcgcatgttcgctatccgtaggcataggactatgcctcgatggcgaacaccggtaccgtggcctcgctaagctgtgcgccttggtcggcggcttcccatgcggcgcatacggcggcgcgcaggccgtccatactggtggggtcgctgacgtgtacctggccgttttcaaaccaagcgctagccttgcggcattcccaagtaccgctctcatcgcggaccggctccggttgggcttcgccgagttcacgcagatcaggggcgatgaatgtgggcctcaggtgtgacggagccagcatcagttcggtcgggttggtgacaccggtcagcaccgccagcgaatcgtagtcgccgcggttaccggcctcgatatcggtgtcgaggcggtcgccaatggcgatggacgcctccttgggcaccaaatcgtggccttcggcggcgttcagttcgcgggcctcatcgtacatgtacgcttccggcttgccagcggaggcgaccggttcgacgccggtggccgtgatcacggcgcgaatcatcgatccgcaaccgggggcgatgcccagttcacgaggaatcgttaggtcgcggttggtcacgaaatacgtggctccggcctcgaccgcgaacgcggcatcggccatcatctgccaagtcatatccggataccagccctgaatgacggcctgcgggcggtcctgaggaccgtccacgatggtcaggccgttgcgggtgacctcatcgcgcaaatgctcggcgcccaatacctgtacacgcgcgccggcgggcaacgccttggccaccatacgggcggccaccaccgaagaggtgatgacctgccacggctccacgtccaagccgaagcccttgagctggtcggccaccacgtgctggaagcgcgaggagttgttcgtggtgtattcgatggtcatgccggcggcttcggccgcacgaatggaatcggccgcgtattcgaccggattcttgccgcgatacaccacgccgtcgaggtccagcagcgcaagctgataggcctcggcgagcgggcgatcggtgcctttgaggaaacgggtcattacgccgttcactcctcggtttcggtttcgggttcggtggagtcggagtcggcggattcggcggaatcgtcagcctcggcgtcattggcggaatcggtctcggtctcgtcggcctcatcagactcggcatcaccgtcttcagcctcgtcatcctcatcgccgtattcctgctccggatccggggcgtactgcgcctcatccggatcgatgccgagcttttcgagcacgtcggagtcgtcggtgatgtcttcgagatcgtgatcgatcaccacgtcgtcgctgttttcgtcaatctcctcgtcggcatactggtcctcaagacggtccagcaggtcgttgagctgctcggcttccttgctgcggccggcctcttcaaggaagtactgctcggcctgcacggcacgcatgcggtactcacccggcagcccctgggaacggccgacggtgtgaaccacttcaatggccttgtcccacatctccaaatcgccaagggcaccggcgtacaccaggaacatctcgaccttgggagcgccatgcagctgcttgccctcatcggacagcgccagttccacggccttcttcggctctccgacgccacgctcgcagtcagcgatgaacggcaggtagtcgaggaagccgttcatacggtaggcggtgcggaactcacgcagggccagcttgtagtcgccctgacggtaggccacgaacgcaagcgtctcgcgggcgaagtcgatgcgggaggcctgacgggccacccacttggcgtgctccaaggcaagttcggggtcgctctcctccagcgcgaaagcggcgaggatgtgcagaccaatgttctccgcgtgctccttggacaggccgcgcagacgttcgcgctcatccttggacagcatcgaccattccatgcccttgggcatcttgggctcgtcgggacgacggtcggtgtacgggttctgcgaggggaagctcatcgtgccgtcggagttacggcgcgggcgcctcatgtattcagagcgcttctcctcacggtactggcgcttctcttcctgcgaaaactcgcggaattcgccgtcacgacggttgttgtcgcggcgatcgtcacggcggaagtcacgacgatcatcgcggcggtcgtccctgcggaagttgcggcggtcgccatcacggcgatcgtcgtcgcgacggaagttgcgacgctcaccatcgcggcggaaatcacgacgatcgttatccctgcggtcatcgcgacggaagtcacgacggtcattgtcacgacggaagtcacgacggtccccatcgcgacggtcgtccctacggaaatctcggcggtcgtcgttgcggcggaagctgcgacgctcaccatcgcggcggaaatcacgacgatcgttatcacggtgctggtagcgcggattctcgccgttctcgccttcgtgggaacggtagccgccttcgcggcgcgacttgaagccttcgccgtcacggcgcggaccattgccgcggtaaccgcccttgccgccgaagccggagcggccgcccttgtggaagccgccggacttgccgtacgacttgcggtagccgccgtggccctcgccatcaccgtcacggcgcggcgcgtagccctcgccatcctcacggcgacgcggcttgaaaccctcaccatcatgacgcggcttgaaaccgcccttgccgcgcggcttgaaacccttgccgccgcggttgcccggtcggcgatcgccataccccttatggccgccgccgtaagacttgccggaacgctcgttaccttctgccattacttgttttccttaattcgttgttgattaacggttttccacggcgccgagcgccttcttgccacgacggataagcgcgaagcggcctgccaggaagtcggcttcggccagcacctgctcctcatcctcgatacggttgttgttgagatacacgccaccggacttgatggcgcggcgtgcctcggaagcggacttgaacagtccggcagcctgggcggcgtcgattacgcgatcgccgggcttggagacggggaagacgtgctcgccgttctcgtcgaccaccttgaaaccgtcgagcacggattccagcgtttcctcgtcgatgtcttcgaggttgccaccgcggccgaacagcgcaccggaagcatcgatggcagcctgggtagcggcctcgccatgcacgaagctggtgacctcccaggcaagggtcttctgggcctcgcgcctgccggggttggtcttggattcctcgaccagtcgttcgatttcggccttgggcaggaaggtgaacgccttcagcaggctttccatctccacgtccgggcggttgatccagaactggtagaacttgtacgggctgagcatcgtggcgtcgagccagacggcgttgccctcggacttgccgaacttcttgccggaagcatcggtgataatcgggctggtgaacacgttgacgtccacaccgcgcaccttgtggatcaggtccaggccggaggtgaggttgccccactggtcggagccgccgagttccagcgtgcagtggtattcgtcaaacaggtggaggaagtcgttgccctgcagcacctggtagctgaactcggtgaaggagatgccttcctcagagttcaggcggcgggcgaccgtgtccttggcgagcatggtgcccagacggaagttcttgccgacgtcacgcaggaagtcgatgacggtcatcgaggcggtccaatcgtaattggacacgaaacgtacggcgttcgcgccttcggtgtccagaatgccgccgatctgattcttcaggcgatcggcccagccggccaccacgtccttcgggttaagcgtacgttcgccggactggcgcgggtcgccgatgagtccggtggcgccaccgaccaaagcgatcggatgatggcccgcaagctgcaggtgacgcatgttgatgagctgcacgaggttgccgatatgcaacgatgcagcggtgggatcgaagccacaataataggtgatgggctcgccgttcagtgcttctgcgagtcgatcccggtccgtggactgggaaatcaacccgcgccattccagttcctcaagcagggtgttgaaacccgcttccttgaagtcggtgacgtgagccatagcttgtcgcttctccctatcgaattgtgaataagactgcccaattgggcacagtcaagtttcgcagaacatggcgacagtgccgaacaccagccgagccgcgcgattcagtaaaacgccttattctagcggcgcgggcccataagttcgcgcaaagagtcgatgatgtcctgacgatccggcacctggaacttcgggaaggacttgagcatacgcttctgctgtgcgttgatgacgccattgacggcccagcgcagacgctcaaccgtatcctgcgaaagctcacgcatcctgtcggataccgcactggagccccactgccacgtgccaccggcgcgtgccgccacatcctgcaccacctgagagacggaatcgagcacccgctcgaattcgagcatgcccgcaaccgtgaccgccaagtcgatgatggtgatcagggccagtaccgtgaccagcgtatgcagcatcggcagcggaatcatatccgtgacccgctcgacatatggctgcgaaccaagtaccacgcccacgccgccgaggccgaaaatcaacgcgcccagcaggcagacgcggccttggaggttgaagcggaagttcgagtaatcccaccagcgggcgtggaacagctgctccatgacccacgaggttgtgtattcgagtatcgtggcgcccaccatcgaaatcaggaagatgatgatcgggttatgtacgttgccgagaatggcgacgccgagtatcgcgccggtgccgtagatcgggcacagcgggccgttgaggaaccctcggttgaccaagcggtgctgttggcaggagacgagaatggactcgtacatccagccgacgaaactgtagaacagaaaccagaggaaataatgttcgagtgtgatgatcatcgacgggcttcgatctcggcgtaaggcttcgcggcgggcaacgcgcgcttgttgaaccggtcgaacgagaaggtctcggcggtggcggagcatttgtccgccaaggtgaccagatagccttcgatatagcgcggcggcaccggggtcatcgggaacatgtggttctcgatgctgttgcgttcgatatcgttgagcttgaagtccttcagggcattgaccagggcggcgtggccatgggtgaagccatgccactggtgttcgccgttatcccagtcgtgccagtcgtacaggaagtaatcgtgcaggagggccgcgcgaatcagggatttgaggtcgacgcggtaccacaggtgtgcgcggtcggccatccacacagccaggcaggcgacacgcacggaatgttcgaacgtggtgacattgccgtgctggtagcagcagcgttcgatctgcatgtggcgatgctcgatgacctcacggccgtgcttggcgaccaggcgttgaatctgcgttcgggtgagcagatgtcccacgattttcggtccttcccgttttgggttggttcagtgcaatcccctgttgtgaattacgattacccggcgatattcaagaatccatcgagtaataccgtgaccgattgtagggcacaaatatgtccgtgcacactcatccaaaagaacgacaacgggaaccgttaatcgtggtgggtttcaagatagtcgagataaccttgaaaaccgccatcgaggcttgctacatcgtagccgcgatcggcaaggatttcagctacttcctcgctccaccatccttgagcacaatagactacgacagttcgatctgtgggcacggttttgagcacatgggccagagggtcgagtggtgcattgatggcaccttcgaccgggtgggcggcgaagtcggctggttccctcaagtcgagcagcgtgaccgtattcgggtcgagcttggcaaattccgccggcgtgatgcggcggtacgatgcttcactgctctcatcgtcatcgaccgcattatgcaaagcaataggcatgttcttcccctctcgttctgatcttggcacccctcaaggaggggcaccacatagctctaaatcgcgcaggccggctgaatatagttggccggatcaatagcagtaatggtcggctgctcaccgcacaccgggcaatccggcacatgctttggcagtgggacccgtcgaatattcatggtcagggcatccacagtgagcatgcgagccacgagcggctcccccacgccggcaatcagcttgacggcctcagtcgcctccagactgccgatcacgccgaccaccgcgcccagtacgccggcttccttgcaggtcggaatctcaccggcggcgggcaggtcgcggaagatgcagcggtagcaggggccttcgccgggaatgacggtcatcacctgaccggcgaatccgaccacgccggcatggatatacggcttgccggccagcacgcaggcgtcattgatgaggaattttgcggcgaagttgtcggtggcatcgatcaccagatcgtacggttcgatgaggccggcgatgttgctcgcgtcgacgagctcgtagtaggtatcaaccgtcacatccgggttgagcgcgcggatggctgtggccgcggattccactttgggcgctccgacacgtgcagtggtatggatgatttggcgttgcagattgctcatatccaccacatcgccgtccaccagtccgatatggccgacgccggccgccgccagatacagggcggccggagaaccaagaccgcccgctccgatgatgagcacgctggaggccagcaaccgcttttgccctttgacccccacacccttcaaaatcagatggcgcgcgtaccgctccacctgttcatcagtcaatgccatgttttctccatgtttccatctcccctcagtccgctacgcggccagctcccctcagagaggggagctaataaaagtgtcagtgcaaataccccgtagtcgggctggacggcacagcctgtccctcggtcactttgccaaggccagacaaatacgccgcacgaccagcatcgatggcgtgcttgaacgcctcagccatcagcgggatattgccagcagaggcaacggccgtgtacgccatcaccgcatccgcacccatctccatcgcatcgcaggcctggctcggacggccgataccagcgtcgatgatgaccggcacatgcgcgttggcgatgatgatttcgatgaagtcacgcatgcgcaggcccatattggagccgatcaacgaaccgagcggcataacggcagcggcaccggcctcctccagctgacgggccgcaatcgggtccgggaacatgtagggcatgaccacgaagccttccttggccagcatttcggtggctcggatggtttcggcgttgtccggcaagaggtacttggtctcgtgttcgatttcgaccttgacgaagtcggtgtggcacacttcgcgtgccagtcgggcgatacgcacggcttcctcggcgttgcgcgcaccggaggtgttgggcagcagcgtaatgccttcgggaatgtagtcgagcacgctgttctcggtggtctgcgcgcggcgcagtgccatggtgacgatttgcgtgcctgcatgttcgaccgtagccttgatgaggttcaggtcgtagcggccggagcccagaatgaatcgcgactggaactcgtgaccgcccaggttcagcggcttgtcttccaccgggagaatcggcgcggcggtgccgaccggattggtgacggcgggctgcggcggcagcggagtcgcctcaacagatgcttcagtaaccggattaatattgctcatagcttttcctttcatccaccctgtacaaactgcacaatttccatgacgcactggtcgtcgagcatggcgtcggcacgcttatcgcgcgggataatctcaccattgagttcgatggccacacgctcggcgcggaatccgtgcgcttcgagataatcggcgacgctgaccggcgtctcgagcgtgacctgctctccgttgacctgcataatatcctttcagatagtaaaaaagggtgcacgaaacgaaccgtaccttaagtggtgcgcccattcatgaacccaatcatgcgaccgttcgaccgctgtgatgtattggctccatcacgaccgtctcacggctgaattatgcaaacggaatgaaagctgtatcggagaacccggcaaatctgcgacaacgattccttacggcggcatgacccgcgtcaagttccccggtcgaagtctggcgacttcctctcagcctcacggctcccgttcgttacggtttctcagtgtatgccgttgcagtgacaacaacaaaatagagctccctcatcagagggagcttcattgggactagaacgtgccgggggctttgtaggcggagccatccgacgtggatgcggggaagagcttgagttcttcgacctcggccttggcgtcggcgatctgctcgcgcacgcgaccgtaagcggtgccgcccttgccgttgcgggagtcgaccgaaccgtggctggagagcacttcgcgtactcccggagccttgtcggccggcaggaacgcggcgaaggtctcgatgaagtcattgtcggtcagatcccacagttcctggccgcggccttcggcgagcttgacgcaggcaccagagagctcgtgcgcgtggcggaacggcaccccgttcttgacgagccattcggcgatgtcggtggccagtgcgaagccggtcggagcttcctcttccaggcggtcgccgtcgaagtgcatggtcctgaccatgccggtgaaggcgggcagcagcacttcgagcgtatcgacctggtcgaacacggcctccttgtcttcctgcagatcgcgagcgtaggcggtgggcaggcccttcagggtggccagcaggccggtcagatcgccgatgagtcggccggacttgccgcgggcgagctcggcgatatccgggttcttcttctgcggcatgatggaggagccggtggaatagccgtcgtcgagcttgacgaaggcgaactcctgggtgttccagatgatgatctcctcggacaggcgggagatgtccacgccggtcatggcggccacgaacgcgaattcggccacgagatcacgtgcggcggtgccatcgatggagttgtcggtcacgcgggagaagccgagctcacgcgccacggcctccgggtcgaggccgagcgtgttgccggccagtgcgccggagccgtacggggaggcgttgatgcgcttgtcccagtcgatcagtcgctgcacgtcgcgaatcagcggccaagcgtgggccatgagctggtgcgcgagcagcacgggctgggcgtgctgcatgtgggtgcggcccggcatcacggtgcggccggccttttcgctctgctcgatcagggcgttgacgaggtcaagcaggagtccggcgattacgcgggagtgacggcgcaaccacatgcgaatcaggcaggcgatctggtcgttgcgggaacggccggccctgagcttgccgccgagttcatcgccggcaatgtcaatcagaccgcgttcgagggcggtggcctcgtcctcatcgtcttcgatgggggcgaaggagccatcgtcaacgtggcgctggagcgtgtcgagcgcatcctccatgcgctgcagctcgtcggcggtcagaagtcccgcacggccgagagcacgggcgtgggcgcgggaaccggcgatgtcgtcgtcggccaagcgccagtcgaactgcgtggacttggacagtcgggccaattccggcgacggaccagacgtaaagcgaccaccccacagggccagatgttcgttgttctcagtcatgaaggctccttgaaaccatggattgcaaacaaatcagactgcttgtcagactatcagcgttgggctacataccggtggattcaagttgttcgtattccatggcggcaatgtcagggatactggtcacgtcgtattgatgaaaagaaccgcatcgtataccgcattacgggtaacgatgttcaaaacctggaaatagccgtctgccgaactcattacggagagcactgagcttcttccgtcatcggcaaaaaaacgaggggagcacgagcataatctttgctcgtactcccctcagtcatctgcggcgacagcgtcctgtaattacggacagcctgacggctgctgattgttggctcactgtcgttcgcacctcacctgcaaacagcccactgggctgtttgctttacggcgcggcccctcaacgaggggagccaaagtaaatgattactcgacggtgttctccgggacctcgatgccgttgccgaacttgacgtcgcgcgctgcggccacgcgggacggcaggccgtagatgtcgatgaagccgttggaggacttctggtcgaaggtatcgccggaatcataggtggcgagcttgtagtcgtacagcgaggagtcggaacgacggccggtcacgacggcgcgaccgccgtgcaggaccatgcgaatctcaccggacacgtacttctgggtgtcctcgatgaacgcgttgagcgactgagtcgccggggagaaccactgcgcatcgtagaccaactcgccccagcgcttgtcgatgtcgcgcttgatgcggtgctgttcgcgttcgaggcagcagttttcgagttcctggtgagcggtgatcagagccacggcacccggggcctcgtacagctcgcgggacttgatgccgaccaggcggtcctcgatgaggtcgatgcggccgacgccctgggctccggcgcggcggttcatctcttcgatggcctgcagcggagtgacgtcacgtccgtcgatcttgaccggcacgccttccttgaactcgatgacgacttcatcttcgaccggcgggaaggccgggtcgtcggtgtaggagtagcagtccttggtcgggccgttccacggatcctcaaggaagccggtctcaatggcgcggccccacacgttctggtcgatggagtacggggacttctcggtctgggtgatcggcagcttgtgctccttggcgaacgcaatctcgacgtcgcgggtcagggacaggtcgcgaatcgggctgatggccttcagcgtcgggtcgatggaggcgatggagacctcgaaacgaacctggtcgttgcccttgccggtgcaaccgtgggagatggtgtcggcaccgaactggtgggcggcgcgcacgaggtgcttggagatcagcggacgggagatggcggagaccagcgggtagacgccttcgtacatggcgttggccttgagggccttcatgcaatattcgttggcgaactcgtcacgggcgtcgaccacgtaggattcgacggctccgcaggcgagggcgcgctgcttgatggtctcaaggctttcgccgccctggccgacgtcgagggacacggccacgacgtccttgccggtgcgctccttcaggtacgagatggcgacggatgtgtcaagaccgccggagtaggccagaacaatgcgcttgttatctgccattggttccctttcgttcaaggtctgaaaaacgaactgatgcaagtatatacagaagactgtatatttatgcacggcgtgttggttatttggaggcgaggcttagtagccagtcggagcggaagacggcggtgtcgtcattggtgcagatcaccatgacggtgtcgtctccggcgatggtgcccagcacgccttcgatcgactgcttgtcaatcaccgaggccacgtattgtgcggcaccggaaggcgtgtgcaccacgaccagatttctggcggcggccaccgaggtgaccagtccgttcagcacgcgggacatctgtgcctcaccgcgctcccctacatcctcaccttctgaagcaacgacgctgcgacccaccgtgtaggccaccgtgccgtccttcagccgggtcttcaccgcatgcatctcatcaagatcgcggctcagggtcgcctgagtcaccgcaatgccctcgtcgataaggattttggacagctgtgattgcgaggtgatgatatgcgtggcgagcgcctgttctatggcactcagccgcgccgccctgctggcagggcgctgcagggacggaccggtttcactcatgcgagcaggctttcgtctccacgggccttgccggtcaaccaagtcagcaacgctttctgtgcgtgcagacggttctcggcctcgtcccacaccacggactgcgggccgtcgatcacttcagcggtgacttccttgccgcggtaggcgggcaggcagtgctggaagagcgcatccggcttggccaatgccataagttcggtgttgacctggtaatcccagaacggcttggaacggatggcgtattcggcttcctcgcccatggagacccaggtgtcggtgaacacgcagtcggcgtccttcaccgcttccttggcatcggtggtgaccaggatggagccgccggtctcggccgcgatgcgcttggcgtcggccacgatgtccgggcggggcaggtagccgtgggggccggccacgcgcacgtccatgccggccacggcaccgccgagcaggtaggagttggccatgttgttggccgcgtcaccgaggtaggcgatggtctggttcttcaggttgtcgacgccgcctcggtgctcggcgatggtctggaagtcggcgagaatctggcagggatggaagtcatcggtcagggcgttgaccaccggatgggtggagtacttggccatttcttcgacgcggccctggccgaaggtgcgccacaccacgccgtaagccatgcggttgagcacacgagcggtatcggccacgggctcgccacggcccagctgggagccggacttgtcgatgaccagcgggtagccgccaagctcggcaacgccgatggagaagctggaacgggtgcgggtggagggcttgtcgaacagtacggcgacggcctgcggaccggcgaacggctgcttgtagaagcggtcgtggtggaacttgatggcaagttcgagcacctgcttctgttcctcatggttgaggtcgtcgtcacgcagcatgtggcgaagttctggggtcatgatgatctccttggatcggtgggtcggcagtgacagagagaaatcagtcgtcgggcaggtccgtaggcacatccttgaggatggcaagtgcctggtccacgtcttgtgcggttacaatcagcggcggtgcgaaacgcagcgcattgggagccaccgcgttgacgatgagcccgtgttcgaggcagtagttcatcaccgcgtgggagcagggatgcttgagctcgacggcgtccagcaaaccacggccgcgtacggaaacgaacagcggattaccggtggccataatgccatcgcgcagctgttcgccgcgagcttcggcgttggccaccagattctcgtcttcaatcacgtcaagagtggcgagtcccgcagccgcacccagcggattgccggcaaaggtggagccgtgggaaccaggagtgaacagagccgcaagtttctcgccgaaagcgatcatgccgcccatcgggaatccgcctgccacacccttggcgaaagtcaccatatccggcgtcacgccgccggacagatcgtcacgctggaatgcgaaccacttgccggtacgtccgataccggtctgtacttcatcgatgataagcagcgcgtggttgatatcgcacagttcgcgcacgaacttgacgtaatcggcgcccaacggctgcacgccggcttcgccttggataagttccagaatcacagcagccaccggacccttgccatagcgaccgagaccggtctgtgcaaaagcgtcgtgcagggcgaccttgtcgccggcgcgcacgaattcgatgttcggcaccagcggatcatacggcttgcggataccgggtttccacgtggcggacagcgcacccatcgtacggccatggaagccgtgagtcattgcgagaatgcgtgcgggcttgccgccgatggaaggcagggcaccaggcaaggtgcgtccatacagcttggcgagcttgagggcagcttcattgccttcagcaccggagttgccgaagtagactttggagccttcaggtgcaccagccagcttgaccagttttgatgccaattcaatttgcggctcggacgcgaaatagttgctgatatgagccaccttggcagcctgatcggcaaccgccttgacccacttggggtgggcatatccgagggaattgacggcgatgcctgccaggaaatcgaggtattcgttaccgtcaacatcccagatgtgggcaccttggccgtgatccatgacgcgcagcggcgtaccgaacacattcatgtggacctgagagtactctcccagccacttgctgtcttccgtacctagtttttcctcatgctcagtagccataagagctcctcatttccagtccttcatcaggcataaccatggtaccgatgcctgcggaggtgaatatctcgttcaaaatcgaatgcggcttgcgcccatcgatgatatgggcttggggcacgccaccgtcgatggccctgacacaggcctccatcttgggtcgcataccggattccaggtccggcagcatatcgcgcagggtttccacaccgatccggccaatcagagaattcttgtccggccaatcggcgtacagaccatccacatcggtcaagataacgagcttgtgtgcgcccacagcggcagccaaagcggcggcggcggaatcagcgttcacgttgagcacttcagtggcatcttcttcgttcggagccacggaagagacgaccgggatacgaccggcggccaccagatcctcgactgccgaagcatcgacggaaaccacgtcgccgaccaggccgatatcggtgggcttgccatcgatgatgggcctgcgctgcatggccgagaacaggccgccgtcttcaccggacatgcctacggccagcgggccgtgcgcgttgatcaggcctaccagttcgcgtgaaaccttgccggtcagaaccatgcgcaccacatccatggcctcgggggtggtgaccctcaggccgcctttgaattcggatttgatgccgagggccttgagcatgtgggagatctgcggaccgccgccgtgcacgacgatcgggtgcagacccacctgacgcagaaagaccatgtcttcggcgaagcactgcttcagatggtcatcgaccatggcattgccgccgtatttgacgacgatacgctggccggcgaactcctccagccatggcagcgcttcaataagcacttctgccttctgatcggcgcgcaaatcggtgtgcacgtcgaaatggaacccaggtcccttcaattctgtagacaatttttctcttttctgcgacgccggcgacgctatcgctgccggctgctacaaacagcccactgggctgtttgtcagctttcgtagtcggcgttgatgtggacgtattcgtgggtgaggtcgtcggtccagacggtggcctcggcgtccgagccggtgttcaggtcgatgtcgatgtggacttcgcgcggggtcatgtcgacctcgctgcggtcgcggccggcgccgccgttctcgcagatgcgcacgccgttgacgtccacggtcaccttgttcgaatcgtaaggcgcgacttcaggcggcaccgtgcccaaggagctgacgatgcggccccagttcggatcgttgccggagatggcgcacttgagcaggttcgaggcggcgacggcacgaccacaggcaagtgccgcgtcttcgctggtggcaccggtgacggtgatgcgaatgtcgtgggaggcaccttcgccgtcgccgatgatctggcgggacagggagacgcaggcctcacgcaccagcttgttgaattcgtccttgtccggttcgacgccggaggcaccggaggcgagtagcaggaccgtgtcgttggtggacatgcagccgtccacgtcgatgcggttgaacgaatgttcggcggccacggcgagtgcggcctgcatctgaccggcggagacaaccgcatcggtggtgatgacgcacagcatggtggccagctgcggggcaatcatgcccgagcccttgaccatgccgccgatcttccagcctttggagccggtcagttcgaccgtcttcggcttggtgtcggtggtcatgatggcgtgggaggcgtcggtgccggcttcggcggtggcggcaagagcctcatgggcactcttggcaccagccagcacgttgtccaacggcagcagttcaccgatgagaccggtggagcagacagccacatcattcggttcggcgccgatgagcccggcgaccgtttccgcggtggcgacggactgggcgtaaccggcctcgccggtgcaggcgttggcaccgccggagttcagaatcacggccttgacgtgaccgtcggcgacgaccttacggctccactgcaccggggcggcacagaaacggttcgaggtgaacacgcctgcagccgcgtcgagcgggccgttgttgaccacgagggccaagtccttcttgccttcgacggatgaaataccagccgccacgccggcggcggagaaaccttgtgcaaatgtaacgctcacggtgctactccgatcttggtcaggcccgcgtcttccggcaggcctagtgcgatgttcagtgattggaccgcttgtccggcggtaccacggttgaggttgtcgatggcggcaaaagcgtagatgcggccggccttgcggtcggtgacgacctgcaggtgggctgcgttggatccgatgatgttgccggtggcgggcagcgtgccctcgggcagcagcaccatgaagtcctgaccttcataggccttggaccatacggcgcgaatctcctcatcgctcagtgtcttggccttgtccgtcatgcgggcggacacggtggcgaggatacctcgggacatgggggcgagaatcggtgtgaagccgagcgtgaattcgctggcttcggccgcgctcttgccggccgcgtgggcgaagttctgcaggatttcgggaatgtggcggtgcttgccgcccaccgaatacggcagggcggattgcagggcctcggcggcaagcaggttggtgcgcttgagattcttgccggcacccgagtatccgacgaccagatcggccacgatatcctgcgattcaaccagtccttcggcgatgccgggctggagggccagcgtggtggcggtgacgttgcagccaggacctgcgatgcgcttggtgccaggaagcgccgcacgctggcgggtgtaggagccgtccgcagctttgccggtgatgagctcgggcatgccgtaggtccaatgctcatagaaatcgccgccgtagaactcatcccaagcggcctgttcttcgaggcgatggtcggcgcccaaatccacaaccacggcattcggatcgagctgcgaggcgagcttgcccgaagcaccgtgcggcagtgcgaggatgataacgtcatgcccgttcagcacttcgggcgtggtatcttcaacgaccagattggccagttggggaatatgcggcatgtgcttggccatcgactcccccactgaggaatggcctgccacgcaggtgatgtcgaagtcggggtgcgcggccagaatgcgcagcgcttcaccgccggcatagcccgtggcaccggccacggccactgtatatttcgccatactcatctcttttcactgatgtgtcttcggatgagtatacgcgattatgcagactattgcatatttatgcagtgggtgtgttggtatgtgaacgctacttatgcggagatggagtcggaggaggagccggtgccgccggtcagttgctggagggcttcctggtaaaggctcatggcgtcatagccattgaaggccatccagatgacggcgatggtgtacagcacgttgattaccacggcggccacggccaaaccgaagcccttcatatggaaagtgcgcgtgcgccacattgccaccgcgcccatcagtgccgagagcactggcaccgggaagaacagggcgaggataaaggagatgatcgcatacgaatcccagtgcccgtagagtgggttctggtttggatcgttcaggtcgatgccgtggtaataatgcggctggtgaggctgaccgttcggctgttgaccatacggctggccctgcatgcccgggtacccgcccggatatgcgcccggaccggactgttggccgccttgagcgtacggccagccgcccgcctgctgattgccgggccacgccggctgctgaccatacggctggccagcctgctgagattgtgccgcgccaccgttatcgccagcggctgcggcggaatccttcttagtatccggctcgggagcgccataaatatacgggttgtaattcggcccgtattggccagacatagcaccatattcaggctgctggtactgcccgtatttcggcttgtcctgctccgcttggctcatggcgctcctcgattcggatgattggttgggtcaggcgcgcagctgggcgccgatttcggcggcctcagccacgatggccttgcggatggcgtcgctgtcttcggcggacagcgtcttgctcggtgaacggaacaccaccgcataggccagggacttcttgccctcgcccacctgttcgccggtgaacacgtcgaacagttcgatggattcgaggttcgcgccggcggccttgcgaatcacgttctcaagctggcctgcggtcacggtctcgtccacggtgaaggccaaatcctgcttgaccggcgggaacgtggagatcggcttggcctggacgggcttgccggtcagcgtggcgaacagcgcggtgaggttcagctcgaaggccgcggaatgggccgggaagccgagcgcctcgttgacgcgcgggtgcagttcaccaacccagccggtgaagacgtcgcccaccatgacgcgggcggcgcggccggggtgccattggactggcacatcgtcggcggcgggctggtcgagttcgattgcggcaccgatacggccggcgatgcggcgcacggcctcgacggcgtcggaccagtcgaccgggcgcttgccgcccatccagccgtcgtcctcggccagaccggtcaggatgccggccacatggtcgggctgttcgggcagaccggcgtcaagcgcggcgagctgttcgtcggtggggcgcacgccgccgggcagtgccgggatggcgggcgcgttcggatcccacaggtagacgtggccgagctcgtacagggacacgttttcgatgccgcggcggatgttgcgctgcacggtggtggccagggtcggcagaatctcgcgacgcaggtacggacggtcgccgtagagcgggttggcgatctcgacgctgaccttcttggtggcttccgggtcgaagccgaaggccttgtaatcgtcgtcacccacgaacgggtagctcagcgattcgaccatgccgaactcggcgagctcgtccgccacgcgacggcgacgctgctggtccggggtcaggcccaccagaccctcgaccggtgccggcggcacggtgatcggaatctggtcgtagccgaccagtcgggcgatctcctcgaccaggtcgcacggctcgttcaagtccggacgccagctcggcgcggttacggcgaactcaccgttgccgccaccggccaccgtgcagccaatgtcggtcaggatgtcggagatgcggttgatgtccacgtcgaggccggctacgcgggccacttcggaggccttgaagtggatggccttggcgcgcggcgtgttgttcacgtcgttcgggtgttcgctgggctcgccgttgccgtacttggccatgagttcggcggccatctgggtggcggcaggctgcagcgcggtgtcgacgccacgttcgaagcggcgggaggcctcggatggaatcttgtggcgacgggccgaacgggcgatggtcacctgatcgaagtgcgcggcctccagaagaatgttcttggtgtcggcggtcacttcgccatacaggccgcccatcacaccggcaaggccgaggatgcgcgagccgcgttcgccgttcggcgaatcggtgataagcagatcttcgacgctcaggtcatgttccttgccgtccagggtggtgagtttctcaccctcgttggcgcggcgcacgacaatcgggccttcgagcttgtcgaggtcgtaggcgtgcatcggctggccgaggtcaagcatcacgtagttggtcacgtccacggccaaggagatggagcgcatgccggcgcggatcaggcggcggcgcatccagttgggcgtgtgggcgttgggattgaagtccttgacgatacgcgcgtagtagcggtcgcaaccgggcacgccgtgaatcggattgttatcgtcgatttcaacatcgatgtccaccggggtgccgggctggtagtcagcaggttccggggccttctcgttgagtgccacggccggatcggtgtaggcggcaccggtggagtggtggtattcgcgggccacgccacggtaggacagcgtgtagccacggtccggggtgatgttgatctcaagcagaggctggtcgaggtgcagcaggtgcatggcgtcctgaccaggcttcagagcctcgtattcagcctcggagaagccatactgacgcagcaggatgatgccattgtggttgtcgcccagacccagctcacgttcggaggcacacatgccgttggagatgtggccgtaggtcttgcgcggttcgatcttgaagtcgccgggcagcacggcaccgggcagggtgacgacgaccttttcgccggccttcatgttgggcgcgccgcagatgatgccgcgcggcaccttgttgccgtcttcgtcggtctcgttccattcgtcgccgcagtccacgtggcaccagttgatggtcttgccgttcttctgcggttcgggggtggcgtcgaccacgtagccgaccacaatcgggccggtcacctgagaggagtgaatctcctcttcctcaagacccaccttgacaaggtccttggcgagctgttcgtaggtcaggccttcgggaacctcgacatggtccttgagccaatcgatatcgatcataggcatggctgaatcactcccccatcacaaactgttcggcgaaacgcacgtcaccttcgaccaggtcgtgcatgtcgttgatgtcgctgcgcagcaggagcgtgcgctccatgccgacgccgaaggcgaaaccggtgtagacgtccgggtcgatgccggcggacttcagcacgttcgggttcaccatgccgcagccgccccactcgagccagccggggccgcccttcttgtcggggaaccacaggtcgagttcggcgctcggctcagtgaacgggaagtagctcgggcgcaggcgcgtcttggcttcagggccgaacatggcgacggcgagcttgtccagcacgcccttcaggtcggccatggtcaggtgcttgtcgacggcgagggcttcgcactggtggaacaccggagtatgggtggcgtccagctcatcggtgcggaacacgcggcccggggacgcgatgtacagcggcactccacgggtcaggagggcacggacctgatcggaggaggtctgcgtacgcaccaccatgttggagccgacgaaaccggcggcgtccttggcttgattgcccttgacgtagaaggtgtcctgcatctggcgggccggatggtccgggccgaaattcagggagtcgaagttgtaccattcggcttcgatttccgggccggaggagatctgccagcccatggagatgaagaagtcctcgacgtcctccatcagcttaggcagcgggtgacgggcgcccagaggcttacggctcaccggcagcgtcatatccacggtttcggcggcaagcgcggccttctcggcggcttccttgagctcgacctccttgggaccataggcgcggccgaagtcggcgcgcagcttgcccatgagcttgccggcttccttcttctggtcggcgggcagggagccaatggccttgctggccttggtcatcgccgaatcggcacctgcgtacgttgtcttgatggccttgagctcctccaggttggaggcgttctggattttctcgatgccctcggcaacctcagcggtcacctggtcggcgtcgaacaccatttgttctgccacgagaaccctttcgtctgatgttttctcagcgtttcacagcgtttttaccggtttcacattctttcaacatgacccgacatagacagcgacatcagcatcaccgcggccgaggtgccgaggttcagcgattcggccttgccataaagcgggatggagacgatgcggccgcagcgcgtgaggatgtccggttccaagccacgcgcctcattgccgaacagcacggctttcggagcctcgaccgccgccttgtccgccagtactgcgggcaggctttccggcttgcgttcttcggtgccgtatacgtcggcggcccagacgtccatattatggtcgcctgtccaggtgaagaattcgtcggtgctcatggcgagtaccggcagatggaacagggagcctgcggtggagcggatgaccttggggttcagcacgtccacgcagtcgtccacgaagattacggcgtcgcagccggccgcatcggccgcacggatcacggtgccggcgttgcccgggtcgcgcacctgccagaaggcggcaatctgcggggcccgaccgttcttgccaagttcgacgtcatcggctccggcgtgcatggactcggcattgccgacggccgcgatgccttgggcgtccggactgatgcggcgcatcacgtcgccggtgcagtagtgcacataaatcgtggcatcctgcgaggtttcgacgatcttctccaacgtggaggagatgatacgcggatgttccagcgcctgcgaaacctctacatacaggtcctgcaccacgtccggccgccaagtgacggcctcgcgcacggattgcgggccttcgataagaaaacggcccgaacgttcgcggcctttggcgcgggtcagatcggcgatgcggcgcacgcggtcggatttcggattatcaagaatctgggcgttgatgggcatagccactaccctactgccgggtcattacgtcagtcgcgagactgagggtggtcgaggctggaaccaccccagtcggctacgccgacagcccccgccagcgggggcatcataaggcgttcagacaccttgaaaggcactgtgctaatctgtcgcctttcagacaccctgaaaggcactgtgccagtctgccgcctttcagacaccctgaaaggcgaagtgccaattcccggtgccgacggctacgcctatggaggccagcgggacggccagacagatgacgtagaagatccagtcgataggcttcagacgcgagatgcgggcttgggaacgtggggcgccggagccgaagccgcgcgcttccatggcggtggcaagtttggtggcacgccggatggagagcaccagcagtccgaacgcttgggagagggcacgggcgatggcgttaccgtcaccaaggccgcgcgaacgctgggacaagccaagtgcgcgccaatcttcctgcagcagcgtaaacatgcgcaatccagccaacccgccgtatacgaatcgcggtgagaagtgcagaatctcaaccaaaccgtccgccaaatcagtgggatcgaggcccagggccagaatcacgccgggtacggcaatggccgccaccctgatagccgtggcgatggccagattaacggatccctcgctgatcacaatccagccgccctgccacaggatctcgcccgaggtgcggccgtagagaaacacggagataaaactgccggcggcggcgatccataccggccaggtcttacggcatacggtccacggagccacgccaccaatccacagcagcacgaattcgatgccgagcgccgtggacgcggataccacatccagactgatgaacatcggaacgcacagcaacagcgcaccgatgatgcggctgaccgcgttgatgcgcgcgatgaaccatgagggcgatgaggctttgaccggctccacgcgcgtttcctgcggactgacggttaccacgtcactcatgccttcgcctcctcgaacatcacacgtcgtgcgcccagcgcatccaccagcgcctcatcgtgcgtcaccatgaccacgcacgagccttgatcgcggatggcggcgatcagcttgaccatctcattccacgtactgaaatcctgtccgaatgtcggctcatccatcaccaacactttgggtgcggcggccagcatggaagccacggacagtcgccgcttctccccgccagacaaggtatacgggttggctttggcgaagcgcgtgagattcatctgctcaagcatgcggtcggcggtccgataagcctcgtcttggctctgccccatcgacttggggccgatggcgacttcgtcacgcacgaaattggcagcgaactggtgttcgggctcctggaacaccatgccgatacggcccagcagttccttgcttttccagtcaatcggctcacgcccggcatgcgcgggcttgaggttgtcggcgatgagcaccttgccggcgataggctcgagcagcccggccaaggtcaaggccaaggtcgatttgcccgcgccgttcggacccatcagagccgttacttcgccgggatagaaatccagattgataccaacgccaagagcggtcccacggccaaagcttaagttctcggtgctgagcaccggcgcatcgtgcgcagactcctgcttcggtgagtaatcgggaatcgcacggcccggcacccacgcgccaccggcggccaacacgtcgcccatctcggcgaacacctcgtccggcttgccgtcggcaatgaccgcacccgtgggcgaacttgcatcgggtcggccgagcacaatcacgcgatcgaccagatcgagccatacatcgatatgatgttcgaccacaaccatggtctgtccggtggcctcgatgacctttttgaccgcgtcatgcacttcgaccacgccttcgggatcgaggttggcggtcggttcgtccaacaacagcagaccgggcttcatagccagcacgccggccaacgcgagacgttgacgctgaccgccggacagatggcgggtggaccgatccagttcgagtccgccgagtcccaccatatccaatgattcgcgcactcgctgccaaatctcctcgcgcggcacgttgaggttttcgcagccgaaggccgcgtcatcgcccagtcgttcaagaatgatctgcgagtccgggtcctgaagcaccagtcccacgcgacctcgcgcctcgcgcgcatcgacgccatcgatggtgagcgagccctcctgctcgccttcctcatcgccgccaagtacgcctgcgagaccggccatcatcgtgcttttgcccgcgcccgaagcaccgagcagcaacacacgttcacctggccggatggtgaaatcgacggcacgcaacgcgaagtccttacgcgtggcgtgccgccatccccagccgctggcctctaccgcagccggattaatctgcatcagacgcgcgccttgctgcggccggattcaaaacgctccagagcaccggtgacggcgagcgcacgagacaagtaccagaccaccacgccggcgatcacgacgccggagatgatggagcccaccagataccaagtgacgcgcaggccgttccagcccgggttggtggcccagtagtaggcccagcagcccacgccggcgagcgcaccggacaggatggtggtgccgatgttccacttcttccaagcgaagacggcgaaggcaatttcggcacccagaccctggatgatgccgacgatcagcgagccgccgacgccccactggttgcccagcgtaagctcaaggaaggcggcgagggtttcggcaaacagtgcggcaccgggcttgcgcacaatgattgcagcgagcgggccggcgaacagccagaatccgttgagcagaccctcgaaaccgggggtcacgccttcaaacagggccagcggggcggagcagacaatgtcccagccccagaaaatgacgccggatgcgacggcgatgattgcggcgacgacgatatcgacgacgcgccacttgtaattggctttggccacagcttcagtcatgaatgtgcctttcttctgctcgcacgcaggccgaacatacatggatatatgtacgcacataatgcacatgttcgtgtccacgcgcgggttggttcaggcacgggtgggtaagagcgacatttccgtgcgccggcattatccggtcacgttccatcggtcgagactatgagtctcctctcagccgcccaacggcagctcccgtgtcaactcccgactataaagcaagccgccgtcaaaggcaatagccacatctgtgacctacctgacggcggctcactaccattaccgatgcggttcggctacttgccgagcttgtccagcagcaaagcctcggtgatcacgttgttcttgaggccgggcagggagatggactcattggggctgtgggcgttggccttcgggtcttcgggaccggtgaccagcacctgagcgttggggaaaatgcgctgcagttcggggatgaacggaatggagccgccttcgcccttgttgatgggctcaacgccgaaggcctcggtcatggcttccagcgcgtccttggtggccacggcggtcggatccatggcccagcccatgccgttttcgccgcgttcgacagtgaccttggcaccgaacggcgcgtgggattcgaggaatgcagccagtgcttcctgcgcttcttcagggcgctgggtgggcgcggtgcgcagcgacagacggaagcgggtctccggggcgatcacgttgaaggatccctcgaccgggtgggcgtcgaagccgatcacggtcacggacggcttagtccacaggcgtgaggccagcgagccggtgccggcgaactcgtaaccggccaccacgccagaatcctcgcgcacggtggtttcgtcaaggtcgtgctgcaaaccgccgatcggctcttccgcggtcacgccgggtacggccagatcgccgttctcgtcatacatggaagcgatgagcatggcggccaacgtattggagtcgagaatcgggccgccgtactggccggagtgcaccggatgctcaaggccctgcacggtcacgtccacacaggtgttgccgcgcagcgaggtggtcaaagaaggaatgtccgccgaccagttgccggaatcggccacgataatcacgtcagcggcgaattcgtcgcggtgagcctcgatgaagggaatgaagcttggcgagcccatctcctcttcgccttcgatgaacactttgatattgacgttgaggtcgtcgcccagggccttcagcgcaccggagtggatggcgatgccgccgccgtcatcggcggagccacggccgtaaagacggccgtcgatttcggtggccacgaacgggtcggtgttccactcggccgggtccggaacaggctgcacatcgtgatgggcgtagagcagcacggtgggggcgtccggagaaacgatatgcgagccgatgacctcccatgcgcccggagtgccgtcggcattggaagcctggaccaccttggcatccacacccacgaggcgcagttcgtctgccacgaattcagcggagcgcttcatatgttcggcggtgatgcccttggcggagatcgactgcagcgcgaccttttcggccagcaccttgacgatgcggttccaatcggtttcgacgcgcgaacgaatctcgtcagcggtgagcgttgtcatgatgatcctcctttatatatgtgcgtatatatgtgcgtgagcggcgtcattgcaatgactgcgccagtgtacaagtgtctgaacgtcaccgtaacctcaaagcatgacatggaatccgtttaagaaaaaagaagaggcccaagttcccgttgagcaggccccgaagaaggccgccaatccttctgagaaaaaaggccgtcctaccccgaagatgaagcaggctcaggccgccggtatccgtccgctggttccggtggaccgcaaggccagcgccaaggccgccaaagcccgtctgcgtgagaaggagaacgccgagtacgaggcgatgcagaatggcgatatcaaccacatgcccaaggcggaacgcctgccttggcgtatctacatccgtgattatgtggatgcccgtttcaaccttggcgaatggttcatcccggtggccttcgcgattctgatcgtctccatgttcgtcacttctttgatgcagaaccagtgggcttccatcatcatgatggcgcttatgtacggttacctgattgccgtgatcatcgacgtatggctgatgtggcgcaagctcaaggccaagctcatcgccaagtacggcgaacagtccgtgtccaagggctcccgctccttctcctacgcttggagccgttcgattcagatgcgtcgttggaggcttcccaagccgcgttacccgaagcgcggtcactggccggcggactgattgtccatatatactctggctcccctcgttgaggggctgagccgtaaagaaaacagtccagtggaccgtttttaggcgaagtggcggcgatagccgcatatggctccctagcgtgggagccatacttatatgtatcaaggaggcaatcatgagcgaacagtttgatctggtcatcatcggggccggccccggcggctattccacagccctgcgcgccgccgaactcggcatgaaagtggcactcgtcgagcgtgacgccaccgtaggcggcacatgtctcaaccgtggctgcatcccctccaaggcgctcatcaccgccacccacaccatcgacaccgtgcaccgtgcggccgaactcggcgtcaacgcctcggtgaatggcatcgacttcggcacgctgcgcgactatcgcctgcgcgtggtcaagacgatggtgggaggactggccggactgcttgcccatcgcggcatcaccgtgttccgagccaatgccacgttccatgcggatgagaccgctccagcaacttccaaccacatcgtccacctcgttccctcccccgaccaaagcgacatcctcacctatcacaaggccgatgtccccgagcccagcggccccacgatggacctcacggccacgaacatcgtcatcgccaccggtgccaagccacgcccattgcccggcaacccgttcgccggcgccctcatcgactccacacaggcgctggaagtcaacgaatttccctcgtcggcggtgattatcggcgccggggccatcgcccttgaattcgcctcgatgtggaacgccgccggttcgaaggtgaccctactgattcgcaaggaccgcgtgctctcagcctgggaccggagagccggcaccacgctgacccgtgagctcaaacgtcatggcgtgaacatcatcacccgcgccagcgtcacccatgtggacaccggcgcgaaccttggtgccaccgtgcactacacgcgcgaaggccaggacggcgaacaaagcgtctggggcgaaatcgcccttgtcgccatcgggcgtgacccgatcaccgacccagcatggggcgtgacgattgacgaccacggacatgtcgccacggatgcgtacggccgcaccgacaaaccgggcgtatgggcggtgggcgatgtgacggccggtcacgcgctggcgcatcgtgcttttgagcaaggcatcgtcatcgcggagaccatcgccggactcaatcccaagccggtggacgaagccaccgtgccgcaaatcgtgttctccttccccgaagcggcgtcggtcgggctcaccgtcgaacaggcgcaggcgagagaggatctcattgaaatcaaggagaccaactatccgatgctggcgaacgcgcgcatgctgatgagcggcacggccggttcactgaccatcgtctccggctgcgacgcggccaacccggacaccccgcgcgtgctcggcgtgcacatggtctcccagatggcctccgacatcatcgccgaagccgaacagctggtcggcaaccatgtgccgctcgccgacgcagcccgcctcgttcacccgcatcccacgttcagtgaaacgctcggcgaggcgctgctcaaggccgacggacggccgttacacacacgctgagaccaaccagcacaaacaagttcggaccagcgcacctgataagatgttgtctagtgtgtttcgtcccaacaaaggaagaagtgatggcggaaaaggacgcgaagccgaagaagcagagcacaatcaagcagatcatccagatctacaagtacacggctaaggaagacaaggccctgccgtggcttgaggccggtgctttcctgctgcctgtagtcgtgatgatcatcatcggtctgattgccaagtggacctggctgacctggatcttcaccatgatcaccgccatcatgctcggcatgctactggccaccatgatgctcacccgccgcgcggatgcagtcggctacaagcagattgacggcaagcctggtgccgccatcggcgtgctgagcaacatgcagaaagccggctttaacttcccgcaggaaccggtgtggatcgacccgaagaccaaggatgccatctggcgcggcacttcgatgaacggcatctacctgatcggcgaaggcgaatacggtcgcatcatgaaggcgatggatcgtcaggaacacgatatcaagggcgtcaccgccggctcctccattccggtgtaccgcatctccgtgggccacggccccaagcaggtgccactggacaagctgcgtagcacggtgaccaagtccaagagctatgagcccacgaaccacaagaacgcactgatcgccaagattcatccgcgtcgtcgcttcctgctgaccaaggccgagatggaaacgctgaacgatcgtctgcgcacgctgcaggccaagaagggttatgccatccccaagggcatggacccgaaccacccgcagaagatctcccgccgcgcgatgcgcggtcgctgatcggcagcacaccaccaaatcgcacagaagccccggaatccgttcaatcggttccggggcttcgtcatatgtctcataatcgcgtccacatacatccacctacgtcacctgtcaatatccactgtccacgttgcggacacctctacccactcccccgatagcctccgtttccattctgtaatgatgtttcgttgaaataacgcgcctgcgcgattgtcggccacagtcacgaaacattctcgtaacccaagtttcgagccggcgaaacgctcgattttacgatagataccgttatatttcatacgaaaggagcggtcccgtgaccgaactcaagtccaaggaagacgccgaggcccttatcaacaaggaaggcatcgagtatgtctccgtccgtttcaccgatcttatcggcgttcagcagcacttcaccgtgccggctagcgaattcctgaaggacgctttcaccgacggcatgccgttcgatggttcctccgttcagggcttccaagccatcaacgagtccgacatgaagctggtcccggacgttgagaccgctttcattgacccgttccgcaagcacaagacccttgacgtggccttctccatcgtcgacccgctgaccgacgagccgtactcccgcgacccgcgtcaggttgctggcaaggccgaggcctacctgaagtccaccggtatcgccgacaccgcctccttcgctcctgaggccgagttcttcatcttcgacaaggtccgcttcgagaacggcatgaaccgctccttctacgaggtcgactccatcgaagctccgtggaactccggtgttgacgttgaggaagacggcaccccgaacatcggtttcaagaaccgcgtcaagaagggctacttcccggttccgccgattgaccacactcaggacctgcgcgacgatatggtcgccaacctgcagaaggtcggcctgattctcgagcgttcccaccacgaggtggccggcgctggtcagcaggagatcaactaccgcttcaacaccctgcagcacgcaggcgatgacctgatgaagtacaagtacgtcgtccacgagaccgccgctctggccggcaaggctgcgaccttcatgccgaagccgatcgctggcgacaacggcactggtatgcactgccaccagtccctgtggaaggacggcaagccgctgttctacgacgagaagggctacgctggcctgtccgatctggctcgctggtacatcggcggtctgatcaagcactcctcctccgtgctggccttcaccaacccgtccctgaactcctaccaccgtctggttccgggcttcgaggctccggtcaacctggtgtactccgctcgtaaccgttctgccgccatccgtattccgctggccggcacctccccggctgccaagcgcatcgagttccgcgctccggatccgtcctgcaacccgttcctggccttctccgctcagctgatggctggcctggacggcatcctgaaccacatcgagcctccggagccggtcgacaaggacctctacgagctgccgccggaagagcacgccggcatcaagcaggtgccgagctccctggctgaggctatggacgccctggaagaggaccacgacttcctcaccgccggcgacgtgttcaccgacgacctgatcgagacctggattggcctcaagcgcgacgagatcgaccaggctcgcctgtctccgaccccgctcgagtacgagctctacttccacatctgagtttgagagcttagcaacgttggagttccgccattgctcttctcttgtgggagtctaatgtgagtcattcagcgtaactagaaagaacctcgtgaaattcgttttcacgaggttctttttttgtgtgttgtgttgtgtgttatgcgatgtgtgttgctcctggaatattccagctgcgggccgctacttagtctcccaacgctccttgagtacataggcggcggctttgggctgacggtcgcgagtgaagacgcttcttattgccgtcgacgcgcatgatgccttcaccggtttggaagtcgcagaggttccatacctgctcgcccactactgcctcgaacatgtcgaacacttcgtgctgcatggcgaggtactcacattggtactcttcactccattgcacgctcggcagcttgtgcacaccggcatcggtgtccgcaccgtattcggtgaacaggaacggcttgttggattcggttttcatccattggttcatctcgtcgatgaaggtcttcttggctccgatgagctgatacccatcttgcacataccagccgtaataccggttcaggcagatgacatccgcgaactgatggcacttgtctttgcctccggcggccatcagcagattggtgtaggtcagcgggcgatgctgcggatcgagcgtgcgcgcgtaatcgaatatctccttgaaatacggcacggccgcctcggattggagtcgttggcggcgtcgatgaaattccaagcgccggaggccccggcattcttttcgtcgaaggggacaattcagaacacaactgccgacacaatcgtcagggaggccagcgagaacagcgtgcttacgagcacgaagccgaccgcatactcgggcatgttgttcttgcgaccggtgaacatggcgatggtggtcatggtcggcagtccggcgatgaccgtgatcatcagcaccatgtcatgggtgatcggcagttgcggcaatgcgccggtcagcgcggtcagtagcgcgtagaaggcgagcgggaatgcgatcatcttggcgactaggccagcatagagttcgtagcgtttgaggacgccccaccacttggtcagcgcgaacaggccgcccaagtagattagcgacatcggcgtggccatattgccgatggtgtgcagcggcttcaggatgatgtccggcaccttgacgccgagcagaatcagaatcagggcgagcatcacgccgacgaaggcgggattgacgaatcgtttaagcaggccgaggacgcgggtgcctggcgaggggcggacgatggccggagaaccaccgtttgcggcattgctcgccgaaccagcattgcccaccgaaccggcgccgttcaccgaaccgttcacgaccgcacctcgcgcgccaatcgcgttgccgccagtcgtttcgtcgaccggctcgcacagccatacgccgtacgtccagagcagcgtttggtcgatgatcgacatcagcgccacgtaaatcgcgccgttctgcggccaaagtgccataatcaacggaatgccgatgaatccggcgttgccgaaaataagcgacgcctgaaatacatggctacgcgaacctttgagccgcaacagttcggcgaccagccagaacaccaggatgagcagcgcgtacatcacggcggtcagcagcatcacgccccagttagaggcaagctgcgcgcggtccgcaccatcgacggcgttcgaaaacacaagcacggggatgagcacgttgagcagcaacgagcacatgccgtccaacgccgtctgaccgtagaatcgaagcctcacacatccatacccgaccatcagcatgatcagaaatccgactaactggccaatcatgacgccgaactgccccatgcacactcctctcgctcgcgttcccgtgcttttctgtcactggttcatataggcagccatctggacaggctcggcagcacacgcatcagtatgttcgataccaccacatgccaatccacttctcgttcaaccgttccccgtgctaatgcgccgccggccaccccgtgttgccggtgctgcgcgagcaccattacacgtattgcattccggtgatcagcgggcgcaacgtgtgggtcggcgcgaacgtgtcgattctgccgggagtgaccatcggcgacaattgcgtgattggcgccggttcggtcgtgacacattccatccccgccaactccgtcacctacggcgcgccctgcgaggtcgtgcgtgaaatcggcgacaaggaccgcgagtatttctacaaaaatcgcaagctcgacgtgtgggagtgagctttcgcgctactgctctttgagcttaaaacgctcactgaattggcggtcgcgccagtagtagacgtcgtcgcgttcgttgatttcgcgaattaccttgcacgggctgccataggcgaccgtgttggcggggatgtccttggtgaccagcgagttggcgccaatgaccgcgttgtccccgatggtgcccccgggcagcacggtgacattcgcgccgatccagacgttctcgccgatgtggactggcaacgaatactgggcaccctgatagcgcaggtccggacgcacgggatggccggtggctacaagcgtgacgttggggccgatcatggtgtgggatccgatgaagatctcaccatcgtccaccagcgtcaggttgaagttggcgtaacagcgctcgccccaataagtattgcagccccagttcgcatacaccgggcattcgaggtacagaccctcccccgccgcgccgaagaacgcctgcatgagttcggtacggcgcttcgggttggtcagcggcgtggcgttgagttcgagctggagatcacgctgggcggcctgcagatcaaaaaagccgtccacatcatccggcaggtagacctcgccagagaacataagcgccattttctcgcgcgtcgcatcatcgataatcggcttggcgatcggcttgtcttcggtcatcattggctcctgttcggcgttttggcgattgtgtcggtcgaactattctgtcacagactcgttttcgacacccagcatcgagcgcagccggtcaagttcggcggcaatctcggcgtcatgcacggcgatgatgccacggcgataggggtcgtcgatctgctcggtggagagcggattgccggcgtcacaggcatcaccgtcaaggctggcgccaccgtgcaggtcatcgaccgcaacccggacaaggccgcagcagcagcggctgaaggcgtcaccaatcagaccccatggaccagcggttttaaggttgtcaagtaagcggcatatcgcagcgaatcattctcaataagaaaagtgtgaggcaaacgcacaatatcactcaatcgcgtattcgcgggaatagcatcaaacagccatttcttggattcagatgtgcgattggcaccgtgcgggcctcacacttttcttattgagaacgattcgccgtgcagtcaagccctccatccacccaaaaaggactcgcttttggccgcgtcgtcgcggtaggccttgccgaactcgtcaataagcccatggaattcctgcaaatccttgacgctgaggctcgcatccagcaccacgggcgaataggccttgtggaatgccagatagccggttggcacatcaaatccaaggaaggcgaatagtcggcgagcataagtatcggccacgaatgtgcggcgcgaaaacacatatagcatcaggtcgtcggccgtttcgcccccgataccgaataatccgagcaattcggtccgcaattcggcgtcgggaatatctgccgcgccctcaggcgaggctccgcaacgctccacataccatcggctcagtgactgtaccgtcttggatttgttgacataaaagccggacgggcgaataagttcctgcagatgcgctggccccataatcgccagcttatggggttcgagcacaccctccgcgttcaacgccgcaagcgaacgattcacattgccccacgccgtattctgcgtcagcaccgcgcccaccataatctcgaatgtggtttcagccggccaccatccggtcgggccaagggcggcagccatggtgcggtacagcgattcgatatacgcgggagaaggaacgcccggcacccgctttgcacttcgattattcatagttgccatctaccattcaccgcaattcatgcaggattcgccgcatgaacgggatagtgactaggaatgtcagcacgtcggacaccgattgcgccatttccacgccgagcacgccgaacatcatcggcagaatcagtacgatcggtgccaaaaacagaccttgtcggcacagggccaggaatgaggcgatgccggtgcggcccatggtctgggtcatcatattgcccatcatgttgaagccgttgagaatcaccgtgcagcattggatgtgcagcgcggccacgcccaccgccaccacggccgggtcggagcggaagatctcgaccagttgcggtgcgaacacccacagcaacaccgccaacaccacgagcacgcaggtggcgagccgcacgcagaaccagtacccttctttgacgcgcgcgaacaggccggcaccgtagttgtagccgcacaccggttggaaaccttggccgaggccgacgatcaccgagttggcgcccaacataatgcgcatcacaatggccatgccggcgatggccgcatcgccgaacggattggcggcaatgttcacgcaggtcacggaaatcgaaccggcgccttggcggatcagcgagggcaggccaccgccggccacttcgcgcatgagcagcacatccggcctgcaattgcgcagggacagtttcatcacgccgaatttgcggctcattgtggtcagaatcgtgaagctcaccgtctggcagatggcggtggccaggccggcaccaaaaattccgaggtgcagcacgaagataaacaacggcgcgagcaggaaattcagcaatgcgcccgaaaccagcccgatcatgccgaacgtcgattgcccttggtatcgcagcagtccgttgagtgcgaacgaaccgcatacacagggtgcggcgaccaacaacggcgtcaggtattgcacggcgtatggggcgattgtcgaggtcgatcccagcatgacgaccagcggccgcagggtcagcaatccgattgtggcaatcaccaaaccagagagcaccgcacccgcgaagcccacggccagtagtcgggaggcgcgctcattgttctgtttgccgagttcgcggctcatcgagttgcccgcgccgttgccaaagaagaagccgagcgcctgcatcacggtcatgatggagaacgcgatgccgatggcaccggactgcgcggtgccgagctgaccaataaagaacgtgtccgtgagattgtaggcggttgtcaccaagttggagatgacggccggcaaacacagtttgagaatcagcggcttgaccggctgcccggtcatctgccgatatttcgcgtccgcgcttgcgcgtctaatgccatgaatctgcaccatggacggctatcctactcgcgcagggtcctatgcaaaggcgcgttaccgccatacgagtcagcgcagataccgcccggtgatgctgttcggattggccgcgatttgttccggcgttccggtggcgacgatgcgtccgccgctttcgccaccgcccggacccatgtcgatgatccagtccgcattggcgatcacgtcaaggtcatgttcgatgaccacgactgttgcgccgctcgccacgagccggtcgaacacgcccagcagcacgcgcacgtcgaacgggtgcagaccgatggtcggctcatcgaacacgaataccgcgtccgattgggccttgcccatttcactggcgagtttcagccgctgggcttcgccgcccgaaagcgccggcgtcggttcgccgagcgtcaagtagccgaggcccaagtcgtgcagggtggtcagacgtgcgtgaaccttcttgaggtcgccggtcacggacagcgcctggtccacgctcattgccatgagttgaggcaggctcagggaaatgttgccgccaccctgatccgtcgcctcactcaatttttccttggcagctttgcgtttatccgggaccttcatcttcgccgctttgcccttagccgctttaaccgcacgccgaatcgcgtcggcttcggacgcatagcgggagcctccacaatccgggcattcgatggtcacgtccggcaggaactgcacatcgagcgagattgaaccggtgccgtcgcatgtggggcaacgcagtcggccggtgttgtatgagaaatcgccagccttccagccgcccgccttggcgccgtccgtgcgggcgaaggcgcggcgcaattcgtcgtgaatatcggcataggtggccacggtggagcgtacgtttgcgccaatcggcgtggcgtcgatgagattcgcacgatggatgccctcggcctcaagttcacgcacatgttccggcaaccgctcccccgccgcctgcgctttgagcgcgggaatcagcgattcgagcaccatcgtggttttaccggagccggagacgcctgtcaccgccacgagccggccgcgcggaatatcaacgtccagcggcttgaccgtatgcaactggctggttgtcatgcggatgcggccaaggtcgaacacctgcggttccgccacgcgctcacggatgcgcgcgctcacattatcggccaagaacggcgcaatacgactacttggattcgccgccacctcgccgaccgtcccttgcgcgatcacatgccctccttcggcgccggcaaccggtcccatttcgataagatggtcggcggccttgagcacgcgcacgtcatggtccacgaccaccacggaattgccgtccgccaccaagtcatgcatcacgccgagcagcccatccacgttcgaggggtgcaggccaatggacggctcgtcgagcacatacagcacgccggtggtgcggttgcgcacggcacgggcgagctgcacacgctggcgttcaccggttgaaagcgtggcaccggcgcggtcaagcgccagatagccgaggcccagatccaacagtcggcgggccacgtccaggaatgattcgcagatgttggtggccatcggccgcatgtcggcggacagagattccggcacgccgcgcacccaatccaccgccgcatccaaggtcatcgcgctggcttcggccaggttcagcccgcgcacatgcggggcccgggctgcggcgctcagtcgtgtgccgccacagtcggcgcatggtccctccttgagaaatcgagccacgcgcttcagacctttctcgtccttggctttggcgagcgcgttctccaccgtgtatacggcgttgaagtaggtgaaatcgagttcggcgaaatcgtcgcctttcttcggcttgtaaagaatatgctttttgacggccggcccgttgaatacgatgtcgcgttcttcgggtgtgagttcgttgaacggcacgttggtgcgcacgcccatcgcgccgcacacctgtttcatgaggtcccacatgagcgaaccccatggcagcaccgcgccgtcgtcgatgcttttcgactcgtccgggaccagggccgcgcggtttacttcgcgcacgatgccggtgccggagcaggtcgggcaggcgccggccgagttgaaagcgagcgattcggcgccgggcgcgtggaattccttgccgcagccagcacaggtgatgggcagtccggccgccacgttcagcgtcgactcgttgcgcgccccgcaatgcgggcacacgtgcgaggcgacgcgggagaacaggagtcgcaggctgttgagcaattcggtcatcgtgccgaacgtcgaacggatgccaggcaccgtgggccgctggtgcagggccagcgcggccggcacgtgcagcacttcgtccacctgggcgcgactggcctgggtcaggcggcgtcgcgtgtacgtggacagcgcctccaagtagcgccgcgaaccttccgcatacagcacgccgagcgccagcgagctctttcccgaaccggagacgccggccacgcccaccagttcgcccagcggaatgtcgatgtcgatgttcttcaggttatgcacgcgcgccccgcgcacttcgatcgcctgcggccgttgatcgtcgctcatgctcggcaccgctccgccgccgcgctatctgacctctgttcaagtgtcacgccgtcacctctttctcgacttcgcccttggctgccgccgcctgagcttcatggtctccagtatcatcacggccaacgacggcggccgaacgacggacgagaatctttcgtcttgggcaccgtccgccacctgcaattcgaactagctgaaccagcgtgacgatattgtcggctatcgatctgccgtgatcgtaatggacatcgtcgtccggaagcacgtcacctgttccgagaggagtcggcggcgcgctttcataagggcacacaatcccaagatcacacccacagatcaataccgatcaatactcgtacgtgatcgcggggtcgccgatggtcggcgtctgatccagtttgaggttggccgagccggccgcggtggtcacgtcgtattcgatggtcaccgtgtcctgaggcgccagggagatgtcgtccatgtaggtcatatggtccttggcctgcacctgtgcgaaggaactgccgttcgacgccgacacgttgctgacctcgcctccggccggcgtgtagatgaccacgcggttcaccgccacgcctcccttggcgttcgccgtgatgtattccggcagggatccggcctcgcccggctgcagggtgttggtgaacgaatacgtaacgtggtaggtgttgtcgccggtcctcttcaccgtcgacttgcgctggatgtaccagtccatcttcgaggcctgcatctcgttggagtagacgccggtcaccgggttcttcgcgtcgttggtgatctcgccggtgacgccggcgctgcgcagcaccgcctgatcctcctcgtggaacgaccagaagtacaggtgccgctgctcggccatccggagcatcgtcttggcgacggtcatgagcttctgcgtgttcatgtcgctgaacaggtgggcgaccgcctgggcggcggtctcgctgaagtactggtcctgagcggagggcgtcagttccttgtaggcgccgttgagcaggaattcggcggtgttcgacccgttgagcacgcgcccgtcggacagagtcacgtcgccggtggcgccgatcatcgcctgcagcgcgacggggtcgagcgacatcacgccgtcggacgatccgccgaacggagccgcctgccagaacttctgggccatggacgcgacgcgcgggaagtccggcgtggacgaaagattatgaatgacttgaccgaagtacagtccgctgtacagcgtgccgtcaccgtcctggttgacgtcatccaacgcggcgttggaggggaactcggcatccgcgtggaactcccccaccgcgatcttgccgttgtccgcgctgaaggaaccggccgaaccgatcaggccgccggttccgcggatctcggaattcgtctgggcaagcagcacgtagttgcgggcgccgttcgcaccgaggaagttcggcagcatgttgagcatgccgctcaggttttcggtcacctgcgccagggcggccatctgcgtcttgccgttctgcagcgcgttgttcaccacgccgagtttggcgtcgggaagatcctggatcgtcctggcctgtgattgcacggactggtcgaccgtggcaagctgctgcgccgcagcgatgatcggctccatgttgagctgcccatcgccactggagaggctggcaccggtcagtgtggtgacgaccttgcccagctggggcagcgtggtctgcgcgaagtcatcgatggtaccgatggcggtgcgcgccgtcttcacgtcaccgccgaccacgggcatcttctccgccagcgtccacagaccgccgctgacatcctgcttggcggcggccgcctccttctggatgtagctcacgtcggacagcgccttgaccatgtcgtcggtggaaccgtccttgatgaccttggccgcgttaacgacattgttgaggtgcgctttggcgctcatcgccgacttgtacagtttgaatccgctgaagccggccgccgcggcgcacacgaccagcaacagcagtacgacgagcagcgcgttgcgaacgcgatgggttgtcctggtgaccgtgcgtgcgtgtgatggcatgggctacttccttacgttatgacatgtatcgatactggctagctgcccggttacgctttcgctggacgggtagcccggcggacggcacgtagcagtgcacgacgtgcacatcgcgtatgatgccgggggttgtcagcgcggctgactggggtggccgcggaccggtacctggacttgcagctgccctccggcgatgcgtgtcacctgcagcggggaacgtccgctgcagttacggctattaccggccagccgacagcaatcgctggtttagttgttggtcttttccggctggtcacccgttcccatgagctggcatgcacctttcagcgagtatctctcctaccgcatgccagtctacccatgcccgcgggataacccaaaaagccttgcaagaataccgaatttctttacctttggccctgatcgttcgacggctctcaagacggcgtaacctcatccaaccggccgatccccggaggcggaaccagcggaatcctcgtgaccgggaatgcgatcgttcccgcttgcgcgatggcggatgcgcgcaacgccaacgacgcatcgacaagccactgtatggcactctcaaaatccttgccacgtccaccagctcacaccacgccgtatacgaacttcttgttctctttcgccaactgggaaggaattgaatcccatacctgattgagacgaagcgtggtgacggcgggactatcacgcatatcaacatgtttggagaaatcgtcacgataatcggagaccagactattctgcaatttacgaaccgccgtgaagtcaggattcggcagagtactggcgaacgcttcaacgatctccggcatgcctcctgtatacatgaaataccgcagccaagtcatgaccctgtcatgcattacgttaattagcggagaatccttggactcaagcatttcggccaaggcatactgtttgcacgcatacaggaattcaacaaaagacataggatacagcttgagtctactgaccttgccaaccgggaatgaaaacccaggatgcatggcgatgccaagcgccgatccagtggccaagacgtcatactccggggcagcttcattgaacatcttcagcgaagtcatcgccctcggcacctcctgtacctcatcgaaaatgacgagcgtatcctcgggagtgatcctagttccggactcgatcgacagtgcgggaatcagccgttccacactcagatccgcatcaaacaacatacgcatgttggcattgtcgaaaaatgcgacacaacagcaatacgtaaggtacttgacaatctttgatggagtcgtatactcatatctgtcaggtacttgacataattactgaagaggatgaaaaagacacacgaccagcgacgcttcgctcgcttccttattaaaggagaccggcatgaacatcacacatgacatgagcaacgacctcaccgaatacgacccggaatcccgtcaagtagacggaccgaaccccatcgaaaaccgcatcagctcctccgcggcccgtgttcccgacatcatcagctgcacttccggcatcaccgtccagggccgccaactccactcgttcgcgttcaccacggacgcggccatcatccgcaacaccaatgccgacgccattctcgccgtatatccgttcaccggcgaaccagtcatcacccaggccctactcaccgcggcccaggccccgctgttcgtcggcgtgggcggtggcaccaccaccggcccgcgcgtcatccaactcgccatgatggccgagatgcagggtgcggcgggcgtggtgctcaacgcgccggcgccgccctccacggtgtacgacgtggcgcgcatcacgaacaccccggtcatcgccacggtcctgacctgcgatgacgaattggacgagaaaatcgaggccggcgcctccatcatcaacgtggcggccggccgcaggacgcctgacgtggtccagcagatcaggcagcgtcacccctccatcccgctgctcgccagcggcggttcgaccgacgagtccatggccgaaaccatcgtggccggcgcgaacgcgctgacctggaccccgccgaacgcgcaggagatgcagcgctcgatgatgatgcgctatcgcggcgaatccaccggcgacaacatgcagcactgacgtaaggattccgaacatgagcagcaccagcaacaacgccgccgtaaccggaaacgacgcggtcgacgacgtaatggccacgagtcaatcggcggagaacggcacaagccacgacaccgccgacggcgatatcaagaacgatgttctcagcagtttcatcagcattggccgtatcatggcgtatcgcgcgatacacagacggctcgtctcccccggcgccaaatcgccgcgcggcgaacatgctttcgacccacgccgtggccaaggccgcgtcttggccacgctcagggaatccgaccagaccagccagaaggacttggccgcgatgttcggcatgagccgccaggccatggccgaactgttgaagaaactggaggccagcggtcacatcagccgccgtccatccaggcgggacagccgcgtcatgatggtcagcctcaccaaccagggccgcaaggccgccgatctgctgggcaaagcgcccgaccagacctcctccatgctggactgtctcaatgaaaccgagctacaaaccctacacggctacctgcagcgcatcatcgacacctcctccgacgacctaccggcctcgaccgccgaggatgtcaaaaagtgtgagctgcttatcgaacacctcaagcgcaggcgaatgccgaccgaccgcgcatagtttgcgaacagcccgcacgacttgtggccgcataagcatgcggccacacaacagtccagccgcacagtcatccagccgcccctacaaacacacccgattcaccatttgcacgacatcttgcaccaaaccctactttgaaatgcggtattttgcaccaaaaccccattttgaaatgcggcattctgcacatacaaggcagaaaatgctactcccataagggatattgattttcatcgacgaggtgcaagaggcaccggatgtaatgaccacgtcaagtttgatgtaccggcgtcgcaattcggcgatttgacgtttcaccacatctcgctgattgcgaaaaacagcaagtcgtgattcgagcgtggcatcaccttgcttagtcatatcaacaaaatccttgatctctgcgagactcatgcccgtggatttcagacattcaatgagatcaagcaattcaagatcgccgtcatcgaagcatctccgtccgaaaccagttcaagcgataccgggcaaaagaccttggccgtcatagtagcgcaacgtatgttcggacagcccagtctttcgcgacacctgaccgatggaatatcccatgccaactcctttccctgcagtcgagccagtgtgagtccagccacattcacggatgtcctatgcggaacggacactcttcgactgcctgaaccttgcagcccaaacatgcatcaatcagcacaaatcacagacagtgggccatatacaacggcagcttgatgcgttctccatccacttcgagttggcggggatgcagaacgtattccttgcccaatcgtcgggcataccttttgcggaatttgtcgagcgaagacacaccgtatcgtttcgtggatttcacttcgatcgggctgatgcgaggcttcatcgcggcattatcgtattcccgaacgatgaggaagtctatttccatggttttcgaggcatccgccctatccaagcgcgagaagaaatacagtttgcgcccattcgcccggaattgctgagccaccgcattctccaccagcatcccttcgttgagcgagagtttatcgaacagaatatcccggtacacatcatccggcgttgtctctcgatcggcaaacgcctgcgacaccagcaaaccggtatccgccatatagcatttgaatgaatcgttatcttcgtacaatcccagccccaccaaagggtcagtcgaattacggcacaggttcaccaagcgggcgtcctccaaccagaagaacgccgaatcgtattcacgagatcgagcccccttatcgaccgatgccagagtgaatcgtttctcatgcttggacagctgccctggaatctgagcgaaaatgccccgcacgcggccggcatcgccattggcgaacttgccgatatcatcactgtacagctgcaggatgccacgcttgatcaaatccacctcgccaaaatcgcgctgctcgacataatcggcaaccgcctgcggcataccgcccaccagcagatattcgcgccacagcctcatcgctcgtttgtgcagcgcatcgggcaacgggaccagacgctcgaacgatttgcgaatcgtttcagcaagcagctcctcccccatggcccagcagaactcctcaaaatcgagcggccccatgtccattttccgttcctcggaggggatgacgatattcgccacattcctcttgatggagatcagcgaaccagtttccacatagtcataccggccatccgcaaccagatatttgatgagctccctcgccgccggataccgctgcacctcgtcgaaaataatcaacgattcacgctcgtacagtcgcttgcggtaatacgcagacaacagcatgaaaaatgtgtcaaagtcatcacgctggttttcgaagatgtcgcgaacatcgcgcggcaaacgtgtgaaatcgatgagaatatatgacttgtactgagtgcggccgaattcctcgacaatggtgcttttgcccacacggcgagcgccttcgatgagaagagcctcacgcccacccgctttttgtttccatgcgatcagcttatccagcatcttgcgcttcaacatgagcaatcacctcattacacgaaaacaacagtataggcatatgctattctacacgaaaacagaagtatagagatggccgattctacacgaaaacaacggtatggaaacatgcaccgaaccggctcacccccaatctctcccccatcacaccggcggcctgttcgattgtgcggttttgtgcgaatggctcacacggttcttagtgagaaccgttctctgcgcacctgaccctagaaccggatcagcgccttgatgaccttgcgctggtccatcgcctcgtaggcgtcctggatatggtcgaggtcgtactcggcggtgaacacgcggccggggttgatctcgcccttgagcaccgcgtccagcagaccctcatcaaggtcatagtggcgcacgggagccgggccgcccttgatgccgatgttgccgtagaacgtgccttcggcgctgatctccacgtcgtgcggcaggcccacacgaccaatcacgccaccgcggcgaatcaggccaatcgccgtgtcgaaggactgcttggagcccacgcattcgagaactgcgtccgcaccatagccgccggtcatctccagcaccttgtcaatagcctcttggccacgctcgggcacgatatcagtcgcaccgaattcgcgggcgagcgccgcgcgatcctcgtgacggctcatggcaataacgcgcgtggcaccgcgcatcttggcggcaatcacaccgcacaggccaactgcgccatcgcccatgaccacggcggtgtcaccgggcttgacctcggcagaaaccgccgcgtgataaccggtggacatcacatcggaaatggtcagcagcgatgcgagctgctcatcggaataatcttccggtgaaccgggcaccttgaccacggtgccgtccgcctcgggcacacgcaggtattcggcctgacaggcggagaagtagccgccgtgcgggcacacggattcgaagccggccttgcataccgggcacttgccgcagctgtatgggaatggcacaaccacgaaatcgccgggcttgacggattcgaccgccgcgccaacctcttcgaccacaccgatggactcgtgacccacctggctgtgtgcggcctgtccgctcagcccacggaagaaccacaaatcagagccgcacacgcacgtgcgcaccacgcggatcacgatgtcatcatcctgttcaagcatcgccttcggcacttcttccacggtcatcttgccaggctccacgaaaatcgcagctttcatggtttcagacatacgttcataactccttgttttccggcatcgagcgcttaaggcccgttatcctcgtgttctattaaacaataatcgccttgcattaaccaatagccataaaccatgtttcgccatacccatgaggtatggcaacaaccgagcaattcactgcgataggccaatatccgagatacgctcactgttcgattcgtcgccatgagtaatctggagaaccggcgatggaacccgcctgaactcgtttcgaaccgcacactgctgatagttcctacacacgatttgatattgcatggaatcgttgtgtcttcagcaggattcagcggtttcaggaaaggctattatggattcgcaatccccatccgcaggtgcccggccgattacgcacacgaccactcccccggcgcgcaagctccccgatattcatcttgatattgtgttggtcgtcttctgcggcggtgcgatcggcaccgctatccgctatgcgttcgcacagattcccgcggctggcagcttccataccggcacgtttgtggccaacatgctggcttgcttctgctatgcagggttgaccgcttacttggccggcgcttcccggttcggcgcacgttccaaagaacttgccagtcgcggactcggcatgggcgtatgcggtggtttgtctacgatgtcgacactcgcgctggaaggttttaccgcaatccgcgacggtcaggtggcggccggcattgcctatctactggtgacgttcgcgctgggtctggtttgtgcgtctgccggcgtgtgggcaggaacgcatctggccggctcctcgaacgcatccgccgaagcgtccgctgatacgaatgccgctacgaccagcaagggaggtaaggcgtgatgaccgtattcctaccaatcttggtctgcctgtgcggcggcgtaggcgcctcctgccgctatctgcttgacgcgaccatcaaaacgtattggcaacgcgcattcccgctgtccacattcaccatcaatctcatcgccggattcctgaccggtctggttgcggcgctggcactgggcgggacacttgatgaaccgtggcggctggtgctggccaccggtttcctcggcggattctccacgttctcgaccgcgatcaacgaaatggtgacgctcttccacaaacgccgctaccccacggcaacggcctatctggtgctgtcgctgggtgtgccggtcgttgctgcggcctgcggttttctcgtctgaccgccacgacgattcccgacgcggtcagcggtatcattgcgaggtcgaacgtcacaggtacatccgggaggtatatgggcatggcgaacaatggagcggatgtgaagcacaatcagggcgcggacgtcacgaatgcctcggccacaacgaacactgcggaaaataccgtgggcacggcaaccccgaagcaaaatggactcgccgtgttgggcaagtatgcgggtgtttccgccacgcagaccattgtggagtatgcgacgttcgccatcctgcacttgatcggcgtgccctcacagatcgccaacggtatcgccgtggtgtgttcggcgacctacaacttcgtgatgaaccgcaacgtgacgttcaaatcgtcaagcaacttcgcccgttccgtgatgcttttcgtgctgctgtggatctggaacttcacgttcagcacgctgctgatcggctggatgccgggcgcgacggacctgagcccgtatgtggtgaagttcattgcgatggcctgccagttcggctggggttatccgttgtgcaagtacgtgatttttaggtgacacattccaatcgctcactgtcgttcgccttcgcctatttgtatttggagcgcttatcagaagaacagcaccgcgacgcctgccgcgaagcacatgagcagaatcgaggtcaggaagctggcgagcatcggcttcttacccttggaagcgatggccttgaagttcacgttgatgccgagcgcggccatggccatgccgagcacgatgtacgcaaagtccacgagctgcggggtgatggaggcgatgagcggcacgaaggtgccgatgatcgaagcgccgatgaagccgagcatgaaccacgggaaggccacagtcttcttgccggtgttctccacctcggagtgcttcttctcccaccagatagcgatgatgatggccgcgaacacgagcatgagcacgcgggaaagcttcatgatggtggcgatgtccaccgcgccgaaagcgtcgccggcggcgaccgcgtgggcgatttcgtgcagggaagcaccggcggtgatgcccagctggtccttggtcatgccggccagcgggccgagcgcgatctccagcaacgcgaacacagtacccataatggctacgatggccacggccatggtcacgtcgttgtccttctcgtcctgcttgtcctcaggcaccttgatggaaccggctaggcccatgacggcggccgcaccgcagatgccggtgccaccggcggtcaggatggcgagcatcgggtcgacaccgagcttgcgggcgatggcatagcacacgatgatggtcagcgtgacgaccacagctgcgatcggcagacacttgatgccctgcgtgaacagcacggcgaggttgagcttgaaaccgagcaggatgatgccgaggcgcagcagcttgttggaaatcaggccagcggcgtccttgacgcctgccttgcggccatcattggaaccgacgtaggcactgcggatcgggaactggatgatcataccgatgagcagcgcgatgataagcgcgccgaaaaggctgaatccggggaactgcttgagccaggaggcgaacagcgaggccagcagagtcagaacgccaatgaacaacatgtcaacggtggtaatgcgcttccaccattttgtacagaactctctcacggtgtctattgaagctcaagcatttacatcggtcaaatcattgcaaccaatacatatcatcgattttgtcgatacctaattgatctccctctgatgagggaggtggccgccgcaggcggacggagagagagaaacaacgttcgcgacctcccctcagtcgactatctgactacccgcgcagcgcagcaataatcatctccgccaactcccgctgatcgtgcgtcagaccggatctcggcaccagcgcatagaaccgccgcacaaactcatcgccaagctcccgctgcaccggcacgcccgccggcacggcggcttccgaaatcaacgactgcccgaacccggcggacagcgccgccacaatcgccgcattactggacacttccatcgtgcgtgcaggcacaacctgagcggtcttgaaatacaaatccgtgtaataccgcacgccggaaccgtgctcgcgcaccatccacacgccgtcgggctcccccgccaacaccagccggtcctcgcacagggtgacgcggtccaccgaatcgttcacgatcggcttttccaccacgccgagctgcacggccttcatgctgacccgttcgagaatcgcatccgagttcatcacgtgtacagcgaagtcgaaaccgtccatgtcccgagccatcaccggcaacgccttcggcagcagaatcgccgcggtcgtgtgcgagaacgacacggccagcggctcacgcgcctcctgcacgcgggcgatctgctcacgcgtatcccgccataatccgtcgatgccgatggcagtctggtacagcatccgcccggcctgtgtgggcgtcacgtcacttttcgcattgcgcacgaacagcggcgcgccgaccatctgctccaattgggcgatacgcgacgacaccgtcgactgcgataccttcagctcatcggcggccagcgtgaactgacccacctcgtatacggcgaccagggtttcgagcagagggaacatggtttaactgtacgctgtatgatgcacgaatatttcaattagcttgggcgtagccctaggccacggacctggaccaccctcagtctcgcttcgcgagccagctcccgccagcggaagcccaatggctttcacatcactatgcctcgcgcagttttgcgagctgcgccttggccttgtggagtttggcatagatctcgttgcgctgggccgggttcttgacgcgctgatggtcacgagtgagcttgtccacttcggattcgagccgagcaatttcagtatggcgaatgatgcgcgcatccagattctcgacctccggcgtacccaaaatggtctgtgagcacagcgatgcccacagaccatcaatagtagagccggccagctccagctgggcctcccccgccggctgccagtcgccggcatatacctgatagatcggcgtgtgcccggcacgccccggtatggcgcggcgcacggcgaacgcgcattcctcacgcgtgctgccctcgaacggcacgtcgcgtacgcacacgaacacgatgcccgatttgcgctgtccggcgatcaggtcgatgacttcgttcggtatgccggtggctttggccgtaagcttcagtccgatgaccagcacttccgggatcagtttgccgtccgcaagccccgtgttggccgaccgggccaacgccagcatggtgatggattcgatctcgttcaccaatcgctgcttgagtttgccggaaatcggcgctttgcctacgaacaaggctttcggcagtgtgcctttggcttcgggaatcgccgtggaaacgggcagtcccagcgaaattgcggatacagaaccacagtgagcggcctgtgcaccagtcatcatcgaccttctttcccggcctgccatcagtgtcatatcctcgcagtgcagcagtccgtttatctattgaaaagcaacactagcgcatccaggccggaagtcgtggtacatatccatatcctgctgcggttatagaaaatcccctccgagtttcctcgaaggggatttcctataacgctagttcaagcgaagattcttgtctgatgaaaatcaggcgaggatcttggtcacacgaccggagccgacggtgtggccaccttcacgcacagcgaaggtcaggccttcctccatagcgatgggctgaatcagctcaacggtgaaggtagcgtggtcgcccggctgaaccatctcgacgccttccggcagctcgatgacgccggtgacgtcggtggtgcggaagtagaactgcggacggtagttggagaagaacggcgagtgacggccgccttcgtccttggtcagcacgtagacttcgccctcgaacttggtgtgcggggtgacggagcccggcttggccacaacctggccacgctcgacatcgtcacggccgagaccacgcagaagcagaccggtgttgtcgccagcctcgcaggcgtccatggtcttgtggaaggtctcgatggaggtgacggtggtctgctgggtcggacggataccaacgatctcgaccggggtgttgacggccagctggccacgctcgacacgaccggtgacaacggtaccacggccggagatggtgaagacgtcctcgatcggcatcaggaacggcttgtccaggtcgtgaaccggggtcgggatgtagtcgtcgacagcgtccatgaggtccttaacggactggacccacttctcgtggtccggagcgtcgtcgtgcagagcaccgtaagcggaggtgtggatgaccgggcagtcacggtcgaagccgttctcgtcgaggaggtcgcggacctcttcttcgacgagctcgatgagctcttcatcgtcgaccatgtcgcacttgttcagggcgacgaggatcttcggaacgccaacctgacgggcgagcagcacgtgctcgcgagtctgggccatcgggccgtcggtggcggccacaacgaggatagcgccatccatctgggcagcaccggtaatcatgttcttcacgaagtcggcgtggcccgggcagtcgacgtgagcgtagtgacgcttctcggtctggtactcgatgtgggcgatgttgatggtgataccgcgggcggcctcttccggagcggaatcgatctggttgaagtcgtactccgggttgacatccgggaactcctcgtgcagcaccttggagatggcggcagtcagggtagtcttaccgtggtcgacgtggccgatggtaccgatgttaacgtgcggcttagtacgctcgtacttttcctttgccattacttttgtcctcctggacgtctcgtgagtttcctgcaccctttcgcacaggaactcgcttattctactgggtttctgggttatgtgccactttgaagagccagaacccagtcagcggtatacgatattaccgctgactgaagacactggctacttcatgcagtggcgcgtgtcactcgccgcgctgggccttgatgatctcctcggagacgctcttcggcacctcgtcgtaggagtccatctccatggtgaacatggcacgaccctgggtcttggaacgcaggtcgccgatgtagccgaacatctcggacagcgggaccttggcgtcgatgaccttgacgccgacaccgtcggtcatggactggatgttgccacggcgctggttcagatcgccgatgacttcgcccatgtactcttccggcgtacggacttcgaccttcatgatcggttcgagaatgaccggcttggccttcggggcagcttccttgaagcacatggaacctgcgagcttgaaggccatttcggaggaatcgaccgggtgcatctggccgtcagtgacggtggccttgacgcccacgaccgggaagccggcgagaacaccggactccatggcctccttgacaccggcctcgatggggccgatgaattcggcggagatgtggccgccggtgaccttattctcgaactcgaaggtcttgccctcggtggtgtcgagcggctcgaagttcatcaggacctttgcgaactggccggaaccaccggtctgcttcttgtgggtgtagccctggtccatgacggccttgcggatggtctcgcggtaggcgacctgcggcttgccctggttgcactcaaccttgaactcgcggcgcatacggtcgacgatgatgtcgagctggagctcgcccatgccggcgatcagggtctggccggactcttcgtcggtcgtgacctggaaggtcggatcctcttcggccagcttggacagggcgatgcccatcttctcctggtcggccttggtcttcggttcgacggccacctggatcacaggatccgggaaggtcatggagtcgagggtgatcggatcgtcgatggcgcacagggtgtcaccggtggtcacgttcttcaggcccacgaaggtgtagatgttaccggcgtcagcgcggtccatcgggttttccttatcggcgtgcatctggaagatcttgccgatacgttccttcttctcgcgggtggagtcgagcacggagtcgcccggcacaacggagccggagtagacgcgcacgaacacgagcttgccgtagaacgggtgggtggagatcttgaagaccagagccgcgaacggatcggacttgaccgggtgacggtcgatctcgacggactcatcgccaggcttgtagcccttgatggccggcacgtcttcaggagacggcaggtaatcgacaacgccgtccagcatcggctgaacgcccttgtccttgaaggcggaaccgcagaagatcgggaaggcttccttggcgatggtgagcttacgcacgccagcgcggatgtcttccttggacaggtcgccgtcctcgaagaacttgttcatgaggtcgtcgtcggcttcggcagcggcttccacgagcttctcgtggtactcctgagccttgtccttgaggtcgtccgggatttcagtggtgtcgtacttggcgccgagctcctcggtgccgttccacacgtaagcctgcatctcaaccaggtcgacaacgccagtgaagtcgttctcggaaccaatcggcagctgcatcacgatcggagtagcacccagcttctccttgatggtgtcgacggagtagtagaagttcgcgcccagcttgtccatcttgttgatgaagcagatacgcggaacgccgtacttgtcagcctgacgccacacggtttcggactgcggctccacgccttccttgccgtcgaacacggcaacggcaccatcgagcacacgcagggagcgctccacctcggccgtgaagtccacgtggccaggggtatcgatgatgttgatctggaacttgtccttggtgtcgtgggactgacggctccagaagcaggtggtagcagcggactggatggtgataccacgttcctgctcctgcgccatgaagtccatggtggaggcgccgtcgtgggtctcgccgatcttgtagttcttaccggtgtagaacagaatacgctcggtagtggtggtcttgccggcatcaatgtgggccatgatgccgatattgcggacgtcgtggaggtccgaaatctcttcagccatctttttccttagttttactcagggcgagtgattaccagcggtaatgagcgaaggccttgttagcctctgccatcttatgagtatcctcgcggcgcttgacagaagcaccgaggccgttggaggcatccaggatctcattggcgagacgctcagccatggtcttctcacgacgggcgcgggagaagtcggtcagccagcgcagcgacagggtgttggcgcggttcggcttgacctcgaccggcacctggtaggtggcgccaccgacacggcgggagcgaacctcgagggacggacggatgttgtccagggcgcgcttgagcacagccaccggctcctggtcggacttctccttgaccatatcgagcgcggagtagacgatgtcttcggcgatcgacttcttgccgtcaagcagaatcttgttgatgagctgcgccaccacggtggaaccgtagatcggatcgggcagcacgacgtgcttcttggaaggtcccttacgtgacatatctcttacttcgccttctttgctccatacagggaacgaccctgcttacggtccttgacaccctgggtatcgagcgcgccacgcacgatgtggtaacgcacacccgggagatccttcacacggccgccgcgcacgagcacgatggagtgctcctgcagattgtggccttcgcccggaatgtaggcggtgacttcgatgcccgaggacaggcgcacacgagcaaccttacgcagagccgagttcggcttcttcggggtggtggtgtaaacacgggtgcacacgccgcgacgcagcgggctgcccttcagggccaaagtcttggacttcttcggctttgcctgacgtcccttacggacgagctgttcaatagtaggcaacttgaattctccgattcagtggtttctcttgcttttgtgtgaccgccgcactgcacccacacttttcagcacactcgcttggtatccgcctgttggcggcacccgacgaatcggaaaagatagcccagtccaccggcccgatggccttcgcccctcccgtcggcgcattactgcgtgcgatcagcggtttgaaggatatcccagcatgctcgcctgttacataaggcgtgctgttggcacacacgaatatctatattacgattcctccggacaacgacgcgccgagccacaactcactggtttggggacctcctgcgcccccgtacttttcctctcctcccaacgcaatattccaatgcgtcgcaaaacacacacccaactattctcccaacgcaatattcccgggaatgcgtcgcaaaaagggaacgccacacagcaggtgcccccgcggagactatgtcacacgggggcaccgccaaggaggttacattatgtttcttttcaccacatccgcttctgtgttatctgtttccagcacatcctcgtgctcttccatatccgatgggaacctctagcgacccggcctctttgccgtattaccttgccgctttctgcattaccaattatagcaaaaccgccctcgcgaaacgcccgatacctcaatcgggagtaagcgggagcggctatgttatgcgaggtaggaaaggtggatgaccgactgactggagtcgtgccttacccgacctttctcaccatttcaggatttcaggcagcgaccttggcggccttatcggcgtcgaacgggtgggccgctgaaacggtgctcttggcagagcccttctcgccattgtcggaatcccagtggatctcgtgcttgtcatcgtggttgcgccaccagctggacaggatagagccggagatgttgtgccacacggagaagaaggtggacggcacggcagcgagtgggttggttgcgaaggaggtcagggccagggttgcgcccagagcggagtcctgcatgccgacttcgaaggtgatggccttctgctgtgcgtagcggaagcccttcgggtagatcttgtacatcagcttggagaagccgaagcccagcgagtagccgcacaggttgtgcaggatgaccaccgggatggccaccagggagctggccacgaacagcttcggaccgttggcggcaacgaccacgccgatgataagcagaatagccacctgagaaacgataggcagggcgaccgtaaccttctcgatcttcttgccgaagatcatgtggcagatcacaccgagggcgatcgggaagagcaccaccttgacggcgttgaggaacagggactgagtcggcacggacacgtactgagaagcgagcagctgcatcagcagcggaatcatgaacggggcgcacagggtggagaggatgccgatggagacatcgagggccacgtcaccacgggacaggtagctcatcacgttggaggaggtgccagacgggcagcagccgacgagaatcacgcccacggccagcgggccggacaggtggaagatcgcgcacagggccacggcgatgagcggcatgatgatgaagtgagctacggtgccgacgatgaccatcagcggctgggtcaggatgcgcttgaagtcgtccagcgtcagggtcaggcccatgccgaacagcacgatgcccagcatgtagccggtgtacgccttgccccacaagctggcggccggcacgaagtagttgaagacggcccagacgatgacgatgaccgtaaaccacttggtcagccaatctgcaaaggctttaaccttttccatggtgtttctcttcccttgtttggtgtaggtaacatcgcatgaaactaggcgggtcgcggttgatatgaaacataatgctcacattgcgaacactcacgtaatcatttctgcaatccccggtcgtaccatcacaccgtcgtgtgccttgacttttcatcaatcgccgcacaagacccactcatccacatcccgccatctgagacagcccgcagcctggccccaagaatgaaaccgaccacttgattccatcgcgacacaccgatgagcacacatccgcaaagttgtgtatagtattcacctgttgcgcgaattcagcttgctgaatacggcactatggtggccatagctcagttggtagagcatctgattgtggttcagaaggtcgcgcgttcgagccgcgttggccaccccagtaaaacccttccgttcgcggaagggttttgttttttctccctgaattccccgctcctgggttataggccaaataggcatgccgggaaccaccgcgttgtacactcagggcatatccaattcaccgaacataaggacaaaaggtccgtcatgctgtcttttgagaacgattactcccgcgccgcccatcccgcggtgcttgaagccgtggctgaagccaacaaccatctgtattcgggctacgggtccgacgaactgagcgatcaggccaaggccaagatccgcgaggcctgcggccagccggacgcggatgtgtggttcctcgtcggcggcacgcagaccaaccaggtcgtcatcgacaccatcaccccggcgtatgcaggcgtggtcgcggtcgcctccggccatccgaacgtgcacgaggccggcgccatcgagttctccgggcacaaggtgctcacgattccccagcacaacggcaaaatggacccgaccgaactggacgagttctgcaagaccttctatgcggacggcaactacgagcacatggtgttcccgggctccgtgtacgtctcgcaaagcaccgaatatggcaccatctactccaaggccgagttgcaggccatcgccgatgtggcgcacaagtacgacatgccgctgttcgtggatggcgcgcgactcggctacgcgctgaccgccaccggttcagacatgacgctcgcggatctggcgaccatcgccgacgtgttctacatcggcggtaccaaggtgggtgccctgttcggcgaggccgtggtgtttaccaagcacaacacgccgaagcacttcttgaccctcatcaagcagcacggtgccttgctggccaagggctttgtgctgggcgcgcagtttgacgctttgttcaccgacaacctgtatttcaagatcgcccgcaacgccaatgaggcggccgatcgtattcgcgaggccctgcgcgccaagggctacacgctcactttcgaagcgcccaccaaccagattttcgtgacgatggatcagccgaccatcgaccgtctggagcgcgagatcaagctcggctttaccgaaaaggccgacgacacgcacaccgtgatgcgcatctgcaccagctgggccaccacgcctgaagaggtcgatcagcttattgagttgttgtaaaacccttcgctaatctctccctccgtcatcgcttcgcgatgccacctccctcatcagagggaggttttttcgtagatccctctgatgagggagctggccaccgcaggcggactgagggaaagacctctccgcaaacgagaaggctcctattcccctatcgccttgcgttccatatccacgaacttgtggaccgaggcttccacggaataatgcgccttggtgtattcggcgtatttctcgccccattcggcgcgctcggcctgatgtgcgatccaccaatcgatgcgtcgggccagcagggccgcgtctcgcacggggaacaacgactcgtcgatcagcgcgaactggctggccgccgacagttcggacgcggcgatcaccggcaccaatccgcacgccatcgcctcgatcacgctcaccgattcgatgtcggcaatcgaacaatgcacgaacaaatcgcccgaacgcaacaaatcgggcatatcggcgtgcttgtggaatccgatatcggccttgcgcgccagcaaacgcccggcgcggaacttgagatactgcttgagcggcccagtaccggcgatcaccagctgaatatcgccggcgtgccgggacatcgacaccgccttgatcagcgtaatctgatctttctcgctagccagtcggccggaagcgatgacgcggaacggcacgggagccgaggcacccggatcggccggcttcttcggcgaatacaccggtgaataaccattggaaatcacgtgcaacttggctttatacccgtgcgcgcgcaacaggctcgcggtcatttcggtgggcacatggatgtggtcaatgtgcttgtacagccagtgcttgaacagccagtacaggaagctggaaataccgggaatgcgacgtagcgggccggccgaatacagcacgttctccggctgcaggtggaatccggcagtcacgggaatgcccatttggtgggcgactttagcggcacgacggccgaatttgaacggcatatagatatgcaccacatccacgccttggaaggcggtgcggaacaacgtgtcgctgggttcggcgaattgcatgagctgcttggcggccacccacgagacgagcggcaccttattcacgcgcgccggatattcgggcgcccctataccgacaagcctcacatgatggccttgccgctccaattctgcagcccattgcaaggccgaattggaggtgccgttgccctgattgcccaccgtatcgaccacaagagcgatagtcagaggacgatcaatgctctcttcaatcccgttttcgcgcattgccccatcctaaaccaccgcgctgcaatggcgtcggccgcgctgcctgaacgcgtatgaaatggtatgggctgccgcattttgcccaatattgaatcacgcgctccgcagcacacgatcgacgtgggccacgacctggaacaactcggcggcgtgcttgagcagactgatgcgcacccagccttcgcccgcctgaccgaagcagacccccggcatcagcgccacgtccagcgcgcccggagtctccagcaggctcagcgagcgcacgccgccgaattcgagccccgcataggcgaaatcatcgcggcatggcagaatgtgggtatgactgagaacgccgtaaatactgccgtgacttccacctcctctcccgcaattcccgccgagacttccgccgtctcccccgcaactcgcgcagccaaccgcccgctgggcacaccgctgggcaagcaccccacccgcgtgctgtttttgggcgctggtgagctgggcaaggaagtggccatcgagctcatgcgactgggcgcgtgggtgtgcgccgctgactcgtatgccggcgctccggcccagcaggtggcgcatgaatatcgcgcgttggatatggcgaatgccgccgaattgcaggcattgttcgatgaaatcaagccggacatcatcgtgcccgaggtagaggccatcgccaccgatgtgctggccggtactgcggccgcgggcgcccaggtggtgccgagcgccgaaatcgccgcgatttgcatggaccgcgagcgcctgcgcgtactggcccacgaagaattgggcttgccgactacaccgtatcgttttgccggctcgctggaagagctgcgcgccggagcttcggaagtcggctatccgtgcgtggtcaagccggtgatgagctcgtctggtcacggccagtcggtggtgcgttccgccgacgccatcgatgccgcttggaccgaagcgcaggagggccgccgcgccgccgatgagggcgatgtgtcgcgcgtgatcgttgaggcgcttgctccgctggagcgtgagctgacggtactgactgtttcttcgtccgccggcattgtgacgtgcgcgccgatcggccaacgtcaggagtccggcgattaccgcgagtcctggcagccggctaccgaacccgatggtgaggccgagcgggcgcacgacatcgcacgtaccgccgttgaaggcttggtggccaaggctcaggcggccggcgaaaccggttggggcgtattcggcgtggaactgttcgtgctcaccgacggctcgattctgttcaacgaggtctccccccgtccgcacgataccggtatggtgacaatggcctcccagcgtctgagcgagttcgcgctgcacgcccgcgcgattctcggcctgccgatcacccccgagcatgtgtcgctcacgattccggccggctcggtggcggcaagccatgcgattgtggtggccggcgacggtgaggtcgagttcaccgatgtggccgctgctctggccgaacccggcacggacctgcgcatttttgccaagcccgaagtgcatggccaccgccgcatggccgtggcactggccgtcggcgagtccgaagccgacgcccgtgccaaggccggcctcgtggccgatgcgttgacgattaccgtggagtagtccacggcctgatcagctcagcatggcctcaatattattgccgtccgggtcgtggatgaacgatcatgacgaacctccttgtaccatttcgtcactcccattatcgtgtgtatatggccgaagagtcatgtttcgtctattgacgaacatctgagtattcacacgcgcttctgcagataccttcatgccggaaggctacacgaccggagacgagctgatcgtactggccaatgacggccgcctccgccatcccaacagcgtatggccgttcgatgcagcgacgtatgatgcgccggccgcatcgtagcgtcatgctgagtgttgttgtagccctcgattggtacccttttaccgttagttcacccagaaattccactcctgaaaggtgagtcatggagaagctggaaaagctctacgagggcaaggccaagcaactgtacgcaaccgacgatcccgaggttctgtgggtcgaatacaagaacaccgccaccgctggcgatggtgaaaagaaggaagacttcaccggcaagggccgtctgaacaacctcatcaccaccatcatcttcgacctgctcaagaagcgcggcatcgacagccaccttatcaagcgagtggacgacaccggccagctggtgcgcaaggtgaacatgttcccgttggagatcgtgctgcgcaacgtggccgccggccacttctgctcccgtctgggcgtggaggaaggcctgccgctcaaggagccggtacttgagtacttcctgaagaacgatgatctgcacgatccgttcgtcaacgacgatgacctggtggccctcggcgtatgcactcgcgaggatctcgccgagatcgccccgctggcccgcaagattaacgaggccctgatcgagatcttcgccaagatcgacgtcaagctggtcgacttcaagatcgaaatgggccgcgccaccgacggcacgctgctgttggccgacgagatcaccccggattcctgccgtctgtgggaccagaaggaccactccggcaaggtcgagcaccttgacaaggacctgttccgccgtggtctcggcagcatcatcccggcctacgaagagatcgaggagcgcctcgccgaactcgccaagtccgaaggcatcgaagtcgccgagtaatgcattatctggctcccctctcgaggggagccaattgtctttaatttcaagaaaggatttccatggtttttcgcgtgtacgtggaaaagaagcccggctttgatgtcgaagcccagcagcttgcgggcgaactgcgcacgatcctcggactgaccggcctcaaggccctgcgcatcgtgaaccgctatgacgtcgaaggcatctcccaggagctgttcgaccagaccgtgcccaccgtgttcagcgagcctcaggtggacaatgtggcctacgacctgcccgacttcgccggcgccaaggtcttcgccaccgagttcctgcccggccagttcgaccagcgcgccgactccgccgccgaatgcatccagctcatctcccagggcgagcgcccgaccgtccgctccgccaagctgtacgcgctggaaggcgacctgaccgacgccgacgtggacaccatcaagcattacgtgatcaacccggtcgaggcccgcgaggccagcctggagaccaaggaaaccctgaagacccaggtgccggtgcccggcaaggtcgagaccatcgccggtttcaacgagatggacgccgaagccggccagaagttcatcgacgagcgcggtctggccatggatctggccgacctcgaattctgccagaagtacttcagcgaggagagccgcgagcccaccatcaccgaaatcaaggtgatcgacacctactggtccgaccactgccgtcacaccacgttcggcaccgagctggacgaagtgaccatcgatgacgccaccgtcaaggccgccttcgagcgttacctggcgatgcgccacgagctcggccgtgacgccaagcccgtctgcctcatggacatgggcaccatcggcgccaagtggctcaagaagaacggtgtcctgaccggccttgacgagtccgaggaaatcaacgcctgcaccgtcaaggtcaaggttgacgtgaacggccacgacgaggactggctgttcctgttcaagaacgagacccacaaccaccccaccgaaatcgaaccgttcggtggcgcggccacctgcatcggcggctgcatccgcgatcctctgtccggccgctcctacgtgtatcaggcgatgcgcgtcaccggcgccgcggacccgaccgtgccggtctccgagacgctggaaggcaagctcccccagcgcaagctcgtgaccaccgccgccgccggctacagctcctacggcaaccagatcggtctggccaccggtcaggtcgacgagatctaccaccccggctacgtggccaagcgcatggaggtgggtgcggtcgtggccgccaccccggccgaccatgtgcgccgcgaaaccccggcccccggcgacaagatcatcctgctgggcggccgcaccggccgtgacggcatcggcggtgccaccggttcgtccaaggcgcataacgtggaatcgctcgaactcgacggcgccgaagtgcagaagggtaacgctccggtggagcgcaagctgcagcgtctgttccgccgcggcgatgcctgccgtctgatcaagcgctgcaacgacttcggcgcgggtggcgtgtccgtggcggtcggcgagttggccgacggcctgttcgtggacctcaacaccgtgcccaagaaatacgagggcctggacggcaccgagctggccatctccgaatcccaggagcgcatggccgtggacgtggccgccgaggacgtggacgagttcctggcctacgcccgcgaagagaacctcgaagccacggtgattgccaccgtgaccgaggacccgcgcatggtgatgacctggaacggcgacaagatcgtgaatctgtcccgtgagttcctggcctccaacggcgcttccaagcaccagaccgtgcatgtcgaggaacagcagtcctacgagaccccgtggggcgagggcacgctggccgaacgcatgaacaagctggtcaccgacatcaacgtggcctccaacaagggcctttcggagcgcttcgactccaccatcggcgcgggcaccgtgctcatgccgttcggcggcaagcgtcagctcaccccgaacatggccatggtcgccaagctgccggtgttcggcgagaccaccaccgcttcggcgatggcgtggggcttcaacccgtacatcatgtccaagaaccagttcaccggcgcctacctgtccgtggtcgagtcgctggccaagctggtcgcggccggcttcgagcatgagaaggcctacctgagcttccaggagtacttcgagaagctgcgcgacgagccggaacgctggggcaagccggcggccgccgtactcggcgcgctgatggcccaggtggacctgggcgccggcgccatcggcggcaaggactccatgtccggttcgttcgaggatctcgacgtgccgccgacgctgatctccttcgccgtggccgtgggcaacatgaagcgcgccacctcccctgaattcaaggacgccgatcaccgtatcgtacgcatcgcgccgcgctacctggccgacggtctgaccccggacaaggatgcgctgcttgaggtgttctccgtgatcgaggagctcaccgacttccacgatgccctggccgtctctacgccgggctatggcgccaccgccgaagccctgttcaagatgacgctcggcaaccgcatcggcgtgaccctgaacgacagcatcgccgtggacgacctgttcaccccggcatacggttcgttcatcgtcgagctggcggacgatgccaagcttccggccgtctccaatttggtcgagatcggcgaaatcggcaccaccacctccgagtacgtgttcaaggccgccggcgagacgctggacctggacgctgtgcaggaagcttgggagtccggcatcgaatccgtgttcccgtaccgttccaagggcgaggacaagggcgcgaccgtcgagaccatcgacttccacgcgccgaagaagaccgtgtacgtcggctcttccgtggccaagccgcatgtggtgatcccggtgttcccgggcaacaactgcgagtacgattccgccgccgccttcgagcgtgccggcgccgatgtgaccacactgatcgtcaacaacctgacgccggccgccgtcgccgaatccacgcaggcgttggtcgacgagatcaacaagagccagatcgtgatgatcccaggcggcttctccggcggcgacgagccggacggttccgccaagttcatcaccgcgttcttccgtgcgccggccgtcaccgaggccgtgcgtgacctgctgaagaaccgcgatggtctgatgctcggcatctgcaacggcttccaggcgctcgtcaagctgggtctggtgccgtacggcgacatcgtgccgatgaccgacgcctgcccgacgctgaccttcaacaccatcggccgccaccagagccgactggtccgcacgcgcgtggcctccgacctctccccgtggctgtccaagacttcggtcggcgacattcacaccgtggccatctcccacggcgagggccgcttcgtggcctccgacgaggtgctcgcccagctcagggccaacggccagatcgccacgcagtacgtggacgagaccggcacccccggcatggacctggatgtgaacccgaacggctcgctgctcgccatcgagggcatcaccagcccggacggccgcgtgtttggcaagatgggtcactcggagcgttccggcaacggcctgtacgtcaacgtgcccggcaacaagtaccagccgatcttcgaggccggcgtggaatacttcaccgcctgataatcggcgcgtatcgcgtctgatacggcacacagggaaggaactctcgggttccttcccttttttgttcatgccggtcatgggctaaggttggggtgttcgcactaccgaatccgccgctgaaaggacctgtcgtcatgccgatcaacgaggcattgttcgccgcgatgaaggccgccagctacatcaagcccaacgcgggcaagtcgtacaaattgcagcgcgtggcggaagagcttatcgccaagcaggcacccgacaatccgaaatgccgtgtcgaggacgccttcgcgcctatggcggatggatatgccgtaccattgcgagtgttcacgccgctggtcgcctatggagcgcccctgcccgaagccctggaggaatcttccgccaatggcacgcccgtggcctcggcaatatccgcgattctgcccgccgtattacccaaagtcctacccaaaatactcatcaaggaaagcacgtcgagcggcaacgccgacggtatttccggcaatgccaacacggaacttccctcagtcacgccgcgtggcacgatcctgtttttccacggtggcggttggaccacaggcggcatcaacctgtacacgcaggcttgcgcgcatatggccgtacgtctgcaacgccgtgtgatctcagtcgagtaccggctggctcctgaataccgcttccctactgctgttgaggattgctatgaggtagcccggcagctgtttgctggggaattgccgatttctggggtgggtggttctgttgatgttgatcacccccagtcggctgcgccgacagcccccgccggcgggggcgatatatctgcgacaatcccagcaccggatcccgacagcatcgtgctgtttggcgacagcgcgggcggcaatcttgcggccgccgtctcgctcatggcccgcgaccgcggcgagttcatgccgcgcacgcagatgctgctttacccggtagtcggcaacgattacaatcccgagaccagcccgttcgaatcggtgcggaccaacggcaccgactacatcctcaccgcacaggacatggccgactacatcgacatgtaccgttcgtccgtggccgatctgaccaatccgtatttcgcgccgctcaccgcgcacgacctgagcaatcagccgcgcacgctggtgttgtccgccgaatactgcccgctcagagacgaggacgaagcgtacgcccgtcgcctgcaattggtgaacgacaacgtctcctgttaccgaattcacgatggcatccacggctacctgctcaatacgtcggccgtgggactggtggccaccacctaccgaatcatcgagcatttcctcgacggcacaccgctggaaccagctcccggcaccggcaccaccgccaacgcaccggagggaggcgacgcgtggcaagacgtacttggtaccgactagacaacatcggcaagttctactcctcccaggctggccgctcctcgcagaccgtgttccgctattcggccgagctggcggacggcatcgatccggacatcctgcagcacgcgctcgaccatgccatcgcccagttcccgagcttcaacgtgcacctgctcaacggcatgttctggcattacctcgaacagtcagacggccggccgctggtggagtcggaacatctgccgatatgctcgcgactgcattacgggcccaaaagcatgctgttccgcgtaagctatttccgcaatcgtgtcaatctcgaggtctcgcacatcatttcggacggtcgcggcgccatcaacctgttcaagtcgctgctgcacgcctacatcgccgagcgatacgacgtgccgggcgtgccttcggattacgacggttcggatagcgacaaagccgaaaacagcttcgacaaatactacgagaaagacaaggccggcgctgcgccaggcacgaagatctaccggctggccggccccatcgaccgggccgcgcctacgttcatggaataccacgtcagcgccagcaaggtgcttggtgcagcgcatcagtgcggagtgagtctcacctcctacctcatcgccgcgatactgtgcgcgattcgcgacgtcatgccctcgcgcgcccgcaatcgcgcgattcgcgtggatattccggtcgacttgcgcgccttcttcaggtcggagaccgtgcgcaacttctacggcatgacttacgtggcgtacacgccggccgaaatcgaagccgatgaggactccgcgaaaacttccgcaacaagcccagacgcagccggcgacggccagcagtccgccgcccgcaccgcgcacggcaacggtatgggtggattgctgaccgatgagccgttggccgacatcgcccgccatgtgcaggagcagctcggccatgccaccagtcgcgagcgcgtcgaatcgcatatgaaccgcatgattgcgctggaaaagaatccggtgctgcgtcttgcgccctcccctgccaaggactgggtgctggagctggcccggttcatcgccgaccgcgagaccacgaccaccgtctcgaaccttggccgagtcaccttggacgaacgactcgcgcgccatgtacgttcggtgagcttcctcaccacaccggccagcctgaatttcacggtctgctcgttcggcgacgacctgagcatcggcatctccaccatctaccatgatctgaacgtcatcaagaacctgtgtcggattctcgccgcgcagggcatcagcggccgtatgaacatcgctggcgtgcatgtggagaaaggagcgtcggcatgaagcattgcgatgcctgcaccgtcgatttcaccggcgatatggcccgttgcccgctctgccagaacgaattgcgcggcgaggcctcccccgccgcattccccgcgcagcagatctatctgcgtccgaggcgtttggcggtggaaatcatcacgtttgtaaccggcgcgattttgctgctgcatggcttcttcagctatctgttttcgtggccgataccgattgccagtgcatcggcggccgcgctgatcatcagcgtgctgttcatcaatagtgcgattctgcacgtgccgcggccgcttcgcctcatgtttcgatatttctatatcatgctggcgattgcgctggtctggtttgtggcgacgatgaatcatgtcgtcaccatgttcgtcataccgatcacgtgtctggtttcgctggtctttgacgtggtgctgcttatcgtgctgcgggccaaggccattgacgagtacgccaagtatctggcgttcgacatcgtcgctggtctgatgcctctgacgttcattccgctcggctgggctccgtgggatgtactggtgatggtcagcgggctggtctccctgctggtgctgctcggcctgctcgtcttcgcccgccgtcagctcttctcggaattcggcaaacagttctcggcctgattgcctcgtgcgctcaatcgcccgacttaggatggaaaccatgagcgaacatgtggagcatgggtttgggccggtgtgggatggcgagtcccgggttttgattttgggatcgatgccgagtccgaaatcccgagcggcggcgtacagccgaggcgagcatccgcgagagcggcagcaggtagaggaaggtcgcggcggccaggctgagtgtgggcgcgttgatggtggcaagcggcacggcaccggcgatcgaccaaggaatcagcggagcgatcaccacggcactgtcttccaaatcgatagcttgtgcggagcgttcggattcgtcgtcgccgtacagcccaccgcacaactggtgagtgagcatgatggtgagggtttggttgcaggcgagcgccgccgcgcaagtcgcggtaatcatggtggcaccacatgcgccgatgcgatgaccgagcatctcgatgacctgctgcagccgagcaagcatccgcgtctcggcaaaaatgccggcgtaggcggaggagatacagacagtggccatcacagtgagcatggagaggatgccgccgccgtccaggagtgcggccacctgcggattttgcgcatggtaaccgaaaataagcagccgcaacagttctgcccattccatgtgctgcacgcccacgcataccgcgaccgaggcggcaatgctggcgagcataagcagccgaacatccacacgcagcaacgccaacacgatgaccagtaatgctggaactagggtaagccaatgcaaatcgaaggccgatgagaacaatccgccgatatcggttatgctgcttgcgttggttgaaacagccgctctagccgagccagccgagccagccgagccagccgtagcagccgcactagccgcaccaaatccggaaccaccgctcgcgcacagccactccaccaccgcagccgcaacgtataccacacaactcagcacaaacggcaccgcacccgtgcgcagcatgcgggcaatagtattgaacaggttcgtatgcgtaagctgtttgaccagcaaggcactggtggaaaccggcgaacaacgatcgcccacatagacgcccgcaagaatcgcgccaccgagcatcaccgggttcgcctgcatcgacaatcccaacgacatgcagatggtgcccatagtcgccgcactggcgaacgacgacccgaccagcaccgacatcgccgagcacagtagaaacgacagcggaatcaccgtggcggcgtgaatcaccgcggtcgaatgggccacgatgaaggcgatggtcccgctggcccgccacagcgaggtcagtacgccgatgagcacgaaggccaccaccacggtccccgcggaccgtacgctgccggccgcacggctcgccatcgcgcgcaacgagcaccggcgaaccagcccataccccatgaacagcagcacaccaacgaacagcgcgggaataatcgaccagccgagggcgacgctggcaaacagcaccgcacagaacagcaacatcgtgcccgcttccagcatgcgatcctctcctcttccggctacagcctcatctcagattccatctcatgacccgcagtcgcaaacatcaacgctattcgcacgagccatgacctaagataacaggagaaatacagactaaactgatatctattacaggtttaatactgtggcattgattcgcgccacgacacgtcatacacacaccacgcaaacgccatacacacgggagtatcgccatgaactttctcagcatcgaatacttcgccgccgtggcctcggaacatagcttcagcaaggcggcgaaacggttggggatcacgcagcagacgctgagtgcgaacatcgccgccctagagcgggagctcggatgcacgcttttcgtacgccatgtgccgctcgaattgacctatgccggcacggtgttcgcgcgatatgcgcagcgattccgccgcgatcgcgatgcacttggccaagaaatgcgcgacatcgccggcgatcaggccggcgtgctgcgcgtgggtgttgcctacacgcgtagccgggcgatcatgccgccgattgtgaaggcgatgcaacgtgactgcccgaatatcatcgttgaactcattgagggccgcaacgatcagattcaacaatggctggcgaacggcgatcttgatctggcggtggcggacttcgccgggaaaccggccggcatcgaacttatggatttctataacgagcgcatggtgctggtcctcgcacaatcactgtggatggatttggccgctaccggtggcgcggcgaatggccaagtcgatgccgtcagaaccgcgccggacgagcgcgccattgccgcaggtgacctttcctcactggagcattgcccgtttctcctaggcagcccacaagatattgacggacgcattgccgatctgctgttccgccgtgccggttttgagccgaaagtcacagcccgttcggataacgtactgactctgctgaaactgtgccattacggcatgggtgcctgcctatgcccggagcggttcctgccagcgctgcttgacggcgaacggttgcgtactttgcgcgtgctggattgcggcccggataccgcatatgccattcagttcggcgttccggccacatcgtatcggtggagcgtcattgatgatttcattcgttgcgcccgcgaagtcaccaccggcgtgtcgcaatagccgccaacttgcgttcaagtggggttgaactgtttcaataagaattgttagcgttcacggccggccatgaagagacgacggtgacgattgattatcaaggagcacacatgaagtatcgcagcgttggcaagtcgggactgaagatcagcgaggtcgcactgggcagctgggtcacggatctcaagggcacgacggccgaggatgtggccaaggagaccgtgaagctcgcctacgattccggcgtcaacttcttcgactgcgcggacgcttactcgggcggtgccgccgaacgattccttggcaagacgctgaagcagtacccgcgtaaggaactcgtcatctccagcaaggtctacttccccaccggcgaaggcgtgaacgaccgcggcctgtcccgcaagcacattttcgagagcatcgaccagacgctgaagaacatgcagaccgattatctggacatgtacttctgccaccgttttgacgagaccaccgaccttaccgagaccttgcgcgcgatgagcgacctggtcgcccagggcaaggtgctgtactatggcgtttccgaggagtggggttcggcccgccttgaagaggcccagcgcatcatcgaccgctacaacctgtacccgatcaccgtggtccagccgcagtacaacctgaacgaccgttacatcgagcatgagatcatgggcacctgccgcaagctcggcatcggtatcaccacgttctccccgctcgcgcagggtctgctgaccggcaagtaccgcaagggtcagccgctgccggccggctcgcgcgccacgtggcagtccgaccaccagatcaacgatctgctcaccgatgagaacctcgacaaggtcgagcagctgcgcaaggtggccgacgagctcggcacgaacctgccagtgctttccatggcgtggatcctgcagcacccggagatcagctgtgtgatcgccggcgcctccaagcccagccagctggagaacaacatgaaggccgccggctttaagattccggccgacgcgatggccgaaatcgacaagatcaccggcttccaccgcttcgaacgtcacgtgggctgacgaatctgagacttcctccaacgggagcgattgtcaagcgccgaaatcggtatcgccttgggcttcggcctgagcgatggcggtttcggcgttttttgctgtttgctcgatgacttggttgtagccggtcagggccgcgaacggcatgaactgcgcggcccgctggtggcgggacatgtgcggatgcttgcgcgactgatggtgtggcaggttgatgatgtcgtcgtatgcatgggtctcttgcagggtcatgcgcgatggcctccgatctgacggttgcggtcctgaccggtggcgccgtcttccatatccatggctttgatgacggcgttgcggccgaatttacgtttcacatccagcagcgcacgctggatatcatgctctccatctttttcgctggtggaatcggatccatacgattgggcctcgtcatcaccgaacaagtcgagctgttcatagcgtttgccggcggccagctcctccggagtggccacatcatcggcgatgacggtcaaccgcctcacaagcaagcgtgaatccacaatgcgctcgtacaacatcgtcatggcctcacgaatacgtgccgacgacgaggtgaaatcacccaaaccaatcgacccgaccgcgctcttgggcaccttgcgcccaaatcggtcgatggtcaccggcccttgatagcttttcgctgcccgctcagcggcacgtttcatcgcataatcagcgcacgaatcgagctttgacgaatcaagactgccgatgtcatagccgacggcgagcgtcagtcggttcgtcagcacgcttttatcgaccagatcgagggccagcgcatcggccatctccttggtgatcagccgggccgtggcatagtcggcggggccggtgagcacctgcccactgctaatgctgtgcgcacctggctcataggatcggatatctgcgatttcgcacggctcccagccccacgcatggtcgatgagcagttcggcattgacaccgaacatgcgatacagcaggtcttcgttgtagtaatccgaagcacgacccaccgagcatcgggcgatatcgcccatggtcatcagtccggcatgctcgagcttcttggcatagccgcgcccaacccgccaaaaatcggtgagcggacgatgatcccaaagcagccgacgatatgacatttcattcagttcggccacgcgcacgccgtccttgtcggcgggcatgtgcttggcgacgatatccatggcgactttggccagatacatgttggagccgatgccggcagtggcggtgatgccggttttggtgaggatttcgcgcacgatggttcgcgccatcgcatgcggccccatacccagcgagcgcagatatggcgtggcgtcgatgaacacctcgtcaatcgagtagacatggatgtgctcgggtgcggcgtatttgaggtagatgccatatatttgcccgctgatttccagatagtgcgccatgcgaggtttggcgatgaccatcgaggctttgagtcccggcgagcgttccaggtcgcatgcatcgcaggactccccgattaatcggccgccgggagcatggaccgcgcgctcgatgttgactccattcaggcgctgttttacctcgaatagccgcgcacgaccgggaatgccatagttcttcagcgagggtgagaccgccaaacatattgtcttatcggtgcgggtttcatcggccaccaccagatgcgtggtcaacgggtcgagtccgcgcgccacgcactccaccgaggcatagaaggacttgagatcaatggcaatataggtatgctcgcgttgcgtcgataccgttccgctgcccatcgccatcacctccttaccaccgctggcccgaccagcatatcaacacagtcgaacatttgttcgatgcaacatgcctgttcgaaactgccgaagtcgacgcacgcaacgcgcccaaacacgctcttcacccacgccacacgcgcagcggcagagcagcggcatgcatgcgtaccatggggaatatgaagaaaagcattacagcagacagcgattttgcagcgtgggcggcagcccgatcccagaaaacgaatcgatcactggcaggagcccgactcgcgattccggagccgcagaagcatgccgaaatcaagtctcaggcccagcaatggggcatgaccgtcgaagatgccacgatgaccgacgggcacagcgaggaattcctatgcgacggcacacaaagcatcgattccatcaccgatatgcgcaaggcaagcggactggaggcaatggagtacgcggaacagcacatgccggtattacgcgacaccatggatagcctcaccactcgcgtcgatttctcaggcattcgtattgccgtctgtctgatactggagccaaagaccgcgattctgctgcgcaagcttaaggccgccggcgcaatcgtcggcgtatattgcggcccggattccacggatccccgagtggcggaacagctgcgccgggaaggaatcacggtcgaatccagccgagactggaccgcggaacaggcgcacgaggcggccctgcacctgctggacgaaatacagccggacatcatcatcgacgatggcgccagcttcgcccgcctcgcttcgctcgaacgccccgaactcacggcgaacctcattggagtggccgaggaaacgaccagcggcgtacgcgcgttccagcagatgcaggaagcgggagccctcacctacccggtcgtagccgttaacgacagtgtgctgaaaaccggattcgacaacgcccacggcactggggagacatgcgtgaccaccatgcagcgcattctcggcgagcatgcattcgacggtaagaacgtcaccgtcatcggctacggcccggtcggccaaggcttcgcacggcgcattcgcgcgcttggcgccgaagtcaccatctgcgatatcgatccagtggcttcactcaaagcggtgttcgacggcttcgccgcacaagacattgacgaggcactcccttgcgcggatatggtggtgtccgccactggcgtgagacatacggtcacacttgagcacatgcgcgcaatgcacgagggcgcggcgctcgcagtgatcggcggcatcgccaacgaaatcgccttggacgaggtaagcgacttcaccccacaggtcaacagggacaccgtgcaactcaatgttcccgacggaccaacgctcacgctaatcgccgacggcgatggcgtgaactacacggtgggaggcggcaatccaatcgagatcatggatctgagcttcgccgtacaggccagcgccgtcgcatatcttctggaacatcgaggcacactggatcacacgcttatcagacttgacgcagcgaccgaccagcgcatcgccgccagcgcgctcaaggcgcgcggataccgagccagccatgccgtggaggacaacggctacaattggcgactgaccagattcgcggaaaacgaccgagagaacgccgaccgatagccatagacacggcaccgaacacaacgcagcgaggagaatatgaccgacaacacctggccgaccgtcgataccgagcttatcgatgatgtgacactgtattccgccaaactcatcatccccgtgacgggccccgtcatcatcgatggcgcagttgccatacatggcgaccgcgtggttcatgtaggtaaacgccgctgggtgctgaaggcgctgaagcaggaaatgacggctcacggcaccatccatgaacggcattgggatggggtgctcacccccggattgatcaacgcgcacactcatctgcagtacagcggcatggtgcaggtcgggcaaggcacctacgatcggttccgcgcctgggaactggcattcaacgaggtgtacgccgaggcgcagaagacccagccatggaagcagtgggccgaggacggcgctcgccagatggtcgaatcgggaacgacggccgccgcagacatcgtcaccgatttggacgccgccggcgcgctggcttcgcagggcatgcacggcatcgcttattgggaggtaatgggctggcacaacgccgaatggatggaaaagggccgcactgagctcatccggcagttgcgccggatgaacgaggagcagctgccaaacctcggcatcagcccgcatgctccgtatacgctggagtccgaaccgttcgttgatcttccagacattgctcgtcagctgaacatgcgactgcatatccatctggcggagaccccgctcgaggccggcacttatccgccggtgctcaccacttattcggcggccgactggagtgaccacgattgggaaagctaccggcagctcaaggaagtgggcaaaggcgcctccgccatccagttcgtcgatcagcttggctcgcttggaccggatgtgcacattgcacacggcgtgtgggccaatggcgaggatcggcgtattctacgtcagcgcggcgtgggcgtggccttgtgcccccgatcgaatcgcattaccaacaccggcaaagatgcaccggtgcgcgaatacctcgaggaaggcaatctggtaagcgtgggcaccgattcgctctccagcacgccgaccctcgatctgcttgatgatgtgtcgatgctttacgacctggcccgcgaacaaggctatgccagcgacgatctgacacatcgcctgattcgtatgatgacgctgggcggcgccgcctccatgggcatgcacgtgggccgcaaccgcattggacaaatcaacgcgggcgcattggctgatttcgcgttcttcgacatccccgtcgacacatcatctccggccggcatcgaagaaacgctggaaacactggtgaggcacggcgcaggcacgaaccgagccacggtgatatccgggcgcgaagcctacaacaacgcctggtgacaccgctgacctgacctgatatcaagaagccaaaaaccagcaaacccgccaagaacaggagatctcattatgagcgtcgctttgcaagacatgagtccatacgcccggtccatagtggaacgccttggactggaaacccaccccgaaggcggctggtacacgcgtgactggcaatccccgcacacggatgaggcctcaagccgaccgctatcgtcactgatttacttcctgctgcccgagggagatgccagcgcctggcataaggtcgatgcggatgaggtctggctgtggcatggcccggcatcggtcaaactggagctcggcggcagcgacgagactccggaatccgacgaatccaagcgaaccgtaatcaccttgggttccggcatcaccaccgatcaggccgacgtaaccgtatcgggacatgcggtcgtaccggctggcgtctggcagcgcacagtgccaggccagggcgatgcgctggtctcctgtgtggtcagtccgggattcgtattcgacggcttcacactcgaacagtgaacgccatttcgctctgcgccaatatgagatatccgtccgcttacgcgccagattgcgcggctctagtcggccataagcaatggcgatagccagcatccgaaaatatcgatgttttgtaacccaatagccatacaattggcgcgaatgcatcaagcacggtttgaaccgtgtgcatgacgaacacttgaggagaggaagcccatgttcaataagcgacacatcgtccgtaccattgcggccaccgtcagcatcctggctctgtcgttcaccgcagcctgcggttccggccagtccaccgcatccaattccaccgattcggacgacatcacccagcagacgtacaagccgggcaagctgaccatcgccaccggacagccggcctacgagccgtgggttatgaacgacaagccggaaagcggtgagggctacgaggcggccgtcgcctacgcagtggccgacaagctcggtttcaagaagagcgacgtggtgtggacccgcaccgcattcgacaccgccatcgctcccggcgccaaggactgggatttcaacatccagcagttcggcatcaccgacgagcgcaagaaggccgttgacttctcgtccagctactacaacgacagccagtccgtcgtggtcaagaaagacagcaagttcgccaacgccaccaaggtatccgatctgaaggatgcgaccgtgggcgtcatggtcggcacccttgcctacgactacgccaaggcgaacatcaaggacgacatccagacgttcaatgatgatgccgcactggctcaggcacttgacgccggtcagatcgacgcactggtcaccagcaccgtggaatgcgtgtacatggtgcagtccgagcaggtcaaggacgccaaggtgctcggccgtctgcctgactccgaagacaagagcggcatgggcatcgtgctgccgaaggattccaagctgactgcagccgtgaccaaggcagtggatgacctgaacgccgacggcaccatcaagaagcttcaggacaagtggctggccgagtacaccaccgacctgaccgaactgaagaagtaagtgaagtaggcttacatcataaggtcacaacaccttggccgggcgctgcgggaattttcctgtggcacccggccatcccggcattcaggaagcgagcgacattcatcacatgaccgcagcaccaaccgaaaccaggcagcacaatgcccctgacggacacgaggtaagtcaggtcgagctcgaacgacgccaatatcgtgttcatcagcaaattcaatcgacgattaccagtctgatcagcaccattgtgttcgtggtggtcatcgtcatcggcttgaagctctcccccggctggccacgagtcaaggagaccttcttctccggcgaatacttcgtcaaatcgtttccccatgtgcttgacggcctatggctcaacatccgcgttctgctcgtcgcagtggtcggcgtggcgattctgagcacgctgatcgcgctggtgcgcaccagccgctcccctattctgttcccgctgcgtatcctggcattgatctacacgactgtgatgcgcggcgtgcctattatcgtcgtgctgtatctaatcggtttcggcattcccggcctaggcttgttcggccgtatcgatccctcggtactcggcaccattgcagtggtaatgggatacagcgcctacgtctccgaggtgctgcgtgccggttttaacgacgtacatccttctcagcgagcctcggcccgctcgttgggcctgacctccggccagacgacccgactgatcgtcattcctcaggcattgcgcaaagtggcgcccgcactgatgaatgacttcatctccatgcaaaaggacgtcggcctgatttccgtgctgggtgcggtggatgccgtgcgcgccgcacagatcgacgtggccagcacctacaacttcacgccgtatgtggtcgccagcctgctgttcatcctgatgagcgtgccgttcatcctgctgaacgactggtacacggaacgtctgcgtaagcgcgaactcagcggaggaacggtatgagcgaaatgaccaatatcaccaccgaggcgagtgactcccccgtgagcaacaagacggtgctgcgtcttgatgacgtgcgcaaatcctttggaaacacgcaggtgctgcgtggcatttcctttgacattcaccaacatgaggtggtggctttgctggggccttccggttcaggcaaatccacattgatgaaatgcgtcaacctgcttgaacaggtcgatgacggccagatttggctgggcaataccgatatcaccgacccgcgtgccgaccaggacaagattcgcgcacgtatcggcgtggtgttccagcagttcaacctcttcccccacatgtcggtgctcaggaacgtgacccttgccgcaatcaaggttcaccactggagcaaggatcgcgccgaaacccgcgctatggaactgcttgaacgcatcggcatgcgcgataaagccagtgcctaccccgatcagctctctggcggccagcagcagcgcgtggcgattgcgcgcgcactgatgaccgacccggaactgctgctgcttgacgagatcacatccgctcttgatccgatgctggtcggcgaagtgctcaacatggttgccgagttaaaggcccaaggcaccacaatcctcatggccacgcacgaaatgagcttcgcccacgaagcggccgaccgcatcgtactgctccgtcacggcgtcatcgccgagaacggcacacccgctgaggtgatggacgagtcgcaggatcccgagaccatcgagttcttcagccatttcaggcactgagacgaagccgaaaaacaagcaccggattcatacgacgaaaggctccgacggataataccgtcggagcctttcaaattgcgttgacgaaagtcaaccgatcacgtcacaccgacaattcggtatcacgcttgagcacaaagtggagcaccaggtaatgcggcggtgaacaggtaagaggtatccgtgcttccaacctacccgtcggcatcaccccacaccacaaccacccaccacaaacagcgaaaggccaaaatcctaagccactattcatacttgactgatctggtgcttaaaccgcgtccgcaaaccccaacaagttccaccaccccacaacacgcgatgtagccgccgattggtagggttgatagatagttaatcccctgtttgaaaaaggagctttggcttgtcggctgaactcgaagacattcacgaggaatgtggcatcttcggcgtatggggccaccccgacgcctcacgactcacctattttggcctgcacgcgctgcagcatcgcggtcaggaaggtgccggcatcgtctccaacgataacggtcatctcatcggtcatcgcggactcggcctgctcacccaggtgttcggcgatgagcgcgaaatcgaacgactgaagggcaattgcgccatcggccacgtgcgttacgcaacggccggctcgggcaccacagacaacatccagccgttcatcttccgcttccatgacggcgacgtggctctgtgccataacggcaacctgacgaactgcccgtcactgcgccgcaagcttgaagacgaaggcgccatcttccattcgaactccgacaccgaagtgctgatgcacttgattcgccgttcgatgcagcgcacctttatggacaagctcaaggaagcgctcaacacggtgcatggcggtttcgcctacctgctgatgaccgaagacgccatgatcggcgcactcgacccgaacggcttccgcccgctctccctcggcaagatgaagaacggcgcctacgtgctcgcctccgaaacctgcgcactggatgtcgtcggcgccgagctggtgcgcaacattcgcccgggtgaaatcgtggtggtcaacgatcacggctacaagatcgtgcagtacaccaacaacacgcagctggccatctgctcgatggagtacatctacttcgcccgcccggattccgatatctatggcgtcaacgtgcactccgcccgcaagcgcatgggcgcacgtctcgccgccgaatccccggtggaggccgatatggttatcggcgtgccgaactcctcattgtccgccgcatccggctatgcggaagcagcaggcctgcccaacgaaatgggtctaatcaaaaaccagtatgtggcccgcaccttcattcagcccacgcaagaactgcgcgagcagggtgtgcgtatgaagctctctgctgtgcgcagcgtggttaaaggcaagcgcgttatcgtcatcgatgattccatcgtgcgcggcaccacgtccaagcgcatcgtgcagctgctcaaggaagccggcgccgctgaagtgcatatgcgcatcagctccccgccgctgaagtacccctgcttctatggcattgatatctccaccaccaaggaactcatcgcagccaagatgagcgtggaggaaatccgtgaatacatcggcgcggattccttggcctacctttcgctcgacggtctggtcgaatccatcggactgaacgccgacgccccatacggtggcctgtgcgtcgcctacttcaacggcgactaccccactgcgctcgacgactacgaggccgacttcctgaagtccctcacgcccgaggaccgtgtgcgtctgcctgaattcgcgctgtacaagagcaagtacatcggcaacgagtacaacaccgtgcagccggatgccgaatagctcaccaccaatccactcaataacaattctttgaaccagaggcgcttgcctcccctcagtcggctttgccgacagctcccctccagaggggagccaaaataagtagaaaggccaaccaaatgccaaaagcatatgagaacgccggcgtgagcgtcgaagccgggtacgaagtcgtcaagcgcatcaagtcgcacgtggcccgcacgaaccgccccggcgtggtcggcggcatcggcggcttcggcggcctgttcgatctggcctccttgggctacaaggagccggttctcatctccggcaccgacggcgtgggcaccaagctcatggtcgccaagctggccaataagcacgacaccatcggcatcgactgcgtggccatgtgcgtcaacgacatcgccgcccagggcgccgagccgttgttcttccttgactacatcgcctgcggcaagaacgacccggcactgcttgagcaggtcgtggccggtgtggccgacggctgtgtacaggccggttccgcgctggtcggcggcgaaaccgccgaaatgccgggcatgtacgacgaagacgaatacgatctcgccggattctcggtcggcgttgccgaaaagtccgccatcgtggacggttccaccatcgctgaaggcgacgtgctcatcggcctgccctccaccggcgtacactccaatggcttctccctggtgcgcaaggccctgttcgagcaggccggctacaccgtggacaccgaactcgacgagctgggcggcgaaaagctcggcgacgtgctgctcacccccaccaagatctacgtcaaggccctctctcccctgttcaaggcgggcgtggtcaaaggcgtggcccacatcaccggcggcggcttcatcgagaacatcccgcgcatgattccggacggcttggccgccgaaatcgagctcggcacctggcccgtgctcccgatcttcgacgtgctggagaaggctggcaacatcgatcataaggagatgtacaacatcttcaacatgggcatcggcatggtgctggccatcgacctcgctcgcaaggacgaggcgctgaagctgctcgccgacaacaacgagcccgcctacgtgctcggccagatcgcagccgacaccaccggcacgcaaatcgtactgaagtaactcgctttccgcaggaaaggaacaacatgggtcagaaagtattggttatcggctccggcgcgcgcgagcacaccattgcctacacgctgctcaaggcaccgagcatcgacgaagtcaccgtggctcccggcaacccgggcatgctcaaggacggcatccacaccacgcagctgagccagtcgaatcacgccgcacttatcgaattcgtgaagaacaatggttatgactgggtgttcgtaggcccggaagtcccgctgatcgaaggcatcgtggacgatttcgccgccgccggcatcaaggcgttcggcccgtccaaggccgccgcccagattgaaggctccaaggacttcgccaagcagctcatggaccgacacaacatcccgaccgcccaatacaagaccttcagcgatctcgagatggcgcaggactacgtacacgagcacggtgccccgattgtcatcaaggccgacggtctggcggcaggcaagggcgtgaccgtggccatggacgagcacaccgcccagcgcgcactcgaagacatcttcatcgaccatcgcttcggctccgccggtgccaaggtcgttatcgaggacttcctggacggccaggaattctccctgatgagctttgtcaacggcaccgatttctggccgatgcccatctcccaggatcacaagcgcgcccacgatggcgacgagggtccgaacaccggtggcatgggtgcctacagcccggtgccgcagattccgcagtccgtggtcgacgaggccatcgagaaaatcgtgcgccccaccgtcgaaggcatggccgaggaaggtacgccattcaccggtatcctgtacgccggtctgatcgccaccgccgacggcccgaaggtcatcgaattcaacgcccgcttcggcgacccggaaaccgaagtcgtgctcccgaagctcacctccgacctcggtgccggcatctccgccattctcgacggcgaaacccccgaattcacctgggatgagtccaacgccaccctcggcgtggtcatcgcctccaacggctacccggagaacgtcatcaagggtgcccgtgtgcccgaaatcgaagtcgacgaggattcgcacgtctactacgccggcgtcgcctctgacgagcacggtaaccttgtggccaactctggccgcgtgctgctcgtcgaaacctccgctccggacatcaagtccgcccaggacaaggtctacgcaatcatcgacaagctcgagctgcgcggactgttttaccgccacgacatcggcttcaaagccctgaagtaacagaagcggcgcatctgctgcatatttttggcctggcagacatgtcaatcgattgacgtggctaccgggccagatttttctgtcccggtagccgatttcggctctttttcgcaaaccaggacagctgaacccctcgaatataggaatatttgaaattcccttccatacgaaaccgcactattccgccattttcgtaatacgcggacgatacttccggcgtcagttttgtcccggtaagcaaaaatgacccgaaatcaaatactaggacagaaaaatctggcccggtacacgaatcaatcgattgacgtaattaccgggacagcgaacgtcactatgacaacgccatcacccaatatcagcgagcgatatcacgctagctgaatttggcgatgatgtcgaacagtttggccttggcttcattgaagggcgggtacacgaggcgcagagtgtcggggaactgcggcttggtaaccacggttttgacgtggctgaaggtgaggaagcctgctttgccgtggtaggtgccgatgccggacgcgcccacgccaccgaacggcaaccggctggacagcagatggcccaacggcagcgaatatcccaaggctccggagctggtctgacgttcgaaagtcagccgaacctcgtgatcgcgcgagaacacatatgcagccaacggccgggaccgcttgttgatgaatcggattgcggactcggcatcctcgaccaccagaatcggcagaatcggcccgaaaatctcctccttcattactggcgcatctggcgacgtaccgtacagcacggtaggcgcgatataccgggcggcacgatcgaccttgccgccgcaaacgattcgaccggccaggtcgaacacgccgggcaccttgtgaatctcgctcggctcaacagcggccgaggcagtcgcaccatcatcagcggctgccatattcgaaccggccgtcggcttcgccgcattgttcgcgctgccggccatctcccccgcgccaccgcgcccagtagtcacggcattgaagcgccgcccaaccatatccatggccgcgcctaccgccgatgccacctgcaccagcggcgagctcggctcctcaggcggcacggtgccgaccggcaatagcttgcacagtcgttcaaaatgacgatcgttgataatacgaccaaaatcaggcgaggccttcggatcttcgccatagaattcggtgatggctacggcgatgcgctcggccagagcctcggccacatccggcgtggcgagcacatagtcgggtgccacgcaagtctgcccggcattggtgaatttgccccacgcaatgcggcgtgcagccacattgatgtccgcagtgcgatccacaaagcatggcgacttgccgccgagttccagcgtgaccggcgtcagacgctcggccgccgcgcgcatgacgattttgccgacgtggccgccaccggtatagaagatgtggttgaacgggcatttcagcagttcgccggtttccttgggcccgccttcgaccacgcgcacggcctcggagtcaaggtattgcggcaccaactcagcaaggagcttggacgtattcggtgaaagctcggacggtttcaagcagacggcgttaccggcagcgagcgcatcagccattggttccaaggccagcagcaccggataattccacggtgaaatgatgagcaccacgcctttgggctcggcaatcgtccatccggcagccggctgcaacatccaatgcatcgctttgggatgccgggcggtccaaaggctcagacgattgcgcacgaactgtgcttcaccagccaccaggttcagttccatgagcacggtttcagccgcgggcttgcccaagtcagccatagccgaggagacaaaggcatcacggttctccgtaaccagacggcgtagtgcgttcagctgcgcgcggcgccatgccagcggccgggtacgaccggattcgtaagtcttcttcagttgttcgaaagtctggttcgtcatgaaagcaccccctgctttgcggcagcgctactgcaattttggacgggctacgccccgcgccttgctggctcgtctgtcggctcgcacgctgcctacagacagcctactaggctgtctgtaggcagcgtcataaaatctgtgtctttgaggtagtttttgccggcggtgatgtcgtattggatgagcttgtagtcggcaagcaactgcttggtttccttgtcgaagtcatcggtggacatcgggttgccgttttggtcgagatagatgttctggccttcgggaatacgatcccagccttggaccttgttgaccacaggcggttccatagcggcaatcttggaatgcatttcggtcaggaacgccagatacgggctgaccttggcgttcatgtgatcggcggcctgtgccacgaagaagttcggcgaagagtaggctgcatcgcttgccttattgccttgggagctggaagccttattcgaccagatgaagtaatcggtcaggtgcagggccaaggagttgttgccatcctcgctggcggacgagtagatgcccggcaagtgatcgccgtagaacactacggtgacgggcttatccagcgcatccagttcgttcaggaactcctgagtggcctgatcggtaatctccacacccttttgataggtctcaatcgactgctgttcatcatcacccagcggcgtacccgtggtggattcggcggtgtagtcgttattctcataccactcgtggtagggcatgtgattctgcatggtaatgatctgaatgaacttgttcgtcttgccggacttgatgccttccaacgcagaatcataggaagacttatcagagacgtacggcgactcgtcgatcttgtcctgatacttgatcacgtccggaccggtcaacgtgtagaagtgcgagaagccgaacttcttgtagttcgtggcacgcgagtacatgctggattcgtacgggtggtagccgagcgagttgacgggcgcgccccacagctggttgatggtgggagtccaatgctggctcgggaccagctgctggtacgggctggacagggaggactcgaaattggccatgctcaggccggaaagtcccatgtattcgagattggccgtacctccgccgtagccggaggagagcatcaggccggaggtggtgcccgccttgatcttgcggatgttgggcatcgaatccttattggtcttcagtcccggcacgcggctcgggtcagagaaggattcggacaacacgtacaccactgtcgaatcagtgaggttgttggtgcgggaggcgttgattgtctccgcttccttctgatagcgagcggcgaccttcttcatggtctcctcggagtagttgctcggcttgtccatgatcttcgggttgagctggcgggtgaaggccacgagcggaccattgcgctgcgcgtcatacacggaatcccacatggatggcgtgtctcccaaggcgcgggagaacttgttggccagcgaatcggtggtgctcacatgaatgcagtacaacgcgaacaccagaatcggcagcagcagaagaatcagacgggaggtgaggttcaggctcaggttatccgtacgaatcatgcgacctttgcgcccatcgaaatgacgcagcaccagaatcagcgcgagcagtacggcgaacgcgccgagtgccacgaggatggtcacatgcgcaccggccggaatgaaggtgagcatgttgccggtgttcgagccaaggaagcctagatcggcgggcagaatggcctcgtaacggatctcgaccttgaaatgttcgatggcggccacgatgattccgaccgcgagaatcacgatgcttgccgtccagaaccggttgaacagcatcagcaacatgaggtacagcaacgcgacaagtatcacgttgagcacgaatacgaaattgccgtcggtccacatcttgctcacgaagccgaatccgacggtcggactggacagctgcacacgggtggagctggacgaaacgcccacttcgagcgccgtcacgacaatgatgtcgaagataacgaagagcacgccatacacccagccggggaagggcttgtgggggtgttggggcgtgacttcattggcttcgacctttttggcccaaagcttgaaatggggtttcactgtggtggtattactagtgttctcgctcattcgcctgtttccgtatgtgacttttcaagggcatattgttgccgctgaaccttggaaaatccatagttccactatttttcttaccgtttcctaactattcaccctaacgcaaagggtgcctcgggacatccccgaagcaccctgatatataaggagcctatccctgatagcgaagtgttctgttctcccctagacaacgcctcgctatctgacttgattattccccttatcgctgttgcggattgacggctactgccgcattacttcacggcggcggcgaactggtcgaccagtgcgctcatccagtcgagcaggttggtgtactgcttcggcatctgctcggcgagctccacgatcggcacgttggcgtccttggcggcaccggtgatctggtcagtagtggagtttgcttcctggctgttgaagacgaacatcttgatgaagccggccttcagggtgtcctggaagtccttgatgtcggccggggtcggctcgctctcgttggcggaggcctgggcgtagcccttcggagtggcgtcggtcatcttgaggtcgtcggccaggtaccaggccacggattcggtggcggcgtacggcaggccctcggtcttggcggaagtctccttgatcttggactcaagctggtcttccttggcgtgccattctttgttgagcttggcgtagtcgtccttgtggctcgggtcggccttctggtaggcggcggtgatggcgtcggcggtgttggaacgcaccttggcggagaaccagacgtgcgggttgtcgccttccttgatgccggcggtttcggcggcggtgaccagcgtggccttggtcggctgggcggccttggtggcccacgggtcgtaatcggcgccgttgactacggctaccttggcggtgccgaacttggcgacatcctggctggtgggctcgtaatcgtgcgcctcgacgttggtcttggtcatgatgttggtgacttcgacgttgctgccgccgaggtcttcggccacggaaccccactggttgatggaggcgacgacctcgatcttgccggaagacgcggcgccgctggaatcggacttgccgctggcggcgttgctggaaccgcaggcggccatcgagagcagggtcgccgcggcggccgcgatggcgagcgcgcgcttggcgttggacatgatggacatgattgggttttcctctctaattagccgaacggctgggcgatgctgctgttgctgcatcatcgcccagccaccaacacgacagaataacatgtattgagaattattatcatttgcatttacatcggcgtgtcatgctggcgttccaccctgccatcaccctggcggcgttcctgctggcctgggcgagcaccgtggtaccggcctgggtagcggccaaacgcaagctgcgtgacaagccggcttccctacttcgggcatttcatgttcatgacttcgggtggctataagcacgtgttcggcgagcagcaccagtcgaacgcctatatggtgcggctcaagaaccacgagacctccaatgtggagtcgcgcagcgccaagctcatgaagctggacggcgtgaaaggcatcgtgcagaacacgacctcaaagaaacagcatgctcggcgcgctgaagtcagtggaatagcagcggaataacaaatgggatcggctttgaagccgatcccatttgttattcgctcactgctttctgagccttctgcgctttctgctccttttggcaatcagagcacagtccgaagacctccaaggtgtgggattcaacggtgaagccgtgaccgtcggccactttgcgcagccaagcctcgctgggcgggtcgatttccacggttttgccgcaccgcctgcacaccaagtggtggtgatgtccgtcgtcgccgcataggcggaacagctgctggccgtccaggcggatcgtgtcggcggcaccggcatcggccaaggcgttgagctggcggtatacggtggccaagccgattttcgagccttcgtcctccagcctgcggtgcaggtcctgagcggagatgaactcctcgcagtcggccaaggcggcgcgaatcgcgtccttctgcttggtctggcgttcgatatgttcaaccatcggtaaggtcacgccttctttttcaggtcgtcccagcagccggtggcctcaaggtcagcgaccgtcttggccgggtcgtcggtgagcacggtgatgtggcccatcttgcggtcgtggcgcacttcggccttgccgtagtcgtgcacattccactccgggtgggtggcgatcagcgcgcgcgtcggttccacatgctggccaagtacgttgaccatcacggccggcgagagcagcttgggcttgggcaggggccagccggcgatgccgcggatgtgggcgtcgaactggtccatcgagcaggcctcgatggtgtagtggccggagttgtgcgggcgcggggcgagctcgttgacgatgacctgatcgtccttggtgatgaacagttcgatggccagcgtgccagccagttcgaagcccttggccaggcgaatcgccagttcatgcgcttcgcgagccacatgttcggacacctcggcgggggcgatggtcatatgcaggatgttgttgcggtgctcgttacgcacaatcgggaaggtgacgaagtccttgccgttgccggagaccagaatcgaagcctcgaatgcgaagtcgacgaagccttccaggatgctcggcgggaagccaccaccacggtcggagcgggagcggatcttctccaagtcggcgtcggaacgcagcacgagctgaccgtggccgtcgtagccgccggacacggtcttcagcacggccggataatgaatatcacccaatgcggcgtcaagctcatcgaagttgttgacagcgcgccacggtgcggtggcggtgccgtggtcgttgatgaactgcttctcgcgcacgcggtgctgggtcacgcgcagcaagtcggtgccctgcggggtggcggtgatgccgcgcacctcgtcgatggcgccggcgtccacgttctcgaactcgtaggtgagcacgtcggactgcacggccagatcatggatggcggttttgtcatcgtactcggcggtgatctggaagtcggccacctgaccggtcgggcagttcggcgttgggtcaagcacgccgacgcggaagcccatgtagcgggcggacagagccatcatgcggccgagctggccgccgccgatgatgccgatggtcgagcccggcatcagcatggagacgcggccgcccgtttcttcagacaagctgggcattggattcggccaccttttccttcagttcgttacggtaatcctcaagcttgtcggccagttccggctcgaaggcggagagcatctgcacggcgagcaggccggcgttggtggcaccggagttgccgacggcggtggtggccaccgggatgccgccaggcatctgcacgatggacagcagcgaatcccagccggacagggcgtgggagcgcacgggcacgccgattacgggcagcgtggtctgcgcggcgatcatgcccggcaggtgggcggcaccgccggcaccggcgataatggccttcaggccattggcgcgggcattgtgcgcgaactcggccatgagctcgggcgtgcggtgcgcggaaatgacctgcttgtggtagacgacaccgaactggtcgagaatatcgcaggcacgcttcatggtctcccagtcgctggccgatcccatgaccactgcgacttcgggcttggattcatttgccattatcatttactccctagttattgagaataaggcccactgtactcctgatagcggagttaagccacgcagcgaatcgttctcaatacataattctgtgaggcttacagctcaataacgatcttgccgaacatgtcgccggcgatcattctggcgaacgcctcgggggcggcgtccaacccgctgaccacggagtcgatcgccggatgcaggtcggcgtgctccacgaagcgcagcagccgggcgaaatcctcgcgcgaacccatggtgcagccctgcacgcgaatgtcctggaagaacagtcgcgtgagctccgcaccgggctggtcgccggtggtggcgccgcagatggcgatggtgccgccgggacgcaccgaccgcaccgaatggccccatgtggccgcccccacggactcgatcaccgcatcgaccttgcgcggcaaccgcgcaccggtctccagcgcggcgttcgcgccaagtttcagcgctttggcgcgcttgtccgcgtcacgcgaggtgacgaacacttccagaccggcggcatgggcgagctggatggccgcagtggacacgccgccgcccgcgccctgaatgagcacggagtcgcccggcttgatgccggcggcatcgaacaacagcgagtaggcggtcagccagctggtgccgagtgcggccgcctcagccgtggtgaggtttgcgggcttggcgaacacgttggcggacggcacggcagtcttctcggccatcgtgccggggtatttctcggagaggatcgtgcggcgctcgcccggggccacgcccgcgccatcggtgccgacgaacgtgtacagcaccacttcgctgccagccttgagcccatgcttgccggggatgtcctcgtccagaacgcccacggcatcggtgcccaggatcatcggcgtctgttcggcggcgagacccacaccctgtagcgaccagacgtcgtgatggtttacggtcaccgcgcgcaccgaaacggtcgaccagaacgggcgggcctggggttcgggctgctcgcccactgccaacgcggcaagcggatcggcatggttgacggtggatgcgtatacggccttcattgcgcgctccttggtatcaaaaggaattaccgcattcattgtcccacatcgcgcagcgaacgaatcacccatttacggagatgttgggggcattgcttcgtcatgtggacctcggacaatgccgggcgttagcattcaacttcggaaagactagcgaagggagattcgagggtatgcgcagcgcgtcaggaaacggatttgattcaagcgattccttcgccgtctccggcgctgccgagaggaccgcacgccttcacgacatacccccgagcattaccccttcccatggcgacgactcccatctgctgagccgcattgccagcccggccgatgtcaaggcccttgcccccaacgagctcgccgaactctgccgtgagattcgcaccacgctgctggcatatggccaccaacacggcggtcatatcggctccaatctgggcatggtggaggccacggtggccctgcaccgcgtattcgattcgccgcgtgaccgcatcgtgttcgatgtatcccaccaaagctacgtgcataaaatgctcacgggccgcgccgccgcctatctggacccggaccgtttcagcgaggtgaccggcttcaccaatccggacgaaagcaaacacgaccagttcgtgctcggtcacaccggtacctcgatttcattggcttgcggtttggcgaaaacccgcgatatggaaggcccgaacagcggcatcggcaatgtgatcgccgtgatcggcgatggttcgctgagttcgggcgtggcgtttgaaggactgaacaacgcggctgagcagggcggcaatctcatcattgtgttcaacgacaatgagatgtcgattgccggcgatttcggtggcatgtacggtccgctcgcccgcctgcgcgcgtccggtggcaccgcccagccgaatctgttcaacgcgtttggcttggattatcggtatgtggaggccggcaacgatgtttccgcgctggtcgcagctttcgaggaagtgcgcgatatcgatcatccggtggtggtccatattcatacgctgaagggcgcgggatatgacggcgccggtcacgtggccggcgcatcctcggcctcggccggtaacgtccatgagctggatccggcagtctccgacaccggcgtgcgccccacgagcaacgtgctgcacagcgaaccgtggcattcggatcactgcaacctgtccgaccatgaaccacatgaaggccagtgcgaggcctcgcattggcagaatccggatgccgcaatcggcaagccggacgatccgcgcaagcattacggcaaaatggcgatggccgcgctcgaaccgcgtttcgccgccgagccaggactcgtggtcatctcccccgccacgccgggctcgaacggcatcacccatgagttccgagagcgcgcgggcgcacattatgtagacacgggcatcaccgaatcgcatgccgtggcgtacgctgccggcatcgcacgggcgggtggcacgccggtagtggccaccacggcgtccttcttccagcgcgcctacgaccagttcttccaggagatgagcctgaaccgttcgcgagtcacggtacttgattttctgggcggcttgtccggttcggacaatacgcattccggcgcatatgacgtgacgatgttctccaatattccaggggttacgatgctggtgccgacttcggctcgcgactatctggctgatttggcatgggctaccgcgccggccggttcggcggacgcccctgctggtccggcggtgattcgggtgccgggcgaggcgattttggcggcggagcgggatgcgacgctgctgccggtgacgggtgggcagattgctgaccgcccccagtcagcttcgctgccagcctccgccagctccgccagcgggggcatatctgccgcaacagtccgcgggaccgttagcgtaacggctcagcatgccggtgcgcgtcacatgctggattggcgggtcaatcagacgggctcgcaagtcgcgatcatcggactgggcaatgcgtatccgttggcggagcagacggccgccgcattgtctgacgattatggcatcacggcaacggttatcgacccgcgccagtgcacgtcgctggattcagacgtactggagtcgttgcgtgatggccaccagcaggtcatcacccttgaagacgggcagcttgaaggcggctggggcgagaaagtgaccgcatactatgcgaatcatcatgtctcggacggcagccgtaatcctcgtgtgctgaacttcggcgcagccaaggaatttaccgaccgcgtgtcgctgggcgaactgaacgaacgttatggactaacggtggagcaggtgacagaggcgatcactcgttgtttttgatggcgtctagggccgggattttaacggctttattggccgggccgaagccgaatagcaagccgatcagcgtggaaaacagcacggcgaacaggaacagccaccacggaatcaccgaataacgggtcacattctcgccaccaactatcgcctgccagagtatggtccagatagatgttccgccaccggtaccgtcgccggagcccccgccggcaccgctgaccataccgccagacatgccgccgctcatgccgcccgcatacaacgcgccgacaacgttgatgcccagcgatatcagtccgctcagcacgcagccgatcgatccgccgaagaatccgatcgcgccggcctccgcaagaaacatgacgcgaatgtcacgaacgtagcagccaagcgccttcataatgccgatctcgcgcgtgcgctcggttacggacataaccattgtgttggcgatgccgatggccgcaaccaacagcgaaaccgcaccgataccgcccagaatcagctgaatcgcgcgcgactgttcttccaacgacttacgcatgtcttcataggaggaggtctcgtagcccaacgctttgatctgtgattcgacttcgggcacggacttgaggtcggcggccttgaccagcacttgatcataggcggtggcttttttggcggcggctggatcgactttggcggccagttccttcaacgcctgcaaatccatgaccagaccgtcggaggtggcatagcccttgttgtagtcgcccgccacaatgccggaagccagcacatcgagggtgacgttttccgactgacccgcggcgctgccgcttgcgccgcccgcgccgccaccgccgcccgcgccgcctgtgccgccgccaccgccgccgtacatgttcatgctgtactggtcgccctgataattggtgccggtggtcagactaatttgcgtggtgagcgggtcgaagaacggatcttcgtcctgatcttcctcgcactggccggtggcctggttaaacgtgcatgaggaatactgatcgccacgtgtgctggtgcgttgttcgccgttcttcagggtgtccatgaacccataggcgaaccattcgccggcaagcacctggtcttttttgaccggtttctcgccaccgacgagcttgtagcccatctggtcgaactgggtcatgtcgatgcccatgatctgcacgtaatcatagatgtaacggccgcccgcgccggctctggccgtcacgttataagggaagttcatcatcggcgtcacgccggatacgccgctcatcgcgcggaaggattccacggccttgtcgtcgagcttggtatcgcccatcttggacgagccgccatcgtccatcggaccggcataaccgttggtgtacacggtgacgatggacagatcgcccatcgatttgagcatcttctcgttctgctcgttaatgccttggcccaaagagaccatgagcacaatcgagcagcagccgacgataacgcccagcacggtcagaatcgtacgggatttacgccgccataggttttgtctgcagagccgcagtatgtcgccgaatcgcatggtcgggcctttcaggccttgtgggatgagccggctggtgcgactgatgaggctggggtaactggtgtgataggagcggtgtctgccgcagcaccatccgtcacgccggtatcggtcttatcatccttgccttcggaccaatcatcccagtcctcatcaatatcgttcttcttggccttctgcttgcgccggcgacgcacgagcagcacaatcaccacgataatgaccacggcgatcacgacgatgaccacatacaccagcaccggcaatccctgattggcgctctggtccatgttcggatcggccatgtcggaatcatccatcggctgcatatcggttacgggtatggtgagcgggaattccttggtcttggtctgtccgtcggaatcctcgtacgtgactttgagcgtggtcttcagctcgcctgacgcgtgcggcgtaaaggcgtaaccaatcgtgccggtggcgccggaagccacattgcccacgtactgggttttcatcgtggcatcgaaaccttcgccctccatcgtggcttcgacgttggcgatatcgcctttgcccttgttcacatattccatcgtgaccgtgttttcctgaccggcgatcacctggtcgggcactacgggatcactgatttcgaaccggtcaggctgactgatcggcacggaaatcttgacatcggactggcttgaggagcgggcgctggcgtccacatactcgtatcggaagttcacggtcacgggctgggcaccgcttttcgcggaggcgagcgcctgcatcggcacgctttgcgtcatggcgtaaccgccccacagcgcgtcgacgtagaacgtgttcgtgcctcccgcgatggcgaagctctcgccgccgtccacggtgatgaccatgttcgtcaccgccacctgacccatgttctggaaggtgaagtcgaggttgaaatcggcgccggcggccacggaatcgccgccataggtgaagttggtgacgatgatgttcggcaccgggccggcgattggcgcggaatcgccgtcgcttccctgagacgtactgttcgtgccgcttgtgccgtctgtgccgtcgactgcgtacgcctggtgcggaagggagatgacggcaagtgccagtgacagcgtggagagcaacgcgacgatgatggcgatggtgcggtgggagaggtgcttcatcggtcaactccttgggttctttgggcggacggcgtggacggaacagttgggcgggaaaggtcggtgttgagccgatcgctggtgatgcggccatcgagcaaggtgacgatgcggtcggcgtatgaagccatctgcggatcgtgtgtgaccagcacgatggtctggttgaagtcatgggcgaatgcgcagatcatcgtcatgacctcggttttggttttagagtcaaggttgccggtcggctcatcggcgaacaccacctcgggcttggtcacaaacgcccgggcgatgccgacgcgctgctgttggcctcccgacatctggcgcgggtaatggctgagacgatggccgagcccgactcgtttgagtacgccacgcgccgcacgttcgcgctgttccttgggcacgccgcggaacatcagcggcattgccacgttttcgagcgcggtcagattgggcagcagattgtacgactggaatacgaagccgagatgcttctggcggaaggccgccagctcacgctcgtcgagtttgctgacgggtacgccgccgattctcacgccgccgcgcgtcggtttttccatgccggccaactggttgagcagcgtggatttgccggagccggattcgccgaaaatgcagcagatctggccttgcgggatactgagattgacacggtcaagcgccaccaccgtctcatcctcgacggggtattccttgcgtaggtttcttacctcgatgattgctcgtggcacgggccttcttccctcgttcgtcgccattggcggacgcgcgatagctggttattattcagcacatctcaagtcagagtatagccgttatgcaggagacgcaccccttaagggtgttcccggatggtggtgatgagcatgtgacttctaatctcaaggtcgacagttcaggctccagacggacccagaccggcataatattcaaaagcccctgcccctcacaaacgatgagggaccaagggcttattacatcgtgaccccggacgggctcgaaccgtcgaccttgagattagaagtcacatgctctatccagctgagctacggggccaaactcgtgtaagtctagccgtaggggtgtaaaacacctcggcgtaacgtcggcttgcaccggtaccatcggcgatatggggacaacggagagcaacgtagatcacgccgcatcgggccagaccgtcgcaggcgatagcggtgagctcactttcacatacgcacagggtcgttttgccagtgaaggcaaggattgggaaagcccggttgtgaccaacatggctgcatccgtctctgccgatgccggtaatgtccccgccggcagcatcaccaacaccggcaccaacaacaccttcaccagcaccaccgaatcgtcgcttgccaccctgctgtccaaccaatgcccgttcgttatcaaggccaccattttcgagggcaatggcaaaaacgccattcgcgaacgtcacacattcaccggctcggtgctgcgccagctcgaccaagccagcgccctgctgaacggcatcaacgaatccggccaatacccggccatagccctgcgcgaagcattggtcaacgcactggaacatcgcgattacacgtactccggccccacactgatcaatatcttcgattcccgcttggaaatcgtgtcgctcggcggcctgaccgatggtttggaaatcaacgatctactcaacggcgtatgccagccacgcaccccgcgtttggctgaattgttcgccgatttgggcctctgcgagaactgcggcaccggcattcaacgcattatggacgcctacgcgcagagcgcggtcagtccgcaactgcgcgtgggccccacttcggtggcaatggtactgcctatccctgtatcggccgaggccgcgtcctcgcatcggaccgatgccgatgcttccgccgcgcccagcaccactgacgaagcacagcatgccaaaatgtactcattccccacgattcagcgcatgacggataacgccgcagatgctttggccggcgcacgcatcatcggctgcgcgccactgcagacgctgattctcggcagtggattcggcgaacgcccggacggtgacgatcaggccagtacccgcccgcttgatacggcaacgctggaaccgtcgcctcaaacgttggaacagttcacgctcaatttcctcgcgttccgcggtgtgaagctcagccgtaaaaccatgcagaaagcgcttggcctgaacaaggatcagatgacgcagctcttggaccagctggagttgagcggcaagatcgaacgtcatacgcacgccaagtccactacgtattcgctggcacatgcctcaggacggtagcgaccagggcgacaacgactaaatcgtcaacaacccaagcagcaacgaccagagcaatacggcccaaggcgcgataaagcagcagctcagttctcgaatacgcggtcgcgaatcatgcgaccggattcgtcgagcgcggtggagaaccggccatagccggacagaatcacgcccatgtacagcatgtccacgagcgcggtatcggccacgcgcgagaaaatcgcattgccatagatcgtgtgcgaatcacgacccgtcagcaacgtcacgtcggcccagctggccagcggcgcgccgatggcattggttatggcgatggttttcgcgccatgcgacttcgccaatcgcaacgctttgaccgtatccgccgaactgcccgaatgggagaaggcgacggccacagcgccgtggggcaggtgcccggcaccgatctgctgcaggtaagcgtcggtattgagacggcatgtcagtcccaggtagccgagcttggtgaacagatccatcgccggtgtcaacgaattctccacgccgaaaatgtcgatgaactccgattcggcgagtagggcgaccgccttgcgataggccttggggtccaacgcactgtgcagctcgtcgatcagcgccttcgcgccatcggccgctttaccgggaatctcatcttcgccatcccacggattcagatcgaatccggccagcggattgaaggtcactttgtgttcggcggccgggttgcgcaacacgtaccgcagttcacggtaaccgccgaagccgagcttgcgggcgaaccgaatcaccgtcggctggctgacgtgggcgatgtcggccatctgaccgacggtcaggtcggccgcctcctcgatatgattccgaatatactgggctacggcgcgctccgccggacgcagcgacggatacacgtggtcgatgcgctcacgtattcccaccgaggattgcacagccgcgctcctagtcgtccgtattttccattcctgtttcgaggttaccggctgtataccggcgaacagtcgacttggattgaccgcaacatgaacggtgagcgaactcttccgtttacctttccgctccattccctctacaatcgaaaccatggtgcggattagcgtgggaagccccacccatcacacaagcgggcgactgtacggcgtgttcttcgaggacatcaaccatggtgcggatggcgggctgaacgccaacatggtgaacaactacagttttgacggcgtttatctcgaccatcacacgtggcgtatggccggtgccgaacggtggcgtacgcaggctgattccctgcgtttctgggatttcatcaactgttccgccgccggccttggcagtgagatacgcgggattcacggccagcgggtgaccaccgactgccccgccccgccaattcacgcacatagccgatacgctcgcatcacgtccgatgttccttccgaaaccggccctgcatatctggaaaacctcggctataacggaggcggcgacaacgggggcgagcccgcgttctccatcgtcgccgaccacacctattccgtcagtctcgcggtacgtccggttcatgggcgggccgagctgtccgtcggcgtggtcgataggtacggcctgccgctcaccagtatcactcgattgtcgtatatcgtggactccgatccgcttgacgatacggaagagaccggtctgaggcaggacgatggggccgatgcgcaggattccggcgtttcgatcagtccggattcgtcggatggtgccatcgtcatcggccgtgacggctggtaccggttcaacgccgacgtaaccggactgaacaccgattacggcaagctgcgtatcaccattgacgccggcgaacgcaccacgttcgatctggatctggtgcagttcatggatgcggactattggggcgcgggcgacccgaaatggcgttacggcaagctgcgccgcgatttggtggagaccattcaggcgttgcatccagcgtttctgcgattccccggcggctgcatcgtcgaaggtgtgacgcccggcaatgagtatcgctggaaggataccgtcggctctctggccgcgcgacgccaacagtattcgatgtggtcgttcaagatgccggatggttccagctattcgcagagctatcagatcggtttctacgaatatttctgcctgtgcgaggacctcaaggccaagccactgcctactctgttcgccggcatcgcatgccagtcgcccggccgagatccgcgccacatggatatcaattcggccaccttccgcaacaatgtgattcaggactacctggacctcatcgaattcgcgaatggcgatccggagtccagctcgtgggccgcggtccggcgtgatatgggccatcctgagccgttcggcttggacatgatcggcgtgggcaacgaaaacttcggggctgactacgtggccaagtttgacatgatcagcgaggccattcatgaacgatacccggatatgctgtgtgtgatgagcgccggactgttccccttccagccggcgatgaagcgcagctgggaccatgcgcgagcgttggccgcaaccgattccggggcacatgattccgccaccggtgacgcgattatcgtcgacgagcattcctaccactcccccgaatggtttgcatcccaggcgtcacgattcgacgcttacccgcgttgtggcgccggcgtctatttcggcgaatattcagccaacggctattttgccggccaaccacagaccgaacaaggcgcgaacacgtggaagtcggcactcggcgaggccgcgttcctgaccggctgcgagcgcaattccgacgtggtgcgcatgacctcctatgcgccgctgctcgcgcatattccggctaaggggtgggcgcagaatcttatcgaattcaatccggcgcatgtgaaccccacggtgaattatgaggtggagcggctgttttccacgcatctgggcgacacgacgtatgccgtgtccatcgagcagaccgcgtcacgccccgccaaacatctgtatgtcagcgccaccgggcatgacagggatgacgcctgccgttacatcaaaatcgtcaatatctccgattccccggtggatgtgacgttggaaatcgcgcgcggactggccgggctgggcgcctcgccatcgcgaccggtgcgtttggaggtgacgacgttaagcgccaatccgacggcgaagaccactatcggataccgcggcgaggcttcgggggcgattgtgccggaacgtcgggcttacacattgccgtcgccgtcttcattgctggcgatgaagatcaagccgtacagcgtcacgctggtggtttcgcgctgattggcatcggccattaggccgatgcctttgccgttagaatcaccctcaaggatgagggggaatcgtgcagattcagggaataataggggctatcccccatagcgaatacaagcgcaggagggcaggatggaatccacggcggccagaagaccgccggccaacgatgaaggagtgtgcggtatgtttatcaatctgttccgcaggcagcgtcctgcgctcgcccggctggcccgcaactccaacgcctatcgtcagccgatggttgcgtccgtatcatcgtccgcagtcggcgtatccagcatcacctctgaatccaacacagccaccgcagccggcgtatccacgctggatgccaccatcggccgcatccacgacatcccgcagtcggccatgagccgactgaccggctcccccaccgtatacgcgcggtagaccggcccaacccacaacggcggctcagagactcggctcgatgatccagctcaaggtcagcaatacggccaaaaacagaacgttgacggcggagtagacggccagataccggcctttcttgtgcgggtattggcgcacgacgttcttgtaagaaataagcgaggccatcgaggcgatgagcgtacccatgccgcccaaattggtgccaatgatcagatcgcgccattggtcgcagaagccggaaagcagaatcgtggtgggcacattgctgatgacctggctggagccgaccgccacctccagcggatggccgccgaccagcgagcgcgccagttcgtagaattcgggcacgcgcttcatgttgccgatgaagatgaagaacatgcagaaggtgagcggcagtccccaatccacgtatttgaatacgcgccgatcggtgaacaggaacacgacgaccacgatcacgcacatcacccacaggggaatcacgtcggagacggccagtaggcagacgatgaacagcagcgagtagacgatggtgcgccagccgccataaccggcgccgtagccggtgatacgaatctcgtcgggctggtgtttgttgcgctcgggagccagcacgccggtttcgaggtcgcccaggtcgccgaccggtttgccgccaaacaccacggaaatcacgatgaccagcaacacggccgccgtgccggaatacggtgccatgatgccgaggaattccatggtcggcatgccggtcagggctttgagatacaggttgtgcgcgttgccgatcggggtgagcatactgcccacgttcgcgccaatggtcatcagcgtgaccacgaggatggtcttatcctcttgcccagccatgatgagcacggccaccgcgaacggcacaaacgtgaccagcgcaacgtcattggtgatgaacatcgcggaaaagaacgtcaaagcgacaagcgtaatgaccagtccgcgcatggtgctgaccttctccagcaatcgcgaaccgatgatgcggaacacgccgatacgctggaatccgcacaccacaatcatcaggcagatgagctggctgatggtgctggcgtgaatgtagcttttgtaatcggcgtccggcggcacaatgaaacacgaaatcagggcgagtattgcggcgacgatgagaatcgtctcatttttggctacattgatcagccagcgtcgcatccattcctccgtgaataacccaatatcgcaaccattctattttacgcgcagaccagcataaggtacgtagtcgcgttgcgctggcggacatgagtttttggaccggtgccgcacatcagccgcgctcgtttttttatttggacaaggaaacattgagtttgcatgtcttccatacaatgaactgccgcgcaatgctgtgcccgtatatacggctgcatcattgtgtggcaggccagacacgaataccgtacgtggctggctcataccaatggaacatagtttcattcgaggaagaggagcgatgaagttgcgtattaccccagtattcccggtcaaacgtttcgccgccgtgtctgcacagaacgtgaagaacgtgcagttcgattacacgaacatgcccacgtacaacacgatcaccaagtagcgcgcactgccgcactgatcggcggcacttgccgcatacatgaatggccggtgtgctgcggattccttaccaagaatccgcagcacaccggccattatgatatatatgccgcaatacagggggcaatcagccctgcaccttacctccttgcgcgctacggtatccgaagttcatcatctcgctgttgtaggcgaccacgccacggccgaccgccggcagaacgatcatgccgccatcgccatgatgcgcggcgacttcgtccaaagtggccgtcgcggcatcctcgacgttctcgccggagaaacgcacacgatccgacacctgatgggcggcgaccaccttgatgaacgcctcgccgatgccggtgcaggacaccgccaccgtggactggttggcgaacgtgccgcaaccaggcagcggcgaatcacccacacgaccgtgcatctggttggtgatgccgccagtggacgtgccagcggcgatattgccctcggcatcgcgcgccacggcaccgatggtgccatgcttctcccactcatcgccaccggactgagcctcggccaaggactgacgacgctgttcggtgatgaagtactcgttgctttcggtcgcgacgccccaatcggcgatctcggcatcggtcgggtccgcgaacagcacatgcttggtctgctctttgacggcacgcgccgcatcgatcgggttcttcacggtgcttacgccggtgaccgcaccgacctcgccatcgccggtcatcaggcaggcgtccatctgggcgatgccatcgctggtcagggcggcaccacggccggcgttgaattcgggagcgtcttccatgacgtggatggcggcgaccacagcctcatgcgccggtactccggattccaacaactggtatccggcatcgagggcgcgctgcagatcaagttcgacctgggcgatgcgttcaggcgtgctgtgcttgccacgactgcccgctccggcgtgaatgacaagcgtgatgccggtttcgctgcccgccagttcagtggtcaccggcgaaacggaggatgtggtcatatcgtgtccctttctggagtcagatggatgtgctgacgccaacgtatcgttgcttccgcatgtatgatagccgttgatggccgcgaccggttccgcatttcgcatcatcggctcgcgatggcgtgactcgttactgcgccacctcgccactacgccaggggcaatgcgatgccggctcgatcggccaggtcacgcaacgaccacgtggtctgccccgttcgcccgacaacgctatgcgcatgccacagcgaactgatgatggcttcctcgcttattcattcgtcgaatgcacccatcgatgtgggtatgtagccatcaaaaaaactcgacaaccgcaatgagccagtcacttggctacatctgtgctatcgtctcgccaatgattcgaatgccggtatcaatgtcagcagcatccgggcgcacaaagttgagacggatgtgggaatcatccatttcgtcaacgtcgaacacgctgcccggcatgaacgtgacgccttgggaacggcaggattccaatacatccagagagcgcacgccgtccggtaaggaaacccaaatatagtagccgcctgcaggcacggtccaatacacttcatccggcgcataccgctccaatgctgcgattgctgcatctcgtcgaatgcggtaagtcttgatcaaaccgcgcaaatgttcggcgatgcggccttctttaagcagttccagacagatgcgctgcgatgacgtgctcgtatgctggtcgaccatgcgccgcagagccgccagccggttaatcacatgcgggtcggccacaacccatcccgtacgcaggcccgaagtgacggttttcgagaacgtcgacaaatacatcacgtatcccgcattctccatgcccttaagcggtatggggcgatgtgcgtcggacgattccccgccgtaccacaaatcgccgtaagcatcgtcttccacgatcagacactgatagcgccgcgccacgtcgatgagttcgctgcgtcgttcgggcggcagcgtggtaccggtggggttttggaacgtcgggacggtgtagatgagcttgggccggaatcgcgcgcaatagccgtccaacaggtctgtacgcataccgtgctcgtccactggaacgctgatgatgcgcgcatccgccgagcggaaggtctgcaatgccgggaagaacgtggattgttcgaccagcacgcagtcgccggggttgatgaacgcgcgcacgatgaggtcgatgccctgctcggagccggagagcaccatcacgttgcggacgccgcattgtacgcctcgtgcgcgcatatgttcggcaagcagcgcacgcaactcttcgaatccctcgataggtgattccggttggccgtcgaattcgcgcgactcaaacgcttcaatgctcactgaacgcaacaaatcgtcgggaatatccgccggattaggcgagccggtggcaaagtcgatgatggtatcgccgcgttgcgcccgctcggccgaggcaatgtcgtggtaggtgaatcggttggaatagtcggagaacaacaccgaccatggcggacgcacgacggttggctccgggccctgaaccgagcggctttcacgaatcgtatggaccgccgcagagctgctgccctggtccgtcgtcaagaaatcagtggaggtagcacgttctacgtcgccggaagaggaggcttgcgatgttcccatttctgccgacgatcgtgttgttcgcgttattgcattcccgaagtcactgtttgacgtgtgcgatgttcggcttgcggaggcaggcggcagcacgaacgtgcctttgccgactttggaggcgataagaccttcgtccttgagctgctgatacgcctgcaacaccgtggtgcgattgacttcgagacgcgaggacagctcgcgttcgggaggcaggcggtagccctcggccatcgcgccggagacgatctgttcacgcagctcggcagccagctgccggtacatcggcaccttgctgcgtcgattcagctcaagctgcatggcagatcgtctccttgattcgtcagtcggataccagtctaacggcagacgaatcgactacagcgacaggaagagctcgtggatgcgggtatcgtccgtgagttccgggtggaaggcggtggccaggatattgccttgacgcaagcccaccacgtggccatcgacttcggtttcgaccgtggcttcgggtccgaccgacaccacgtacggtccgcggatgaataccagtgggaagtccgtgatacgctgcggatcatccgctgcaccaaaatcggcggtggcctggaaactaccgagctgacgaccataggcgttgcggcgtacgacggcgtcgagcgcgccaaagtagacgttgtcgtcattgtcgagctttttagccagcagaatcatgccggcgcaagtgccgaataccggtttgcctgccttgatgtgggcggcgatcggctcgaacagtccggtcgaatgcaggagcttgccctgtgtagtggattcaccgccaggcagaatcacgcggtcgatggattcatcgaaatcctcggccgcgcgcagcagtttccacggcgcaccgagcttgtccagcaccgccgcatgttcggcgaatgcgccttgtacggccaggatgccggtcacgccgtgcttgacgttttcgacgtccgcggactcttctttggaaatatattcaacagctacaaccatgttgtctccttgggccttgactcccgctggcgggagcgtcaccctttattggctcccctcaaagaggggagccaaggtaatgcactcactcgccgcgagcggccatgatggtctgaatctcgtcctcgttgatgccgaccatggcttcgccgaggttttcggacagcttggcgagcagatcggcgtcctgccagttggcggtagccttgacgatggcggcggcgcgcttggccgggtcgccggacttgaagatgccggagcccacgaacacgccttcggcaccaagctccatcatcagggcggcgtcggccggggtggccacgccaccggcggcgaagttcacgacgggcagacggccgttgtcgtgcacgtacttggccagatcgtagggcacggccagctgcttggcggcctcgtagacctcgtcgtcgcgcaggccgacgagttcgcgaatctgcttgttcatggtgcgcatgtggcgcacggcctgaatcacgtcgccggtgccgggctcgcccttggtacgaatcatggcagcaccctcggcgatgcggcgcagtgcctcgcccaggttcttcgcgccgcacacgaacggcacgtcgaactggttcttgtcgatgtggtacacgtcgtcggccggggaaagcacttcggattcgtcgatgtagtcgatttcgatggcctgcagaatgcgggcctcggcgatgtggccgatacgcaccttggccatgaccggaatggagacagcttcctgaatgcccttgatcatggccggatcgctcatacgggagacgccgccggcggcacgaatgtcagcggggatgcgctccagcgccatcaccgcgcatgcgccggcatcctgcgcgattttcgcctgttcgggcgtggtgacgtccatgatcacaccacccttgagcatctgggccagattacggttgagttccgcacgattctgcgtcatgagtttcccttcgtttcgacgctgcttggtatcgcgcttcattattgaacggattggattggcccacccaaaccagtccaatttggatggggccaatccgcaacttctgcacccatccaatccggcaaccggttgtatggacttatgcatccggcacgtattcgaggaggcgggttctagtgatcgttgcaacacctgacctaccgcaaggagggtcaggtgaccagaagccaccgaaacgaagaccgtggcggggaacaccgtt

SEQ ID NO: 887 - DNA, 183452 bp, Unknown
  gut microbiota DNA sequence
ccgcgccggcgcaggtccgccttcctctgcgcggccagcgccgaatagaacggacccgaggtccacggcccggtcttcagccgtttcggccggtagggacggtacgacccgttctcgttggacgcgaaccacaggccgcgcctcagctcgcgtgacaccgtggacttgtcccggccgatcctctccgcggttcgccgaatgctcagatgctgttcgcaatgcagcttctcgatcaggatcctctcctcggacgacaggtgcgaatactgttgacccatgagtgcaacaccttcttaagttagaaacttcgaatacttccaaccctagacaaggtgttgcacttctatttagaacccggggcgtaaacacgattgccttcaaagaagatggtcgtgactgtgctggaatcaatgttcggtgctatgaagcgaagcgttggttgtgtgtctaagctggccgcattgttgaatgagtctcaacttcggggtgtcgttttatcggctgtgatgttattgtggcgcgacacgccagctttataggcgatgagtggtggcatcagatgagttcgcttgtacgtctccattctttgttgaaatatgttatgcaaagtgtgtaattggcatatgaaactgtcatatttgatgtgttgcgttgcgtttatgtgaacttattttcattgtgcatatcgttatcaatttgttatcaaggacgatcgcgagtgaaatgcgctcatttatataatggctgttgcatggctgcccttgagggacgttcctctggcatggctttgcaatgagccgcgatgtggtcgtaaccaacgtgggattcgattgtgcggcgaagaaaaaatgatggggggggagtcgccctccatcattcaggaaagggaactgaatggtttataacattcacatattgcaaacaaggaaaaccggtcgtgtggttgctgctgcggctgcatccgtgctgtgttgcatgggggctgtatttccagcgactatcggagtgactgcggcgtcggccgatgaacccgtcgaattggtcgtcaacggcggattcgaagacgatcttaatggttggaagtctggaacggtgtggaatagctccgcatcgtccattgccgtcactgcggatgatgtgcatggtggcagtggcgccttgagcgttactgatcgtacatcctctgatgctggtgcaatccagtctcttgatggcaaggtggaaaaaggacagacatataccggaagtatgtgggtcaaggccacggaagacggtgaattcaatatcactgtttgttcgggtaatggttccggatgtgaccagattgcgaccggaacggcgaaagcgggtgagtggacacaaatttcaggtactggaacgttaggtggtagtggtgatttcaccagtccctcgctggtgattgaaaacaagtatggcacgagcaatgccgacttcattgtcgacgacatttccgtaaccggttcggattctggttcctcattcgtgccgccgactacgggtacggcaacggcagccaaggctttcggcgactattcaaacccgattatcgattattggtatggcgccgatccgtgggctatggaatacaacggacgcgtatatatctacactacgggtgatggcacttctgtgaatgctgatggctcgttgaattatgactatgaatatgacagtactgggcagatcaaggacaattcgttcgctcaagtaaagaccatcaatgttctgtccagtgatgacatggtcaattggcgtaatgagggttacattcgtgtggctggagaacagggggtggccacctgggccagcaattcctgggctcctgccgtcgctcataagaccatcaacggtaaagagaagttcttcctgtatttcgccaatggcggcagcggtatcggtgtgctgacctcggattctcctgttggtccgtggaaggacgaaaccggtgagctgttgattaagggcggtactcctgaatccgctggtgtggtctggctgtttgatcccgcggtgttcgtggatgatgacgggcagggctacctgtattacggaggtggtgttccgacaggcgaggaagaacatccgaacacggctcgcgttattaaactgtccgatgacatgctgcataccgaaggtgaggctcaggccatagacgcacctgccatgtttgaggactccgggattgccaagataggtggtacttattactactcgtattgcactaatttcagccatgacaacgtaattgatggtaacacggtcggttacggcaatatcgcgtatatgacttcagacaacccgatggggccgttcacttatcagggtgagattctgaagaatccgagcacgtatttcggtgttggcggcaacaatcatcacgcgatggttcaacttggcgaccagtggtatatgacctaccatgcgcaaacggtggcaaaggaattgatgaacggcggtaatcttgacgcggcgcatggctaccgaaatactcatctcgatccgattacggttaacgaggatggttccattgccgatattgcaatgacatatgagggtctctcttcggtgaagaatctggacgcgtatcaagatggaggcattccagcttccaccattgcatgggattccggcattcagaacgcatatgacctgacttctggtgtgcgcgtggtcgatatgactacagacaattccgaaggtcagaagctcagcaatattaataatggtgagtggacgtctttggcgaatgtcgatttcgggaataacggcgcctcttcgctgactgtgactgcagctggcaaagccggaggcatccttgagattcgtcttgatgatccggattccgaacctgtggcttctatttcgattcctgccggtgatggatccgagtacgccgattacacgaccacccttgagggtgtgacaggggtgcatcatgtggtgttctccttcaaatccgatggtggtgcgaatgctcaggatgagctgtacgacatcactacgtacactttcacggagtcgcaggatgaaactccttcgactccggtggacaagtctgatttgcagagcgcagtgaatgagaattccggcctgaacgcttccgattacacggaagagagctggaaggtgtttgctgacgcattgcagaaggctcaggcggtattgcaggatgaatccgctactgaacagcaggttcaagatgcgcttgctgcattgaatagtgcacgtgccggtctgaagctggctgatgattccactgatggcgtggatttggcacaaaccggttcctctgtcttgcctggtgctgtgattgtcgcttgcttggctctcactggtgtgatcgtagcgcgagtgcgtcgcgagatgcgctagttacctcttggtaatgcggtcatcccgtagcggcagcctcgggatgaccgcacatgaaacctagaactggtacttgttcaagcgtaagttttggcagtggtaatgtccatcacttatccatatgcgggaatgtcttatcgtcattcattgctgatttgtgcgggcatgctattggaatacgcactcgatgttgagtgcttatcatgaaagtttaaaagacttatgaattatttacgacaaaaaatttcggctagtgctatcgcggtgttgtcgacttgtgggttgattttggcgccaatgccggtctttgcggatgatttaacgccatcttcaacgccatcggatggcagttacaccacgactgatagcggtgatggcacgtattccattcccatgttgaacacggatgttccggatatcagtgttattcgtgtgtcgaaggacgatccgaataacaaagacggtcgtgatgtgtattacatggtgagtaccactatggagctcagtcccggatctccaattatgaaatcctatgatctggtcaattggtggatagtcacgtacgtgtatgatcgcatttctatgagcgatgcttcatccttgcgcaatggagctagctcgtatggcgaaggcgagtgggctccgtcgctgcgctatcacaatggccgcttctacgtgttattcaatacgaacaaccttaatggcgcttatatctactacaccgatgatattgagaatggtccttggacgaagattgcccttaatcggggattccatgatccgtcattgtattttgatgagcaagggagtccttggattatctccggcgtcaaccaatataggctgtccgatgatttaaccacggtggtggagagccatgagaatatcatctctgccgaacagttcactgatgatcttggtgagactcctaccggatttgaaggatctcagactttcaaaatcggtgattatttctatactccaacgatttactggggcaaagacggtcgtacggtgatgctgctgcgcaccactgatttgcttgatggctccaaatacgaagccaaaaagtattgtctaggtgctttcgcacaaggtagccttgttgaagtcgacaacggtgatggcacgacgtcttggcatggattcttcttccgagacacatatccgaccggacgtattcccggtttgattcctgcaacgtggggtgatgacggatggcctgtgtttggggacaataatcaggtaagcgcgtcggacacctacgacaaactgattgatttgcctgctgatttggagaatctggttcgccagcgttccctggtcaattcggacgattttgataatgacgcgcctcatcagtcttatcaggatcaggattggtggactctggaggagcctcctcaggttgacgattctctgattggaatcgagctggtggacaatggcgatttcgaaaacgggactgaatcgtggacccctcagtggaatggtacgcttaccgcgattacggatggttctctttctggaaccacgagtcttgctgtgacgaatcgtggcgaatacaatggcgctggcccgggtcaatctatggatggaaaattgcagcagggcgtgacatatcgtgccagtgcaacgattcgatacgaccatgagatggacggcgtcgattcatcggctgtgacttcccacctgttttatgtggcgattcaatatgcagacggcacaattaatcgtgtggccacaggaacagtgaaacgtggggagacgactactatcacaggtgagttctccatcccatccgacgctaatgtggaaggttccaaactcattgtcgaaaccgcgtggggtgcggaaggcacgtgcatggattacgtcatcgacgatatttccctgatcggtcttgctgatgagaaggaatatccggtcgccgaagaataccaacccaatggttcgaatcttgatttggtatgggaatggggacataatccagataaccgatattggtctctcactgatcgtgaaggctggttgcgtttgaccaatgggcacaaggtttccgccacggccaaatatatgaaaggcacttatggcgacctgacatattttgaaaccgcccgtaacgttttgtcgcagcgtacctttggcggatccatgtctgtggaaacccacatggatgtcagtcatatgaaggatggagacaccgcaggcctcgctacatatacccgtagttttgcctatgccgctgtgcgtcaagaaaatggacagcgaacgttgggtgtggtcaagcgtgtctacgacaatggcgtgaaggacgcggacggtaatatcgttgacgatacgattgatcgtgacgctgaagaggcctttgtatcgggcggcacagtgacattgccagatgatgcgaccaatgtgtggatcaagtcggacaacacactggataatgcgagtggtaagttgacgattcagtattggtacagtctggacggtaagcaatggtccaagcttggcgacgagcaggggccgctgacttacgattggagcttgtcgcactttaaggggtatcgaatcggcttgttcaattacgccaaggagaatacgggtggttatgtcgattttgattactatgacttgagcgacgtgttgacttctgacggcaaagctgtggatacgtctaagctgcgttcggccattgatcaggctgactctctgcagtctgcggaatatcctatggatgagtgggataagatgctcacgctacttgataaggcaaagcaggcgttggcatccgatccttccacgcaaaatgaggtggatgccccgcagcgtgcactgagtttgcagctcgcgcaattggcggttgaccgtcagtctggtgatggcggaaatcctggtggtggtgatcagaccggtgacggtaaccagtcgggtaacggcgatcagaccggtgatggcggccagcaacagtcttctactgctgatgataattcatctgaactgtcatcaactggttcgtccgtaacaccgatggtgctgtctgcaattgccctgatgctggctggcatcagtgtcattcggatacgccgctcttcgcgctgaaatatcgccgcagcctgttggttgcagcgattgaatgtgcggaatcagtgatgtgtcgcaatggtgggttgtgcgaatgctcggcaacgtggattcgtacaacccatcctgttatgttgagaccgcggcgtgagacatggtggagcatgacatcggcgtagaatgtgcgattttggaaacaaaggagctggtgtgtgggcggctggcagttttcatttcgaatcgacggcgttctcctgatatcaagtatggctgtgtatctatgttgccgttatgtggtgatgttagcggagtgagtaattcggatatggttcgcccttatgaacatatgtatggcttatgtcgtccgccgaagcatggttgcgattagcgaaaatcaggtattgcggcgttatgtccggcgccatgtcattatcgtatggcgcactcacgatacaataccgtcctagcatgggcgtcgcggcatgagacgacgcattgtgcagacaggtgtggcgtcgaacaacgaacgcgaggtaaacgtagatggcggtgaattccagcgtggagaaacagccggtcgaccagcaggcgagcggtgaggtgcaggctgaaatcgatacgcggtccgatggtgtttcgcccatgcccaacgatgtttccaaacataacgatgtttccaagcatccggtggcgtccattcccgaatcgacgctgtcgctggccgatattgagcgtaagcgctcgcatcctgcattgtggctggcttatgcgctgctggtgattgcggccattgtggtgccgtattggtgggggcgtgcgattgcggtgaacgatacgcagtggctgcttgataatttgagcgcgcttgagccgcgcggcgccgcgtttgttgcctggacggtgacgctgattgccgtttccggccttggtctgctggttgttgacgcccatcggcgcttgtggggcgcggtttttgtgattggcttggcggcggagcaactcattgccggcctgcgcattctgaaaattgatttttggtatgcgacatatgtggtgtacggagagtcgtcggcattggcgaatgcggcgaatcttggcattatttcagttggtattggcgttgccgttttcgcggtgctgtgggtgggattgttggtgacgattaaaaaagagtcgccgttgaatgtgctgacgcgcagttgggcgtcgtttatcttttttttgtgattgagacgattgctttgcttgttgtgatgtttggcggcctgctgacgttggtctgattcgtggtgtctggtgctcctgtataattgacccttggcgtatttcgcccgcggatagagagcgcgccggcatcgggccggtagcaccgcgcagcaatataaggaggatgccgtggcactgacggctgaagaaaagcaggaaatcatcgctaagtacgcgacccatgaaggtgacaccggctctccggaggtccaggttgctctgctgagcaagcgtatcgctgatctgaccgagcacctcaaggagcacaagcacgaccaccactcccgtcgtggtatgcagctgatgatcggtgaccgtcgtcgcctgcttgactacctcaagcgcgttgacatcaaccgttaccgttccctcatcgagcgtctgggtctgcgtcgataattgaagacttccgcccgagtacctaggatggtgctcgggcgttttacatatcgccagccaacggcaacaacggcaagagggttagaggataggccagcaggtaaggccgacaggagaacccgaatgaaggggttgacacgaggaacgacggccaaggggccagtcgaaacaaggtatgtgacgtccgctgaagaggacagttgcggttcaagcgagtcgccaaaccgcaacacagtatgtaggaataaatagaaaattaaagaaggaggaaccctatggagggtcccgaaatcaaggccgttgaggccgtaatcgacaatggatcgtttggtaagcgcacgctgcgcttcgagaccggccgcctcgcccagcaggccgatggcgctgtggccgcctacctcgacgacgattccatgattctgtccaccaccaccgccggttccagcccgaaggagaactacgacttcttcccgctgaccgtcgatgttgaagagaagatgtacgctgccggcaagatcccgggctcgttcttccgtcgtgaaggccgcccgagctccgaggccatcctcgcctgccgtatcatcgaccgcccgctgcgtccgctgttcccgcacaccctgcgcaacgaagtgcaggtcgtcgagaccgtgctcgccgtgaaccctgatgacgcttacgatgtcatcgccctgaacgccgcttccgcttccaccatgatctccggtctgccgttcgaaggcccggtctccggtgtgcgtctggcgctgattgatggccagtgggttgccttcccgcgttggagcgagcgtgagcgcgccgtgttcgagattgtggtcgctggccgcgtgatcgagaacggtgatgttgccatcgccatgatcgaggccggtgccggcaagaacgcctggcacctcatctacgacgagggtcagaccaagcccgatgaggaagtcgttgccggtggtcttgaggccgccaagccgttcatcaaggtgatttgcgaggctcaggacgagctcaagaagatcgccgccaaggagaccaaggaattccagctcttcccggagtacaccgacgagctgtacgcccgcatcgacgagatcgctcacaaggatctggacgaggccctctccatcgccgagaagctgccgcgccaggaccgcatccacgagatcaaggagcacgtgcgcgaggtgctcgcggacgagttcaccgatatggacgatgccgagaaggacaaggaactcggtaacgccttcaaggaactgcagcgccagattgtgcgtcgccgcatcctgaccgaggactaccgcatcgacggccgtggcctgcgcgacatccgcaccctgtccgccgaggtggacattgtgcctcgcgtgcacggttccgccctgttccagcgtggcgagacccagattctgggcgtcaccacgctgaacatgctcaagatggagcagcagatcgacgcgctgtccggtccgcagtccaagcgttacatgcacaactacgagatgccgccgtactccactggtgagaccggccgcgtcggttccccgaagcgccgcgaaatcggccacggcgccctcgccgagaaggctctcgtgccggtgctgccgagccgcgaagagttcccctacgccatccgacaggtctccgaggccatcggttccaacggttccacttcgatgggttccgtgtgcgcctccacgctgagccttttggctgccggcgtgccgctgaaggctccggttgccggcatcgccatgggcctcgtgtccggcgacgttgatggcaagcacatcttcaagaccctcaccgatattctgggtgccgaggatgccttcggcgacatggacttcaaggtggccggtacttccgagttcatcaccgccctgcagctcgacaccaagctcgacggcatccccgccgacatcctggccgccgctctgcagcaggccaaggaagcccgcgccacgattctcgaggtcatcaacgagtgcatcgacggcccggccgagatgagcgagttcgctccgcgcatcatcaccacctccgtcccggttgagaagatcggcgaagtcatcggcccgaagggcaagatgatcaaccagattcaggaagacaccggcgctgaaattgccatcgaggatgacggtaccgtcttcatctcctccgagggtggcgaggctgctgagaaggccaaggccatcatcgaccagattgccaacccgcacgtgcccgaggccggcgaaacctacaacggcaaggtcgtcaagaccacgtcgttcggcgctttcgtgaacctcacccccggcaccgacggcctgctgcacatctcccagatccgcaacctggccaacggcgagcgtattgacgctgtcgaagacgtgctcaaggaaggcgacaccgttgaggtgatcgttcagggtgtcgatgatcgcggcaagatctccctggccattcctggtttcgaggatcaggagaacaacgcccgcccgagccgtggcgatcgcgatgaccgccgtggcggccgtggccgtggtgaccgtgacgatcgccgtggcggccgtggccgtcgctccgagcgcgatgaccgtgacttcgacgatcgtgacgaccgtccgcgtcgccgtcgctccgatgacttcgaggatgattacgacgaccgtccgcgtcgccgtcgctccgatgaccgcgacttcgatcgcgatgatcgcgatgatgatcgtccgcgtcgccgtcgttctgccgaccgtgacttcgacgatcgcgatgaccgtgatgctcgcgactcccgtgacgatgatcgtccgcgtcgccgtcgctcttccgatcgcgatgaccgtggcgatcgtgatgaccgccgtggcggttcccgtggccgtggccgtggctcggaccgcaacccgcgctacgccaccgacgacaactacgacgactaccgcgccgaccgcgaagagcgtactgagcgcccgcgtcgccgcgtccgtcgcgactttgatccgttcgaggactaaatccctctcacggatcggtcgcggcatagccgctcccctcacctacgggaagcccgtagggcttcccgcttaacggttcggcattcgaggactgatcgttctctagcttctctcgggtgagaagggcttgatcgcaaaccaaaaggcttctataccgtttcattcggtatagaagcctttttggtttttcggcttcttcgcgctgcatatttcgatgttgaataaggcactcgtgctgccgccatgtacgtttagttgtcggttgacaactattcccatgcatcaagaatggcggatgatcatcgaaggtactcatgggcgttgatcactgtggcaacaacaaaggccgggcccttgtgagagcccggcctttatgccgtatggcggcggattaatccttaaaggctaatccgttgtcaatcagcgttacagaatcgccatgcacacgaagtccagaatgaacagcgcggccacagtccagatgatcgggtgaacctccttggccttgcccttgcaggtcttcacgatgcagtacatgatgaagcctccggcgatgccgtaggagatggagtaggagaaggccatgaacacggcggcgaagaacgccggaatggcttcggcgatgtcgtcccacttgacttccttcagggaagcggccatcatgcagccgacgatcaccagcacgccggcggttgcggcggacggcacggcggagacgaccggggccaggaacgcggacaaggcgaagcagatcgccacaaccacggaggtcaggccggttcggccgcctgcggcgatgccggcggaagactcgacgtaggtggtggtgttcgaggtgccgcagatggcgccgatggaggtggcgatggagtcggcgaacagggccttgtccatcttggaggagaagccgtggccgttctccagagccttctcatcctcggcggagaagatgccggtgcggcggccggtgccgatgaaagtgcccagggtgtcgaacgtatcggacatggagaaggcgaagatggtcacgatgaccagcggcagcttggtcggatcagagaacagtgccgggaagccctcggcggagaagatcgcgccgaaggtctgcggcagctgggagaaggtctcgctgatggactgcgagttggaccaggtggtcacgccgaacgggatgccgattacggtggtgatggcgatggccagcagcatgccgcccttaaccttcatcacggtgaacacaatggccagtacgaggccgatcaggaagacccacagcaccttgtcgttgaagttggccagacccggggtagccgcaacggcaccgcccttggcggcggccttcggatcgccgggagtgaacttgatcaggccgacgttcagcatgcccacgtaggccacgaacaggccgatgccgccgccgatggcgtgttgcagggactccgggatggccaggatgatcatcttgcggatcttggtgacggtgatgaggatgttgatcaggccgcacaggaacaccatgcacatggtctgctgccagctgaagccgaggccgaagcacacggtgtaggtgaagaacgcgttgaggcccatgccggcggcctgggcgtacggcacgttggcgaacaggcccatgaccagggtgccgatgatggccgcgatgatggtggccaggaacacgccgccccacggcatacccgtctgcgacaggatctgcgggttgacgacgatgatgtaagccatcgcgaagaacgtggtcaggccggccagaatctcagtcgagacggtcgtgccgttttccttcaaatggaagaacttctccatttactctctacttccttgggtttatgcggggctgcgcaccgcgtgcataatgctgcggctggccccggcgagaattgcgactcgccctgatcggcctgcccaacgcgcgtcaggcgctgcgcacccaatcagaaccgtggccgattatagcttgtggaggcaacgtgaacgggtccgggagtagactgactgccagaataattcggaacaactcaggggacacgcaggacacacccgtggaaggaaggcgcgcgatgaaaccggccgtcgaagtcagcatcacctcttggaagaagaatgtcgtcaagcccggtcaggagtacggccgcgtactgctgatgcccggcaccggctacaactgcgaccgtccgctgctctactggtcggcccaggctctggtcgaggccggctggcgaatcgaccgcatgaacgtacgcaacgcttccgacgacctgtccacggtgattccggtcctcaatcaggcgattgacggctgggtggccgccgcgcgcgagtccggcgcgggtaaagccggtgattccggggatggcgttgccgccgatgattctgctaccgtgctggccgatggcgcagctggctcgccgaaccgtgattccgacaccccgtccggccctcgcctgttgctgatcggcaagtcgctgacgacgatgacctacccacatgtggcctcacactacggtctgccgttcgtgctgctgaccccggtgctgcatcacgccgacttcgatccatccgcccgggtgattccggtgccggctgtcggcgatgatatcgtcgccgaatccgaggccccgagcgtggccgaagcaagggcgatcatccgcgcggaacaggccggccagtcgcacgccgccagctcccgatactccggcccggcaccgctgatctgcgccggcaccgccgacccgttctacgatcaagcccgcgccaacgcgctcaccccgcacgtgcacgaatacccggatgccaaccattcgatcgaggtgcccggccactggcgtcgctcgctcgactatctgaaggaagtcaccgcgtccgtagcccagtacgccgccacgctgtaatgccccgcgacacgcccgaattctgcaatgtcgctgaccatccgtaatctaatcatccgtaaaccacagaccgttggttgaagtgcgcgcgagtgcatttccgaagtttggttcgccaagccagcgcaggttgagagatataagcccgtcaagggccggcgaaggtcgcttcgcgagattatattgctctgcctgtgcgcagggcttttttgttgcccggccgaaagttccgaactccaagtcaacggccgacttaggaaggaacgccatgaagaggcccgaaaaggaagcggtagtcgctcagcttacggaagaattccgtaacgctgacgccgtctacctgaccgagtaccgcgggcttaccgttccgcagatttccgatctgcgtgaaaagctaggccgcgatacttcctacaccgtggcaaagaacacgctggcacgcatcgccgccaaggaagcgggcattgagggtctcgacgagattctctccggcccgaccgccatcaccttcgtgaagggcgacttcatcgaggctgcgaaggtcatccgtgacttcgccaaggacaacaaggctcttgtcatcaagggtgccgccgctgacggcactgtctacgatgccgagggcgccaagaagctggcagacctcaagtcccgcccgcagctgcttgccgaattcgccggcgacatcaaggcatcgatggccaaggccgcgtacctgttcaacgctctgcctaccaaggctgtgcgcacgatcgacgccctgcgcgaaaagcaggagaaggctgcctgatttacgccctcacggcatgaatcagtcgcttcgataatttaaacaataaggtttattaggcagcggatctaccacttcgtccgccgccaagattgaaaggaagccataatggctaagtacaccaacgatgagctgctggaagccttcggcgagatgaccctggtcgagctctccgagttcgtgaaggccttcgaggagaagttcgacgtcgaggctgccgctccggttgccgctgttgccgctgttgctggcgctgctgctccggctgaggaagagaaggatgagttcgacgtcatcctctccgccgtcggcgacaagaagatccaggtcatcaaggctgtccgcgccatcaccaacctcggcctggccgaggccaaggctcttgtcgacggcgctccgaaggccgtcctcgagaaggccaagaaggaagatgccgagaaggccaaggctcagctggaagaggctggcgccagcgtcgagctcaagtgatttgtgcggcataagccgcaatcacagcttttcgaggaaccccgcacctgtgtttcaggctgcggggtttccgcatactgagtagactagttgacgaggacgaggcggagaacgcgatccggcgtggaaacacaaagctggcaatgagcgaaagttgtcaattctgtgcccagtaatccgccaaaagccggtaaaagatgacacaatggcacgtagtgtggtcaaatagtgtgtccaggaaggcggtcacggtgagcgagtggacggtgaagatcaacggtgtcgaccggatcagcgtcaagccgggggagtgcgtggaaatcggccgtaagccgttacgcccccttgccgatgatggcaacacccgccttgacgtcgccgatcaaaccaaatcgatgtccaaacggcacgccatgttcacggtaaaaagcaatggcacggcctcggtccgtgatcttggatcgaccaatggatcgtatgtggtgcgggaaaatggcgatttgttgcgcttgccggccaatgccgagttcctgttgccgacgtctcccatgcgcatgcagttcggcgatgtgcctgcggacttcattcgtgtcgacgatccagtggcaaagccgctcgacctcaaggtgcctgatttgtttggctatgcggttcacgaagcaccgcaggagccggatgcggcggatatgtccgtcgacgatattcttgatttgcgggccggcgagccgaccgccatcttcagcgcggataatgttcgacgcaaggtcgacgagcttgaacttggctcgctgaatatcacgcagccagtgacgaaaaacgatgagccggccataccccgtgatctgttcgcggatgcgttggcccagcatgccgagcaggagaccgaacgcaaaaaccagcaggccatgaactccgtggcactgccgaagcagcagaccgaacctgagtcgacgattgtaacgcctgcatccaagcacagcaggatctccggtattgttccagtagatgccatcgcccatgccgttgttaagcacgctcccagcacaagcgagccggcagtggcgtcggcggcggttgttgaatccgatgtggtggctggcgcaagcaagtcagccgaaaacgttcagtccgctccgaataccaggaatgccggcgattctcagccggcggacactgtcgaacagcatgctgaagttgcccagcctgaagccgcccgggaagccgaagccgctcaatctgaaaacacccagcctgagaccgctcagccggcaaccgcccagtctgaaaccgaccagccggcagctgacgtaccggacgatcagcagcggaccgcagccgaagcatatcaagaagccaccgcagcaggcgtagcagaccagcagccggctgccgaaaccgcccagcagtcggtatccgaagcatatgatatcgactccacgggcgtacacactccggtcttcgagcccggctcggtgttcgagcgtgtggccaagggcgagctgaaagcacaggagccggcagtcgaagtcgatggcctgacctctgacgaggcaaaaaccacgcaagatttcaatgttcaattcgaagtcgcccgtcatcccgaattgctggcgttcctcgccatgaatccgtacctgtacgacgacatgtattcttggctcgccgcccgtggcgaggccgatattgacgaagccctgtctcacaacaagggctatcaggaataccgcgaagcggttggaaagtgagtcgagagatgacccagagccagactcagaaccagaatctcacggaaggtctgaatcgcatccgtcgctggcgtgaccaataccgcagcatgcagccgccatcgccgctcgaggatgtgaatcaactggccgcgaagctggagatgacccatgcccatccctccggcatcgcccagctgttcgcttccggccatgtccggttggattcgttgttccgcgacacgggtgtgcttaaggccgccgaacgccatattgggcgcgtgctggatgaccaggccgccaaacgcaggatttccggcgtggcggagttgtcgctcgtggtcggcgtggccacatggaagggcaacgcgctgccggtgctgttgtacccggtgagcgtcacgatcgaggatgatggcttgtcgaccaccattcgattcaccggtcgcgtggccctgaacgtcgcgttcgtcaatacattgcgtgagcagggggtgttcctggatgaggattccctgtttgacggtgccagctatgacagtggcactcccgaaacttccgcgatgttcgcccgtatttcgtccgaagcgtcggagcgtatctccgacttcgccatcgagcgccagattgtgctcggatgcttcatggacccctcgtcgcagatgatcagcgaaagccgacagttcatcgaccagctggagaacggctccaccggcaatgtgctgttggacgcgcttgccggcgacgaatccgcccgcaccgcgctcaaagatgccaatattccgcaatacagtcctttcgacgtagacccgcatgccgagtacgaagtcggcgatgtggacaatacggtgcgatatgccgcgtcacttgctgccaatggccatagcatcgtggtcgacggcaccttcccgaagggcaccgcggagcaggctgtggccatcgcatcgcgctgcctgatgaatggtcgttccgtgctgtacgtgcccggcgtggccgagcagaagcgtctgttcatccagacggcttccgccaatgagatgaaggcgcaggtactggatgtatccgatgaacacgccaacgccgcgcttgataagcagctgattgccgcagtcggattccaaccgggagtcgccacccagcgattcgaccagctggccgacgaactcgtgggcgtgcgttcgcgcttgacccgctatctgggcgacctgcacgggggcaacgataagtggaatgtgtccgcatacgagaccattcagaatctggcccgtatctccgtgctcccgacgcaccctgccacccacgttcgacttgacgagtcaagtgccctgagcatcgccaacgatattgacacatggatcggcaagatggaacgcgccggcgagctcggcgaatacaccatcggcccggaagacaccgcatggtacaaggcgtccatcaccactgaagaacaggcagtaaccgcctaccagcgcgtggacgatttgctgcgtcgcttcctgcccgccacccgtgagcaggtggcacgcaccgtgcagacctgcggattcccggttcctcccaccacccgcgagtgggagcgtcaggttacggttttgaagaatctgcgacgagtgcttgacgtgttccagccggagattttcgagcgagacatcagctccatgatcgaggccaccaagccgaagagccagcgcaaggccgagggcacgtcgatgggattctgggagcgccgccgccacatcaaggaagccaaggatctgctgcgcgtcggcgcgcaggtcgaggacttgcacgaagcgttgaaggtagtcgccaagcaaggggagcagtggcatcagttcgtgcctcacggcggttggccggtgctgcccagcaagctcgacgagatcatctccacccaagaggcgctggtcagcaatatgaccgcgctggataccgtgctttccaccacacccgctggtggcaatctggaaaccgccgatttcgagaaggtggaagcacgcctgaaagcactgctggatgatcgcaaggcactggacaccttgccggagcgttgcctgctggagcaggaattcgcctctgccggactgaacgaactggtcgccgatctcaacgctcgccgagtgagcgtggagcaggtgcgcggcgaagtgcagctggcctggtggaccaccgtgtttgaggacattgtgcgttcgtccgccatcatctccaaccaggatggtgccgcgctgcaggccgcatccgaccgctttgcgcaggtcgatgtggagcacgtgcgctccatcggaccgatggtgtcgcaggaatccatgcgccgcctgtgcgacatgctgttctcccgcactcaggaagccaaccagatgcacaccgtgctggcagggcgcgccagtgtgtcgctgagcaggattcgccgtgatcatccggagattctggccgcggccaagccgattctggtggccgcgccgggtacgctcgccgcactcaccgagccgggtgtgctggctgatgtggcgattctcgatgcgtgcgcgcacattcccgctatcgagttgctgtccatcatcggccgcgtgcagcaggtggtggtgatcgcccactgcgcgacggtaaccagcgaaagcgtcaagcagctgatcgacacgttgcctcatatcgaggtggatgctgccccatctcgccgtgcgccgcgcctgtccgcattccttgaatccgagggatatggtcctgttcgctatgatgtggccaccgagccggctgccggtgaggtgcgattccaccgtgtggaagcgagcggtgtgccggttatgtcttctggtctggtggaatccagccagccggagattgatgaagtggtgcgtctgattacgcaacgtgccgccggttttgccgtggttccttccagctatcgacttgtggtcgtgatgttgaccgacgcattccgcacacgcttgggtgccgaattgaagtcgttggcaggcaaatccaaggcgatgggccgattcctgcgccatgtgcggttggtttccttgcgtgacgtggccggaggtcgtgccactgacgtgattctgtcgatgtgctatgcgaaaaccacgcacggacgtctgcttcagcagttcggcccgctcgaaagcacaggcggtcgcggactgttgctggatgccctggcattggcggaccacagcttggatattgtgtcggcctttggttccgaagatttggacgaagaacgactgcaccagtccggtcctcggttcctgaagaccatgttgacgtgggccgaacagcttgacgaccgtccggtgcttccgttgcgtgatgcggcaggcggcaacgtgctgttcgacgatatcgccgacaggttgcgcgcgcgaggactgaacgctgctgttgattatggattcgacaagggcgtgaagattccgctcgtggtgggattgaaggacaagccgtttgccttggccgtgcagaccgatgacgcgaactttatgtccgtgcaatccacgcgtaggcgtcatcgtttgtcggcacaggatctcatttccttgggctggaatgtgatgaccgtctggagtgtcgccgccttcgtgaaccccgataaggaagtcgaccgtatcgtcagccgtatcggtgagatctatcgcgaggttgaataaccatggcggaatactcggctacacggcgcacaccgcgcaagcacaagcgcgtggtgatgaagggcactgagcagtttgacgctgacggtgtcaaactcgagcccggagacatgcagaccgaccaacaacggcaatccgacgacgacaaacgcatcctcggcgaactgccgccgcattgggccgtttttaacgagcgcgagtaggagttggggcgcactctgtgcgccccaacactgtgttttccgcagcctgtcggctgcggaaaacacagtatcggccgaaggccgattccgcttcctaccgcacaacggccataatcgctccggcctgttgcagctccataaccttggccgcggcctccggcggcattgcgaacgacaccagtcggtcgttgtctcccaatgcgccagtcgcatccggtttgccgacattcatcaccgtggcgttctcggccagcgtgcaatcagcgccttcgcaaccgacggcggaaaccagtctcacctgatcgccggccaatacatcgtcgacgctactggccaagcggacttcaatcaccgtagtgccggtcggtgctacgggcgcatctctggccatatgcgtggaaatgggatcggctgcttcgatatcgatttgcgctaccttgcccaccacatcctcaatattgcctgtccaagacgggcctgccgcagataccggcatatcagccaactgaacgtcggcggccagaataatgtcaccccgtcgaatcgagcgggcggccaccaccatcggctcggtctccaccacggccaatacggcttcaatcccaaacagcactgcgagtcccacgcacaacgcagcagtgagtcggcgcaaggcatccgccatgcgccgtcgccgcaatgagccgcgcgcaggcggcttaataaacgaaaaggtcaccatgcaaccatggtgacctgaagtttttcgtaagcgcaagccaaatcgacctatgtggttctagcttgccaagttatccacaacgcttcaaacccgtgcaacagacagtgcccgtagtgccaatatccgcggcataccgccgtcgacaccgtcgtttacagaggaaaagcgggtgtacagaccttacttgccggatttgtcggtgcggtagaagccgtgacccttgaactcaatcggcacggcggaatacaccttgcgcacctgctcctgcgagcacttggggcacacggtaatcgggtcgtcattgaacgactgctgttcggtgaagtcatagccgcagttcttgcaacggtaatgataggtaggcaacggattcctccaacaaagtcatatttctcgcggatggcccaaacgccatgccacgcaaccgttcatatcctagtcgccaccctgacacattggcgttacggtcttactagccagcttgctgttgccactctggttccatcggccagtgtgcgtggctggttggtcagtctggcttgcgccgagtatcttggccggccggtcaactcagccggcccgattcgctaagccgccggtatccctccggcgtcagcactccgtcggccggcacatcatgtggttcggccggcaaatcggtgtccaacacctcccacggccagcacaccgcaatcaggggacatgcgggcttgcggcgagccaaggcccggtcataccagccggctccacgccccagacgattgccctgcgggtccactgccaaagccggagcgatgaccagatcggccttctccaacgcttcgggcggtagaattgcgccagttggctcatcgggtctgtgatggacggtgctgggagagctgcagctaccggcattgttcgcgccacccactgcatccatcgagcgcaatgattccaatgaatccagcacactccagccaatttccaacccagaccccaaccttggcaccaacacgtggcagccatgagcccgcagccatcgcaacagtggccgggtttcgatttccgaacccatcgacacatatgccgccactgtgggaccatcctgaatcatgtgtgctgggaaccgtcgcaccagcaattcaccggccgctccgcgttcttccgctggaacgcgcttgcgccgagacagtatatggtggcgcagcgtcgctttatccgtcttctctgttttctctgtgccgctgtagtcgctgccgatattcatgccactgcccacttcgctcataccgcacaatctagtgtttccatcgtaaaacgaaagtggccacggtagcggcgcaagaccttcatatggctacaataaaggccgtgtcagttttccagtcgattaaagaggcgttcaagctggaccaccagatccgcccgccacgtctcacccatcccggttttccgatagtcctgcgccccctgaccatggatgatgaggacggctggaacgaagtgcgctggcgcaacaacgactggctggcaccttgggaatccggtgacccgatgcatggcggctccatcacattcaatcaatgggtgcagcggcagcgccgtaacgagcagcatggcgtcggcgtgatcttcgccatcgaataccagatgcgtatcgtcggccagatttcgttgggagccatcgtgtatggtgccatgcgtaccggcgtggttggttattgggtcgatcaacggtgcgccggccgcggattcgcgccaatggcactggccatgcttgccgattgggcgctcggagacccattcgggcccgcgttgcatcggctggaaatcgccattctgccggataatgcgcgttctttggctgtggtgcgtaaggtcggagcccatcatgagggactgcgcgagcggtatatgtatgtcaatggccagtggcgtgaccacgtaacgtttgcgctgttggctgaagatatggggcaagggttcgccgctagactcgccgccgccggttccagataagcgtcgaccggaagaattccgctccgacacgcccggacggaaagccccagttcgtcggcacgtctcctatccttgactctatgggttatgagtcactgagcactgtcgtcgtgctggtgattgtggcgattattatcgttgtatggctgcccgtacgtacggccaacggcatgaaacgtgtggacgagcaccggcaggatcgttattcgccttccctgcatatcgttgatgcagagaacggcagacgattcggagacatcaagccgcataaggcgaaaggggcagcaatgccagcatcaacaccgtcagcgaggctgacatctgagcacatcgcccatgtgcgggaactgcgccgcgcggccatccgccgccggcagattctcgccgtatgcctgcttgccataaccgtgttggtgtttgccgtatcgttccccctgcatttcagtccgctgcttgctcttattccgttcgtgctgttgctgctggtgctggtgctgggagccaatgcctcacgccaggcccggcaatgggagcgcaaggtggtccgctacgagcgggctcatagcggtacgggctggtccaagaaaccgtctgccgagtccaaggacagcaagcgtgtgaacaaggccgaaccggttgcggccgtaactgcgcctgccgagaagcctgccgagcagattgaggatgctgccaccgaggtcatggaacagcggcagattcgccgcgcgttacgcgatgccgagattgagcaggccaaggccaaggcgttgcgtcagtccgccgccgcatatcaggccgcggaagagcacgccaaacagtctgagaagtctgatattgcacagtccgccgccgataagcctgccgccgagccgtctactatggtcgatgaatccgccgaccgtaagtccgctgccgaaaccagcgaatcttccgccacacctgatgcctccgttcgcacagacaagtcgattgagtcggacaagtccgtcgcccctcgagttgaaccatcgcttacggtgcgtgacgagcgcgatgagcgcgacgatgccgctgccgctgccgatgccacgtcggaactggtcagcgtacgccctgcccgagcactggacgtcttcgatatgtccacctcgcaggatctcatctccttcactttgggtggggaacataacgccgacaacgctccggaaagcttggagatcaagtcgacccgtcaggtgtccaaggcggaacctgtcgaacccgcagtggcggaaaagttgattgacgaggcccgagccgtcaaggccgcggacgacgccaaggctgtcagcgccggaaacgctgtagacactgagccggagcagcgcgatgatgccgatacggacgccgatgacgaggctgcaaacgccgcccagcgagccgcattccacgaatccgaggagcgtgccgacgtcgaagcgccagcggcgaccaccgattcgttgggcgcaggcctggactccattcttgcccgccgcggcaactgagcgttgcgattcgacgattttctctcacagcgttagcactcgagttggcagagtgctaataatcgcgctacgatgtgtcctagcgcaaagggacaacgcaagtgatcgtcagcctcttgaggcgttctggcgcggcattatcgaactacaagtagatacgaggtgacccacagtgtcgattaagctcacaccgttggaagacaagatcatcgtcaagcaggccgaggcccagacccagaccgcttccggtctgtacattccggacaatgccaaggagaagcctcagcagggtgaagtcctggccgttggcccgggccgtcgtgacgacaagggcgagcgcatcccgatggatgtcaaggtcggcgacaaggtgctgtactccaagtacggcggcaccgaagtccactacgagggtgaggactacctcatcgtcggcgcccgcgacattctcgccatcctcggctgattagtcgcctagcgaacttcaacaaccccgactgttcccgcggatagtcggggttttctcttgctaggcggaaaggggctccccctcagagaggggagccgaaagctgctcccaccaaacgcccagccatgcctgctatgcataaaggtgcatgcgcgcaacgtagttgagttcggcgttgcaccgcatctacactgggtaacggattggggtccctatggaagaggctcagttggcgacttggccgagcggcttaagacattttgcacaagacggcagtagatcgacggtatgttgttttttccgtgtcgcaggttcgtggtgtcgtcgcgctgtgccaatggttgtctctctaccgacgctgagtgccgtggcatgaggccagcgtcggcagtgggccacggaatggcgatgtgctgatgctgagccgcgttggcgtcgttatagggccagtttttggaccattgccgacggcaaatcggcgttttgtgtcggcgacggtccaatacctggcggtctgctgacgataagtgccgtcatcgtcggcagaccgccaggtattgtccccgtgccgacgtaaaaagccctgccatcgtcgtcaccgagccattttgtgactcactgacggcggcagcagggcggaagaggccgaaatcatgcgcgcggtgcggtctcacacctcgaatccggcctccaccagcgcgtgatcgatgtcgcgaatcaaatcgtccgtatcctccagacccacggccagacggaagaagccgcggtggaactcaggcgggtacaggtactggcgctcgtcatcctcgccgaggaacacgatcagcgattcgtcatggccgagcgagacggccgacgtaatcacattgagcttggaaacgaaccggttgtgcccgtcatgattggtgtcgaggccgaacgacagcacgccgccgaacccggagtccgggcgggccagctggctgaccgccacctcgtggtgcgggtgcgattccagaccggggtacgccacgaaacgcaccacatccagcgattcgagatgcttggcaatcgccaaggccgaggcgtcgtagggcagcgcgtaggtgttcgccagcgtgatggggcgacggatcgcgccggtttcggcgtcgaccccgttaccgaggtgaatggccagcgtgccgaatccgagcggctggtcgtcgaatgattgtccgtgatgtacaagatcagaagccatgcgcccagcatgccggcatgcgctgtgccgccgcaagcaggcgacgccactcgaaaaccgcgccattgcaaggttctggaacaccatataagaaaaatgattggtagaagtgcggggtgcagccttggtcggggctgtttgcagggccgaagcggaccctgaaaccacgttgtgagacacgccgataaaaccgcagaattccgcggtaaaacaaggttcacgtagaggtcgatttgcgtacttggaaaatatgtgattatatagccaagttgcctgttgaggtcaaacaccgcggcgggaaacagactggcggatttcccaagcggtcaaagggagctgactgtaaatcagccgcttcgtgcttcagtggttcgaatccactatccgccacgccccgatagctcagtggtagagcacttccttggtaaggaagaggtcgtgagtccaattctcactcggggctctctggcggggtagctcagctggctagagcgtacgactcataatcgtaaggtcaagagttcgagcctcttcctcgctacaaatcgcgcccgctaaccggtgggcgcgcactatacctaagaacacagaggtgaatgacaatggctaagagcgccgacatccgtccgggcatcacgctggcctgcaccgagtgcaaggagcgtaactacattacgactaagaaccgtcgtaatacgcccgaccgtcttgagctcaagaagttctgcccgcgctgcggcaagcagaccgtgcaccgcgagactcgttgatcgcaagcatcacagctttacaaaacccggcccattcggccgggtttttgcgtattgcctccggaggcgagtggcagggtgcggaatcagtatccgcatcgcgtgagaaacggcagaaatcccgcgtctgaacgaacccctcgcgggcgttctgtcgtttcgggccgccaaaacggcagaaatcccgcgccaccttcgttcagacgcgggcgttctgccgtttcagccgatgattgcctcgatatcgcacctgcgccactaagatagtaagccatgacaagctttgcagacatcaccaccatgggcgtgggcggccccatcgcccatttcatcgagccgaccacgcgcgtgggactcatcgaagccgtggaggaagccgattccaaaggcctgcccttggtcgtcgtcggtggcggctccaacctgcttgtttccgataagccttttgacggcgtggtggttcgagacgcccgacgcctcatcactgtgccggacgaggctgcaccggtagagggcgaggatcgcaccgtgcatgtcaatgccgaggccggtgccaattgggatgatttcgtggccttcaccgtagagctcgggctcgagggcgtcgagggactgtccggcattcccggcacagtcggcgcttccgtggtgcagaacatcggtgcctacgggcaggaagtcgccacttcggtcgaatcggtggaagtctgggatcgagacaccaaaacaacgcgcgacctcacacccgccgatcttcgattcggctatcgatactccgcactgaagaccagcatgtacgccggccccggccggccggccggccgattcttcccgacgccacgttacgtggtgctttccgtcacctttgccctgacccactcggccgaaggcacggtaggttacggacagcttgccaaagcgcttggcgtcgaagtgggcgaccgtatggccaccgccgacatccgcaaagccgtgctcgcagtacgtgccgccaagggcatgctcgaggaccctactcgctacgtcttgcctgacatggccaccgccaagcgcgaggccaatatcctgaccgatctggagcgtctggcctccctcaatgaggccgccggcattcccgttggcgatgacggtctgcctgctcccgactacaatcgccacagctgcggctcgttctttatgaatccgattctgaccgccgaccaagcggcggccctgcccgaagatgcgccgaagttcgacgcgactctgcctgacggcactcccggcaccaagacgtccgccgcctggctcatcgaccatgccggctgccataagggatataaggtcgatgcggacgcgccggccagtctatccacgcagcacacgctggccttgaccaatcgtgggggagcgagcgcggccgatatcgcagctttggcgcgtgcggttcagcaggcagtcaagagcgcgttcggagtggacttggtgcccgaaccggtctgcgtcggtgtgctgtaatcgcgctattgattgatggagtgggttattaatcccatatattgcggactctgagtcttattaatagacaagacacgcgggctcttctatactcgattgtcggtattgtgcgcattcggtgcgcaaacaacagagaaaaaagaagagcactatgcaactgttccgtacaaaatccgtcgaacagaccattgccgaaaccggtgaagagggccgcaagctcaagcgcaacctgacttggtgggatctgtcaatcatgggtgtggccgtagccgtgggcgccggcatcttctcggtgggcgcgcaggccgccgccttccacgccggcccggccgtgatcatcagcttcctgatcgccggcatcgtgtgcggcgcagccgtgatgtgctacgccgaattcgcttcgatgattccggtggccggctccgcctacaccttcacctacaccacggtcggcgagatcatggcctggatcatcggctgggatctgatcctggaaatgctgatggccggctccgtgatttccaaatattggggcgtatacctcaacgatttcatgcgcctgatgggctggaacgccaacaccaacctgacgttcggctccttccacatcgatatcgccccgattatcatcgtggcgttctttaccacgctgctcgtattcggcaccaagatcggcgcccgcgtggacggtgctatgaccgtgctcaagatcgccatcgtgttctttgtggtgatcgtcggcttcttctacgtcaaggcctccaacttcaccccgttcattccgccgagccagccggcctccaccgtggaaggctcctccgccgtcaccggcgtgatgacccagccgttgtggcagttcgccaccggcatgaccccatccgtgtacggcgttcctggcatcctctcgggcgcggcgctcgtgttcttcgcgttcatcggattcgacgtggtggccaccgcctctgaggagaccaagaacccgcacaagaacgtgccgctcggcatcggcgtgggcatgctgctcatcattgtcatgtacatgctcgtggccgtggtgaccaccggcatggtctcctatgccgatctcgccaagcaagacagcccctcgctggccaccgccttcgaactggtgggcgccgactgggccgccaagattatcagcttcggcatcgtgctgggcctggccaccgtggttatggtgctgttgctcggcctgacccgtatcgtcttcgccatgagccgcgatggtctgctgccgcgcggcctgtccaagaccggcaagcatggcaccccggccgctctgcagatcgtcgtcggcgcggtggtggcgctcgtggccgccttcttcgacatcggcgtgctctccgacatggtcaacatcggcaccctgtccgccttcacgctggtggccatctccatcccgattatgcgcaagaagcgccccgacctgccgcgcgccttcaagatgcccggcagcccgtggattccgatcctcatcgccgtggccaacttctggttgatgctcaacctgtccgtgctcacctggattcgtttcgtggtgtggctcgtggtcggcttcgccatctacttcggctacggctactggcatgcgcgcctcggcaagggcgacctgaccgaaacgctgtccgccgaaaccgataaggccgttaacggctgagagcgaggagcgtcccaacaggcgcgtacccttgtatcagtatttgttaaggaggattccatgccatatgtaatcgctcagccttgcgtggatgtcaaggacaaggcttgcgtggacgagtgccccgtcgactgcatttacgagggttcccgctcgctgtacatcaaccccaacgagtgcgtcgactgcggtgcatgcgaaccggtgtgtcccaccgaggccatcttctatgaggatgatctgccggacgagtgggcttggtacaaggatgccgctgtcaacttcttcgctgaagtcggcgatttgggcggcgcttccgccaatggtccaatcggcaaagacccggaacaggtcgccgcgctgccgccgcagaaccagtaagctgatttgcggataagcgctgcacacagcgcatagttcggattgaaccctcggtctatcacggccgagggttcgtcgtatcttaggaacataccgtccaagaaaggggttctcatgggcttccacgcatattcgtcgccatacgactggtctcgtatcgccggcttcaaagccaccgccaaaaccgtgccgggtggcatgatcgacctgtccgtaggctcgcctgtggacccggtgccgagcagtgtccagcaggcgctggttgccggcgcagacgcccccaacgcccatggatacccggtcaccgccggcaccgccgaccttaaggccgctatcgatacatggttccgcgaactgcgcggggtggatctgaaatccatcaacgctgccgccgtacccaccgtgggttccaaggaggccgtggcgctgatggccagcctgctgcaccttggcgaaggcgatgtggtcgtccaaccggctgtctcctacccgacttacgaaatcggtacccaacttgccggcgccaccgtggtcaaagtcgatgatgtgaccgacgtcgattcctgggtgaatattccgaacgtcaaggccatctggatcaactcgccgtgtaatccctccggcgaggtcatctccgctgactggctgaccgacatcgtggctgctgcccgtcgcatcggtgccgtggtgctctccgacgaatgctatgcgttaatggactggcgttcggtgcgccgcaatacagccgcgtcctatgcgcctgccgcgtctgcatctgctgcgtctgtgcctgccgcaccggtggccgaatccaacgagcccgcctccgataccgcattcagtctctccgccacgccatgtgccctgaatccacatgtgtgtgaaggttcggcagctggcatcctggtgctctactcgctgtccaagcagtccaacatggccggctaccgtacggctctgattgccggcgattgccggctggtcaaggaaatggccgaataccgcaagcagatcggccagattatccccggcccggtgcaggccgccatggccgcaggtctgaaggacacagccgctgtgcacgagcaatgggggcgttaccgtcgccgtctatccgcgctggttgacgcactgaaggcatatggctattcggcacaaatgccctccggcgcgctgtacgtatgggtcaaggccaagtccggcgactgctgggccgatatggccgagctcgccaaaatcggcatcatccccagccccggcgaattctacggcgctcccgcctacctgcgtttctccgccaccgccaccgacgaggccatccgctccgcctgcgaacgtctgcaatcggcccgcgcctgacgacaccgactaccgccggggcgccgccgtggtattgcggatggccaggaacgtgcgcgcggtctcgaacggctcgcccaggtcaatgccgaacgtcgcggaatcaatcagcgacagcgccttttccgctgccttgcgccccagggcctgcggatcctgatgaatggtggtcagcccgaactcggccgcatagtcgctgtcgtcgaatccgatcagggacatgtcgttcggcacgccgatcccggctttgggcagcttgtacagcaggggcagcgccaccccgtcgctcaggcagcatagggccgtgggcggctggtccatgacggtgatgcgcgcgatcgcctcgtccacggtgaagtcgttgcggggcagggctatggtcaactgttcgatatcctcatacgccgcacaggccgattcgaatctctgcaggcgcgagtccgcactgtattccatcggcgcctccgagacgtcgatgcagatgtaggcgatacgccggtgccccagggcatgcaggtgattgatggccatgcgcatgctcttggcgttgtctatggacacggtggcgttgaacccctcgttgtgcggcacgttgacgccgatcagcggcacgcccatgccctgcaggttggagatctcctccatggttacgttgaacgaggccacgatcaccgcgtcgacattgcggcgcaggggcagctcgtcgaagaacgacatgtgctgttcggtgtccgcaatgccgtagagggacacgtcgtagccatgggtctgcagcacctcggtcagccccttgtacagattggagtcgaaccaggtggcgatcgcctcgccggtgagcatagcgatacggaacgtgtgcttcgatttcagcgcggtggcggaccgggagatggcgaagtcgagttcgttggccgcttcgatcactttcttgcgcgtggcctcggtgacgatatccggtttggcgaatgttcgtgacaccgtggccacggacaccccggccctgacggctacgtcgtagatcgtggaatgtatcacgcgcgaaccttcctcatgggtgctcgataatggccacaatcataccatgacggaatgtaaccgtttacagaaatcctgtaattatgccgtttgatatcaataaatatgggtgttaacgtatacatcacgacagtcgcggagtagcgaagtcgtgaagtgtaaatgaaaggagaagcagcagatgaagtccgcatcgtcttggaccgagcgctggtcgtcctccgggcatgatcgacgcccgaaccgtatggcggcaaagacccgcagcatatcccgcgccatcgccgccgtctgtgccggcgccgcatgcgtggccgcactcgccggttgtggcacatccaccgccggaaacgtcactctcgaattcttccagtacaaggtagaggcagtcagccagttcaagaagctggtcaagggattcgaggcggaacaccccaacatcaccatcgacatcatcaacaccgccgatgccgccaccgatctgcgcacgcgcttcgtcaagaacaaggtgccggatgtcctcaccgtggacggcggccgttacttcggcgaattcgccgcctcgggaatcttccaggacttcaccgacgacgagatcctcgacaacatcaacccgcagatggtcaagctgctcaaggatctggccaaactgtacgacaccagcgccgaccgcgcgtacggcatcccgttcgccggcaacgccaacggctacgtcgtcaacgtggacctgtggcgtcaggctgggctggacccggacaacctgcccgaaacttggtccgagttcatcgccgcgatgaagcagatccagcaggccggcatcacgccgatcgaaggcagcctcgccgaaccgtggaccactcaggcgccgttcgcctccctggccggcacacttgtgccgatcagcgaatactcgaagctcagcggcggcaccgccacattcgccgacctgtggggtcccgtggcggaaaaggaagtcgagttctaccagtacacgcaggacaatccgggcgttacttaccagcaggccacctaggacttcgccaacggcaaggcggccatcttgcccctgggcacctacgtcgtgccgcaggtgcgcatggtcaacccggacatcaacgtgaagttcgcccagctgcccgccaccgacgatccggacgagcaggtgctcaccgccggcgacgacaccgtgctcaccatttcggccaccaccaagcatcccaaggaatcgcgcatgttcgtggaattcttgatggacgaggaccggctcaaggaatacgccgaatcgcagttctgcttcaccccgttcaaggacacctacgccggcgacgaggctctgcagaacatcctccacttctacaaggagggacgcatcgctgatttcgccgaccactacatcccctcgtccatgaccatggccggcagcctgcaaagcctgctgaccaccggcaacgttgaggcgttcaccaattcaatgcagacgcagtgggatcagatccaagccaggaccgtacagtaaggaggttcaccatgtccgccattgccgaaaaaccacgcaagaagcgtgtctccgctttctcccatcgcaaggtcgatcccgcatactactggatgaccgttccggccatgatcctgttcatggtgttcctgtactggccgttcctgcgcggcgtgatgtactccttcaccaattccaagggctacggcaaatacaaatggatcggcctgaccaactacaaggccatgttccaggatgagcgcattgggcgcgcctacctgttcacgttcttcatcgccatcgtggtgacgattctggtgaacctgctgtccatgttcatcgccgtgctgctcaactccaagatcgcgttccgcaacgggttccgcgccatctacttcatcccctacaccctggccgtgcttgtggtcggctacgtgttcaagtacatcttcatgatgccgatccccgaactcggcaaggcgttgggcatagggtggctgtccgaatcgatgatcacctccgaatcgctggcatgggcgccgatcgtggtgctctccgtatggcagggcgtggcctacaccacactgatctacctcgccggcctgcagaccatcgacaccgacatctacgaggccgccgcccttgacggcgtcaacgcctggcagaagttctggcagatcaccttcccgctgatcggaccgttcttcaccatcaacctcgtcctgacgatgaagggcgccttaggcaccttcgaccaggtggtcgccctgaccggtggcggtccgaactccgctacggaaacggtcacctacctcatctaccagggcggcctgaccggtggcgaatacgcctaccagaccgccaatgcggtgatgttcttcatcgtcctcgcgatcatcgcgttcattcagctcaagttcttcggtagcaaggagaaggtgtgatcatgaccagcgctgttgctgcacaacccaagaaaaacaagttccgcaaggaccataagatcaactggtggctgaccgcggtggtcgcggtgctgagcctgaccattctggtgccgctctacttcaccatcgtcaccgcactgaaaaccccggccgaagccggcacgttcgccctgcccaccagctggcagtggggcaacttcgccgaggcctcgaacatggtgaactatccgcgcgcggctctgaactcggcgatcatcaccgtgggcgccatcgtgctcaccctgctgaccaacacgttcgtggcctatgcggtggcccgtaacatggacaagcggttcttccgcttcctgtactacttcttcatcgcagccatgttcgtgccgttctccgtgatcatgctgccgctggccaagcagatgggcgggtggaacctcgacaacaagttcggcctgatcatcctgtatatgatcttcggcctgggcaccaacctgttcatcgccatcggcttcatccgttcgattccggtgtcgctggaagaggcggcccgcattgacggcgcgtccacctggcgcatcttctggaccatcatcttcccgctgatgggcccgatcaacgccaccatcgcgatcctgaccgcgctgtgggcgtggaacgacttcctcctgccgttgatcctgctgtccaattccgcggatcagacgatcccgctggcgcagttcgtgttcagctcgcagttcaccgccaactatccggtggcgtttgccagctacctgatggccatggccccgatcctcatcgtctacatcttcgcccagaagtgggtgatcagcggcgtgatgcgaggcgcgaacaagtaagccgtctcatcccgtcatcagtctgtggaatcctggagggttcttgccgccctccgggattcccgtcacattcgttagaaaggttgcaatcatgactactgcgcagcgtgtcgtgcttcccgattccgttcgaaccaatggcaccacgccgaatccgtggtggtcgaatgctgtggtctatcaggtctatccgcgttcgttccaggattcgaacggggacggtatcggcgatctgaagggtatcacctcgcgtttggattatctggccgatcttggcgtggacgtgctatggctgtcgccggtgtacaggtcgccgcaggacgacaatggctacgatatttccgactatcaggacattgaccccctgttcggcacgctcgaggatatggacgagctgctggccgaggcacacaagcgggggctcaagatcgtgatggatctggtggtcaaccatacttcggacgagcatgcgtggttcgaggcgtccaaagacaagtccgatcctcatgcggattggtactggtggcgtccggcccgcccgggaaccaccccgggtgagccgggggccgagccgaaccggtggggttcctatttcggcggttcggcgtgggagtattgcccggaacgcggcaagtactatctgcatcagttctcgaagaagcagccggatttgaattgggagaatcctgcggtgcgtcgtgcggtgtacgacatgatgaactggtggctcgaccggggcgtggacggcttccgcatggacgtcatcaccctcatttccaagcgtatcgattcggccggccgtctgcccggcgaatacggttccgaacttgaggacctgcccgtgggggaggagggctactccaacccgaacccgttctgtgcggacggccctcgtcaggatgaattcctggccgaaatgcgtcgcgaggtgttcgccgggcgcgagggcttcctgaccgtgggcgaggcccccggcatcaccgcccagcgcaacgagcacatcaccaatcccgccaacggcgaactggacatgctcttcctgttcgaacacgtggacttcgactgcgaagacaacgtcaaatggaagccgctgccgctcgacctgccccagctcaagcgtattttcgccaagcagcagtcggccgtcaagaatgccggctgggcgagcctgttcaccggcaaccatgatcagccgcgcgtggtctcccgttggggagacgactccaccgagggcagccgcgtacgttccgccaaggcgttgggtctgatgctgcacatgcatcgcggcaccccctacgtctatcagggcgaggagctgggcatgaccgacgtccacttcacccggctggaccagtaccgcgatctggaatccctcaatgcctaccgtcagcgggtcgaggaagccaaagtgcagtccgcggaatcgatgatggccggcatcgccgcccgcggccgtgacaacgcgcgtacgccaatgcagtgggatggttccgcctatgcggggttcaccgcgccggacgccgccgtggagccgtggatttcggtgaaccggaatcatacccagatcaatgcggcgggcgaattcgacgatccagactccgtgtacacgttctacaagcggctgatcgccattcgccacgagaatgcgttggtggccgccggcgactggcaactgatcgatgcggacgaccagtacgtctacgcattcactcgcacgctcggcggcgagaagctgctggtggcggtcaacctgtccggacgaacggtcgatctgccgcgcgacgccgccgaactggtgcagcacggggtgaccgaaccggatatcgtgatttccacctacgacgcctcgcacgccgtggtctccctcgccaaccgtgagcttggcccctgggagggcgcggccgtccgcgtgtgagctagcgtatgttgttccagacttttttcgtccttgtctggggaaacgtacgcttacttcagctcggtgtatgttgttccggactgttttcgttcttgtctgaggtgccgtacgtttgcttcgtctcggcgtacgttgttccagatgatggggaaattggtctggggaaacgtacgccaagaggctggtgcctgcttggtgcctgcccggtgtttgttaatgtccaacgtggaaagcccgcgcggctggcgggaagccacgccgcagggccgtcacgccccaaactgggcggccttgctgccaaatttgcggcgcacagcgtccagtgcggcctcggcatcatgcaaacgcgcctgtgaggtctggccgcgggcattgtcggcctcttcgagcatgtcatccagtgaaggctgcacggccgtagccgccgccttactgagcgaagacgtgctcataccggccaagcgaatagttttgggcaggggagtggcagactccgccgaggccggtatccccagcatgactttcagctgccgcacgcattccgggtacagcacgccggccgtatcggtcggccgctccatcgtaaaagaccgggtctgatagctcaggtcggcgaaccgcaacttcaccgtcagcgtgcgcgccaccagccccttgcgccgcagcgtgctggttacttcgtcgcaggccgaacgcagtagcccacacaccacgcgcatatcgcgtgtatcctcggccaaggtttcctcggacccaatggatttctcctcgcgtaccgtggtaatttcgcgggaatccaacccgtgcgaggccgcccataatccacgtgccgcagccggggagccagtggcacgagtcaatgcagcctcatccagctgagccaattcagccaccgaatgcacgccccaagcattaagccgcttctccaaagacggcccgattcccggaataccacgcaatggcatcatctgcacgaattcggccgagcgggccgcgggaatcagcagcatgccgtccggcttggcattggtcgaggccattttggacaccagtttgttacaggcgatacccactgaacacgtcacgtggaagcgctcggccacctgagcgcgaatccacgcgccgatcgcgctcggccgcccccactccagcagtgcggcggacacatccatatagccctcgtccaccgaaacctgctcgaaccggtcggtgacggtcaaaaacacctcatgcatgattcggtgcgacatcatgcggtaatacgccatatccactggcagaaaaatgccgttcgggcacaaccgatgggcgcgcgcggccggcatcgccgaattgatgccgtatttccgggcttcgtagctcgcggcggacaccaccgcgcgcggcccggtgccgatgattaccggcttgcctttgagcccggggttgcgcgccacctccaatgaggcatagaaggcatccatgtcgatatgcagcacggtgcatccggtctcgtcgtggccccaatcgcgtttggcggcctcaagtctcggtgcggtgctcatgccaccattgtaggaatgccgaacgaggtcatgctcactatgtggcgcgcatgacgcggcgctcattgtcataatgccgaatatcgccggaattccaagggtttacgcactgtgcggctgtttcgcatggtgggtgcgattccacggaatcgtccacattgcgtcactgtccgtaacgccttccaagtcaatgcgcgctgtcccggctctccgagtagcgtaaacctcatgaagaaggcagtggtcggtatcctcaaccgtgttcccgtggttcttatcgtgattggtgaggcactggtgatttatttggctacggccgtcgccaaacttgcgttcacccagctcgatccgctgtactcggtgtggtatcgcgtgggattcatggcggtgctgttgctgctgtggcgcaggccctggaacaaggcgaagcgagcgcaactgtttcaccgcgacgcccgcagctgggggctggtcgtactgctcggctgctcgctggtgctgatgaataccctgttttatgtggccatcagcaatatggatatgggcattgccgtgtctatcgaatttttgggaccgctttcggtggcggtgattaccggcaaaagctggcgcgagcgggtcggtatcggtatcgcggcggtcggtgtggtgctgttagctggcatatcattggccaatccgtccggcaatggcacgtttttgtatggtctgattgcgattttgatcggcgggtcgatgtggggcatgtatatcatcaccggccggcgcgtggcggctggcggcaattcgctggataatctgtgcatcgccgtgaccatcggctggctggtccagtccctgttccttggcgtgccggctgtggctcatgtggttcaccccaaggccgatgccacgtgggcgcttgagcccggcggctcgctgaagctgctggctctgctgtttgtgatttccctgatggcctcgttcattccctatgtggtggagcagatcacgctgcgacgcaccacatccggcgcattttcggtaatgcaatccatcaatcccgccatggcggtggccgtgggactggcgttcggcgagattcccagcgttggtgaaatcgtcggtgtggcgttggtgatttgcgcggttatcgttacgttctccggcgacgccgcacccgcggacgttcaataatgtgtcgttcggcacgccgtatccgcaggacgtggtacagtaatttgctgttgcgcattattgcgtaacgtggagtcatgcctgagtggccgataggggcaccctgctaaggtgttagtcgtgtaaacggctcgagggttcgaatccctctgactccgccgattaaggttccgggtgaaagctcggaacttttttgttttccggaaactccgggttaagtaactcctgaaataaccgaggacgggcggtctccgcttgtggtaagcggagtcggaggtacgccattgtccgtccgcctccaaaccgccattttagtgggcgaacgagtgcggcacgtcgggaaaagtccgagcgacgaaagaaaaatgtccactaagtgagacttttgcgtggtgttcgtgaatggtgattgaagattaaccggtttatgtcgcttgtccaatcgcttgcccatcgccttcctccccgcagtgtttgactgagatgggcggtaccctagagagagaagaagagttccgaagggtgggcaaagatgagccatatcgctgggcaggggcaacatcgctccaactcgacacgaaccaaccgtgcggcgctgattatcgtgttcgtgatcgcgctcgccgttacgctgggcatcggcgcatggttcgcaacccatcgcacggacggcaatggccccgcacgcgccggagtgtcggacgtcgcgttgaataaagcgaagaacacgcccaaaccggtgaccgaacatcacggcaattcaccggattgcccggatacggactgcatcgccatgctggtcaacggcgatttgttgttccatgagggattgtggagccatttccaaggcccgaaccccaacgccacggatggcaccgccttcaacttcgacccgctgttcgcgccgatgaagcagtacattcaggcttcggacatcgccgtgtgcgaattcgaaaccccgatcgcccagcgcggcggcccatatgccgcgtacccgatcttcaacattccgccggaagtggcggatgccgcccgcaacgtgggatacaacgcctgcacacacgccaccaaccattcctgggatcagggggcggatggcatcgcccgtctgtgggacacgcttgaggccgatggcatcgcccagaccggctcgtacaaaaccgaagccgactccaccaaaccgttagtcatcgattccccgaccggcggcggcaagctgggtctggtcaccggcacggtctccctcaacggcatgaccgccgacgaggactggcaggtggatcgtctgcgcgaagacggcgacccgaatcacggcagcgacatccagcgcgcggtagacaaggccaacaaggcccgcgagcaaggtgccgatgtggtggccatcgccatgcactcggtgcaggaataccttgattacgccgattcctggcagatttcggaagcccatgagcttgccgacactggtgccttcgacgttatctacggtgccggctgccattgtgcgcagcccatcgagaactataacggcacgtggattatctacggtctgggcaacgccgtcaccgagtcggcgaacacgccggaaaccttggtcaacaaccagggtgtgaccgcacgcatccagttcgccggcaagaagggcgtcaaggggtcgtggcgcgtcaaccgcatcgactgggtgcccaccgccaacgtgcatcaaggcaactaccaatggtgcccgatatccagcgaccatcccataggcacatgttgggacgaagcctacgacgctcagatacgccaacgcatctgggatgtcatctattcgatgggcgcggaccagaacgtcgtcaaggaatggaacatcacgcaggagcaggcggcaaagcaatagttgctcggcttggtctcaaggaggggaagccgcaaggtgacgcttttcccgccggcctcctaatgtggagcccatgaccgagatttacgaaacccaaagcgaacgcaccgatctgcccctcgtcgtgatgccgtccgtgcttgactcgatgatcgagcccatcaaggcccagttccccgcgctccacgacgttgcccgcgtgcgtatgttcgaggaattcacgtccgacgaggcgaccatagccgagcgtctgaaggatgccgacgccctgctggtgggcggctaccacatttcggacgatctgctgcgcaccatcagcgggcaggggcacgtcaagtgcatcgtgttctgcggtaccggcgtcgccagctacctcaatctcgataaggcgcgcgagctgaagatccgcgtctgcaacgccgaacattatggcgatcacgccgtggccgagcacaccttcgcccttctgttcgagctcatccgccgcgttggccaactcgataaggacgtcaaggccggcaactgggcgtgggccagcggcgatggactgcaactcgccggccgtcgcatgggcatcatcggactgggcggcatcggctccaccgtggccggcatcgcccgcgccctcggcatggaggtcgccgcatggaattcgcatgtgccgcccgagcatttcgaacgctccggtgccactccggtcgacgatctcaacaagctcatcgaaaccagcgacgtcatctccgtccatctgccgctgaacaacgccacgcgcggcatcgtcaccgccgagaaccttgcgcatgtgaagcccggcaccctgttcatcaacaccgcccgctccgaagtcatcgaatccggtgcgctgcttgcccgactgcaaaagggcgatgttcccgccgcactcgacgtgttcgaccatgagccgctgaccgccgacgacgccatctgccatgtgcccggcatcgtcctgaccccgcacgtcggctggcgtgccgacggcgcgttcaaggagctcacccgccagatgatcgcctgcctgaccgcctacttcgccggcgaagactataacgtcgtcgtctccgaacgctgatagccctgcctagcctcgcgctcaatcgaacacccagccagtcgaccaccggaacacgctcatgcagacgattctcaacacgcccgacgatcctgcccacgattcgctcgtcgaaaaaaagtccgaatttatcggcgacgccgcccatgtcgatacgctcgacgaggcgctcgcgttcgtggctgcgatccgtgagcagcatccgaaagcccgacacgtggcgtatgccgccgtgtgcggaggcgcggatgggcgactgtccgaacgcatgagcgatgacggcgagccgtccggtaccgccggcaagccgattctcgacgtactcaagcagtcgggcaccaccgattgcgtggttgccgtcaccagatatttcggtggtattctgctgggttccggtgggctggtccgcgcgtactcatccgccgcatcattggcgatgaaagccgcccgcgccgcccgcatcatgaccgccaagcgataccgggttcgcctcgaatacccgcagttggcccgattccagcagatcctggcgcagcttggtggcagtcaggaggatgaatcgtatgcggtgaacgtcgagttgaccgcggtggtgccgcaggatgattgcgcgcgattcgaggagcgtgtgcgggaagcgttcaatgccgctgtggtgccggctccgattgacatggtcaacattccggttccgctcgcgtgacgcctgtatgactaagctgggcatcatgaccgacgagaacaccaccagccagcagacccagcccaccgaggccgcaaccgaggccgcggccgagactgcaaccgacacggacgcccagcagcaggaccaaggcgcgcagtccgcagccgagtccgccgctccggtggatttcgaaccgctgaccgctacatacgagcgtctgcgccattccaccgacccggccgaactgtccgaattcgcccgtcggccgttgcctgaccgtgccgatcaggcggcgttctcccgcgccaccgcacttttggaggctgtggccggcaacccgcacaccccggtggccgatcgtgtgttcctcgccgacaccatgccgttcccgaacgtattggtcaaactctccgaagaccccgaaccgtccgtgcgtcaagccgtggccgccaacggggacgacaagaattggctggtcggccgtctgaccaaggacccggtgcctgcggtccgggatacggcgttgaaaaacaagcgcaccagctggaagatgcggcttgagggtgcgcaggaccccactgcggatgcggagacattggatttcttgggcgtacttggcaccgaatccgaagagggagcaccggcggtgctttcttcgatggtccgccgtgccgtggcactgaaccccaatacgtccgaagcgatgcttgccaaattggccaacgacccctcggccgaggtgcggcacgccgtggaaagccgccgctaagcacactattgctgtgttttgccgcgcaaatttggccggcaatcaccccctgtccaccattgtgagcgctcacatctcactatgtgagggtaaaaagtacataatttggcggaatcatggcatttttcttacggtgtggcgcaatcaaacggcgttagactggggctatgagtgagattaccgagagtgaagagcgtctggcccgtccgttgattcgactggccaagttggtcggtgtcggcacgagttatttgggcatgagccatgactaccacgagatagacgatgacgtcctgatcgaggtgctggcagcgctgggcatcgacgcctccagcgagagcgcccaactcatcgccatccgacgcattctgaacgagcgttacgcccgattggtggcacccaccgtgctgcatatcgccggtagcgaggaccgggtgctggtgaacaccggtattctggacgtgccttcggcgagcatcacgctggagaatggcgagccatatcaaggcaccattgaagttggtcctggagatggatcccaggcctacgacttggatggtacgttcatttcgaatgcggctgtggtcattcccgccgatctgccgattggttaccatacgctgcacgtcaaggtcgccgaccgtgtgcaagacgccactttgatcagtgcacctgatcgcgtcgatctgcttgacccgatgaagggcggcagtctgtggggctggatggcccagctgtactcgattcgctcctccaactcctggggcgtgggcgattacgaggatctgaagaccatgctggtggacgccaagcagaagaccggtgccgacttcgtgctcattaatccggtgcatgccgccgagccggtgtccccgctcaccccgtcgccgtatctgccggtaagccgtcgcctgatcaacttcacgtacatccgtcctgaggcgatcgccgaatatgccacgctcagcgagggcgacaagaatgccgtcgacggactgcatgccgacaccgaaccgctgaacggtgattcccagctcatcgaccgtgacgccatgtggcgcagcaagatgcacgccctgtggattatctttaaggccggccgtaccgccgaacgccaaagcgtattcgaccaattcaaggcggactgtggttccgacttggaggcgtatgccacgtggtgcctgtgctacgacaagtggggggcgcccaacggcgaggagagcaactgggagcgcaagttcaatcgcaactccccggaaatcgccaatctgcgcaagcagtacccggacactttggacttctaccgctggctggaatggattgccgccgagcagctgtcctccgcccaacaggcagccaaggacgccggcatgcatatcggcatcatgtccgatatggccgtcggcgtgcacccctccggcgctgacgtgtggtggaatcccgagcgcttcgccaagggagccacggtcggcgcaccgccggacatgttcaaccagcaaggccagaactggagccagccgccgctgagcccgatcaatctggagaccaccggctacgaggcctaccgcaatatggtgcatggcatgttcgcccgtgccggtgcggtgcgcatcgatcacatccttggtctgttccgcctgtggtggattcccgagaaccgttcggctatggatggcgcttacgtgtactacgactcagacatcatgctgggcgttctggccatcgaggcctctcgcgccggcggcgtggtcgtaggtgaggacctcggcgtggtgccggaccatgtggccgattccctgtcgagccacggtattctcggttgcgccgttgaatggttcgagcagtgcgacggcgtgttccgcgccccctcccagtggcgtccgtatgcattggcctccgtgaatacgcatgatttgccgccggccgccggttacctggaatacgagcacgtcaagattcgtgagcgtctgggcttgctgaccggcccggccgaggaattcgaagcctccgccaaggccgagcaggatgcgatgctggccatgctggtcgagcagggttatcttgatgccgactttgccgaacatcgtgaggatcacgaggcggatatcgtcgacgcgctgtaccacgcactgaagggttcgccgtgcaagctgctcgccgcctcgatcaccgacgcggtgggggagaagcgtgcgcagaaccagccgggcaccaacaacgagtacccgaactggcgcatcccactggccgacgccaagggcaacgtggtaccgctcgaaaccctcttcgacacccccggtgcccaacgcttcgcccaaatcttcaattcctgacccgctttacctccctctgacgagccgagtcgttaagcggacagtccagtggactgtccgtagacgaggcctgaaagaagcgatagctgagagaaggcagggaattgcctcaccgtaggtgagtcggttagccgaagtgggtgggagagaaaccataaataggggaagagaagccataaacccaatggagtgtccccagttgccctatgtcaagcccggcgatatactagtggattgttgtgtttccctaaggggtccttcaaagcgctatcccactcgccatcgaggactttcagggagcccacggataatgaggttcgacgcctcttggatgcggccctgaccaagccacaccaagcagctgagacccggaacacaatatagaaaaggtaatccagtgaaaactttcactccgaagccagctgatctgactcatgactggtacgtcatcgacgccaccgacgtggtgctcggccgtctcgccacccaggctgcaatcctgctgcgcggcaagaacaagccgacctacgctccgcacgccgattccggcaaccacgtgatcatcatcaatgccgacaagattgctctgactggcaacaagatgggcaaggaactctactcgcactccggccgtcctggtggtctgcgtcgtgactcctacgccgagctgctcgagaagaaccccgagcgcatcatcaagaacgctgtcaagggcatgctgccgaagaatcgtctggccaaggtgcagctcgaccgcctgcgtatcttccgtggcgccgagcacccgcacaccccgcagaagccccaggtcttcgagatcgcccaggtctcgcagcaggccaagtgaaacctgagaggagataagaatcatggctgaaaacaccaacgactcccaggttgtcgagaccgaagaggagctcaccaacgacaccaccgagaccaacgctggcgctggcaccggcacctccgcgattgagccgggctacggcaccggtcgccgcaaggaggctgtcgcccgtgtccgtctggttccgggtgacggcaagtggaccatcaacggccgcactctggaggagtacttcccctccaagctgctgcagcgtgaggtcaactccccgatcgttctgctcaagctcgaaggcaagttcgacgctatcgtcctcgttgacggcggcggcaccaccggccaggccggcgccatccgcctcggcgttgcccgcgctctgaacgccatcgatcgtgatgccaaccgcgccgccctgaagaaggctggcttcctgacccgcgacgctcgcgtcgtggagcgcaagaaggctggtctgcacaaggcacgtcgcgccccgcagttctccaagcgttaatttcgcttgtcctgtaccgagcatacaaaggctctccgcggaattccgcggagagcctttgtgtttgtgtcgcgctgtcttgagtgtgactcacacctgcttcatcagcgtgatgctcagcgccggcatggtccagacattgtcgtcgacgggagtgtccggtgtatcatccacaggggcatcgggcatatcagctgatacctcatcccgaggcgcggacgaggtgccgtttgcggcgtgatctgttactggcatcgcgaatttgatggtatccgcttcattctcagtcgaggattccgtacgctgcatggccacttcttcgaccatcttgagtactgtctcgctggcgtccggtacatgctgcgtccagacggtggtgtcaccgttcaaatcgcattcctcgacctgagtgccatgcccggctcggcggccgttgatttcggccgagcaccatttaggcgtccagtgggtgtctggcggcaggcggaatgtgcggtcgtcagcggtgccgttgaccacaatgcacacgtccacctcactgttggacagcaatcgcatggtgaagctacgtacgcccagatcgaaccagtcacgctccatcggcgtggtaccgtcgggcaggaaccactgcacgcggcttgagggcttgagtaggccgatctgggtcagtcgggtgaagaaatcctcgtggtgatacaggtccagtgatttacgcagcgccaccagtcgagacacggtttccaagcggcgcatttcgcgcgtcttgttggtggaatacatccaatcccacttcagccacgtgatgttgttgtcttggcagtaggcgttgttgttgccgtcctgcgtgttgcggaattcgtcgccggcgagcatcatcggcgtacccagcgagagcagcagcatgccgatcatgttcatggccgcctgttcgcgtgccgcaatgacgtctggatcatcggtgacgccttcgacgccgaaattggcggaatggttcaccgacgagccatcattattgttttcgccgttggcttcattgtgcttggagcggtatctggtgaggtccgtcagcgtgaaaccgtcgtggcaggacacgaaattgatggaggccggagcgccacgccctggttcggtggcgaacagatcggccgagccgcagagtcgcgtggccatctcctgcaaactgatacgcccgaaatcggagccgccgtccacatcctcaagccagaaggtgcgggccgtatcgcggaagcggtcattccattcggcgaacggcacggagaattggccggtgcgccagccgaggttgcccagatcccacggctccataatgagcttcaggttgcccagcagcagatcggaacgcagggcgtagaggaacgggtgatgatgggtgaattcgccttccaggcgggccagcgtgacgccaaggtcgaagcggaaaccgtctatgccgatacgcttggcccagtatcgtaatgagtcgatggcaaaggtgaccacatgcgtgttggtgaagtccagcgtattgccgcagccggtggtgtcttcgagtcgaccggtattggatttttgatggcgatagtaggccagatcgtcgaggccgcgccagcagaccgtcgggccttcgacgccgccttcgcatgtgtggttgtagaccacgtccatgatgacttcgaagccggcctcgtgcagtgcgcgcaccatgtctatgacttcttggcgcacggcggccgcgcccttctcttgggcggctttagtggcgtaggagggttcgggggcgaagtagctgagggtggagtagccccagtagttcttgcggccgtgttcttgcaggaagagctcgtcctgcttggccataatcggcagcagttcgatggaggtgatgcccaatccctgcagataggcgagcgttgtggggtgggcgagtccggcgtaggtgccgcgcaatgattcgggcagccacggtgcgttggcggtgaagcctttgacgtgcatctcatagatgacggttttgcgccacggcacatgcgggtgctgcgggtcgccctcatgcttatgggtatcgcgatcgtcgatggccacggacaccggcatatggccgagcgagtctacggtgctcatggcaccgtatgccgagccgattaccttgcggtccacgacatcgcattcataggagaaggcggcgggggtgagctccatggagccgtcgatgcccttgccatacgggtcaagcaggaatttgtatggattgaagcgcacgccgtgtttcgggtcccatgcgccgtccacgcggtagccataacgcatgccgtcccatgctttgggcaggtgcacgtaccacaggccgtagttcggcccggtcatgcggaacaaggtctcgcgcagatacaaatgttcgataatgcgtgtgcataccgggaactcatgaatctgctggataaaggagatattcgggtcctcgaacaggcggatggcgtcttggaagaaagcgctgggctcatcaatgggctccagtacgcatagccaaacctgatcggcagtttcggaacgaacaacgacgtcagccccaccgtcgtcagtgaagtacagccctgggcgagtggcgtaacgatgcaacggtgggtttttcatacctccattgtagacgtgttgtcacttttggtggaagcccttgatttcctgccgcgttccgcagcaccacagatgtcgtcgagataattctcggcgaaccgcaacgcggcaccgatgatgttctgatcttcggcgcagtagctcttgcgcagattgaaatggtcggtgccgaacgggcttcgtgcgatgacgcgcgtcttcagatcctcgatgtcgctgtcttcaagatgctgggctgcttcaccgccgacaatcacgtcgcccgcgatgatggatcgcgcgttgacgatggcctgcgccacgtaatccagccactcatccatgcgctcgcgatgatgccgttcgccctgctcaagcacgctgaagaagccgggaatgctttcgtaatcctcgggcaaggtctccggcgagcagtaggtgtccatgcaaccgcgctggccgcagtagcattcgcggccgcccggcaccagcgtcatgtgttcgatggcgccgttgcactggttcgggccttgatacagcttgccccccgcgatcaccgcgccgcccgggcgtcgctccagatagacgcacaccgcatcggtgagcgtggagtcgaaccagagttcggccatggctgaggcatcggaatcgtggatcatcatgcacgggtaatggaccgattggctgatggtttcgagcgtgagcccagtgttgcccataatggtgccgaaggtgatggtggtggcgtcgggggagaggatgccttggatggcgaacgagacgccgagcaccttgccgtgcttcttttcgacgttggcggcgaagttgttgatgatgccgccgatacgctggtagtaaacgttggtgttgcggtaaggcagggcatcgttgcgtttttcgatgacgttgccgtacaggttaatcgcgcacaggcgcagttcgttggaccgcatcactaccccgatggcagtgcgatgatcgggattgaactcataattttgcgccttgcgcccgccggtggaatcctgcagttcgcctttgcggatgagtccgtcatcttctagtgcgtgcagattttgggtgatggtgggcaggctgaggccgagttcgcgttccagttcctgcttggtgacatggctatggccatacagatactgggccatggcactgcggttgtgcgctttcactgcggtcgatggcattgccctcatgtttacccctttgtgcgatgagatatatgcaagtttactttatgaaagtggctttcatgtgcctcgacgcggaggttatgaggcaacaatcgtatatttgtaggcgattttgggtacttttttaaaccaactttctagaaatgtggagaaaatgattgcttttgaaaacttactttaaaaaagttctcggattgtgttgtttgcaggcatgtgattttcggtaaaaagtgaacaaaaagtaccaaatcgccggatagagtgaggatttgttcgatatttcgcacaactcgtaacaaaaactgttcaatatcgcacgtgaaacgccgtcgattttgtgcgtatgcatcgcgccggaccgttcagtatattgtgcctcaggtcacatatgcaatgtgacaacgcatcaccggtcattttcggttactgaggcggtatcccgctggtgcaactgaggtgacgaggcgatggcccagaactttgccatataccccaagaagatcgaggaggaccccaagtggcagaagcaaagaagaaggtcgaagctaccaagccgactccagaagagaagcaggccgcagctgaggccgaagttgacgcgctggttgcccgcgccaagaaggctctcgtcgaattcgagaacctcgaccagaagcaagttgatcgtatcgtcgccaaggcctccatcgccgctctgaacaagcacctcgttctcgccaagatggctgtcgacgagaccggccgtggtctcgtggaagacaaggccaccaagaacatcttcgcctgcgagcacgtcaccaactacttggccggccagaagaccgtcggcatcatccgcgaagacgatgtgatgggcatcgatgaggtcgccgagcccgtcggcgtggtcgccggcgtcaccccggtcaccaacccgacctccaccgccatcttcaagtccctcatcgccctgaagacccgttgcccgatcgtcttcggcttccaccccggcgcgcagaagtgctccgtcgaggccgccaagattgtgcgcgacgccgccatcgaagccggtgctcccgagaactgtatccagtggatcgagcacccgtccatccaggccacaggcgccctgatgaagcatccgggcgtggccacgatcctcgccaccggtggtccgggcatggtcaaggccgcttactcctccggcaagcccgccctcggcgtgggtgccggcaacgccccggcctatgttgattccgatgtggacatcgtgcgtgccgccaacgatctggtgctctccaagcacttcgattacggcatgatctgcgccaccgagcaggccatcatcgcccacaaggacgtctacgaccagctcatcaaggagctcaaggtccgtaaggcctacttcgtcaacgccgaagagaaggccaagctggaacagtacatgttcggctgcactgccggttccggcgtcaagcccgtgctgaactccgcggtgccgggcaagtcccctcagttcatcgccaaggctgctggcttcgagattccggccgacgccaccattctggccgccgagtgcaaggaagtctccgacgacgagccgctgacccacgagaagctcgctccggtgcaggccgtgctcaaggccgacaacaaggagcaggccttcgagatgtgcgagaagatgctcaagctgggtgccggccacaccgccgccatccacaccaacaaccaggagctcgtgcgtgagtacggcgtccgtatgcacgcctgccgcatcatctggaaccagccttcctccctcggcggcatcggcgacatctacaacgccatcgccccgtcgctgaccctgggctgcggctcctacggcggcaactcggtgtccggcaacgtgcaggccgtgaatctcgttaacatcaagcgcattgctcggaggaacaacaacatgcagtggttcaagatcccggccaagacctacttcgagccgaacgccatcaagtacctgcgcgacatgtacggcatcgagaaggccgtcatcgtgtgcgataaggtcatggagcagctcggcattgtcgacaagatcatcgaccagctgcgcgcccgctctaaccgtgtgaccttccgcatcatcgactacgtcgagccggagccctccgtcgagaccgtcgaaaagggcgctgagatgatgcgcgaggagttcgagccggacacgatcatcgcggttggcggcggctccccgatggatgcctccaagattatgtggctgctctacgagcacccggaaatcgccttctccgacgtgcgcgagaagttcttcgatatccgtaagcgcgccttcaagatcccgccgctgggcaagaaggccaagctggtgtgcatcccgacctcctccggcaccggttccgaggtcaccccgttcgccgtgatcaccgatcacaagaccggctacaagtacccgatcaccgactacgcgctgaccccgtccgtggccatcgtggacccggtgctggctcgcacccagccgcgcaagctggcctccgacgccggcttcgacgccctgacccactcgatggaagcctacgtgtccgtgtacgcgaacgacttcaccgacggcatggccctgcacgcggccaagctcatctgggacaacctggctgagtccgtcaatggcgagcccggcctggccaagaccaacgctcaggagaagatgcacaacgccgccaccatggccggcatggcattcggctccgcgttcctcggcatgtgccacggcatggcccacaccatcggtgccctgtgccacatcgcccacggccgtaccaactccatcctgctgccgtacgtgattcgttacaacggccagattcctgaggagcccacttcttggccgaagtacaacaagtacatcgccccggaacgctaccaggatatcgcccgcaacctcggcatcgacaccggcaagaccccggccgaagccgtggagaacctggcgaaggccgtcgaggactaccgtgacaacaagctcggcatgaacaagagcttccaggattgcggtgtggacgaggactacttctggtccgtgctcgatcagatcggcatgcgcgcctacgaggaccagtgcaccccggccaacccgcgcatcccgctgatcaacgacatgaaggacatcgccgtcggtgcttactacggtgtctcccaggcggaaggccacaagctgcgcatcgagcgcgagggtgaggccgccactgaggaagcctccgagcgttgattgcaggcggtttgtggttggtggcaccatcagtagccaccaaccgcggtgttgcagcttagtgtctgcatagcgcgacacaaggagcccgaccccattacaggggccgggctcctttgcatatgtggtgctccctcagccagcaggtacacctccatggggtggtaacccactcatggggcggtaacttgcccatggggcggtgaaaaccccatggggcggtgtacaaaaacggctctattctgcggaaggtaaaattttaccgtccgccccatgggccaattaccgccccatgaggtaattacctccccatggaatcgctgaagcgtcgctaaatcgccgcaattatgcagccaaaagcaataaagctggcaaacgcctcggtaatgccggtcaccacgggcttcaaggttgtgcgccgtgtaaccaccggcaacgcaacggcgcgggccaacagcagcacagtcatcgcaatcagatacgggctgcgtccagccggcacggcggctagcagcaatagcgccacatgccatacccacgaagccgccacgtacgaacgcttcccgcgttcccggatcatggttttgaccaccaaaaccgacccatactgcgtcagcgcaaacagcacggtggcaatcagcccgctcacgggcaatgaacccgcgggccaccaggcgtgaaggtcgaatatctggctcaaatctggcatattccgaatcgcggcgcgtgcggcggtgacatcagcggctgcgcacgaggcatgtgctgcgttgatgggcataacacatgccgtctcaacagtgctgccaaacgacgcgatcaccgtggccatggccgacgcggcaatcaccgacacggcattgccccacagcgagcgctccttcctcagccacgaggacagcatcgacagcgcaaccagcactatatataagggagcccaacgcagtatgccggtatgcgtaatcaggaatggcaagccgatgacgatgagcgctacggcataagtgagcatcggcggcagataacggcgtgaaaagtgtgctttgaaccagtgcgcggcgctgaactgcacgcaatagcacacggcccacgtcgccaatagccaaagcgtatcaagattaggcccgccgataaagaagccagccacagcgggcagcataaccattacccatgcgccaggttggttgtcgaaccaatcgcgtttaagagtcttgcggcgggaagtcatatctgtcatgatatcgcagcgaatggttctcaataagaaagatgtgagacctgcattgcgacaatcgaacagacgccgagcggctatgccgcgaggtaatacgaacggcatgagcgcgacacgcgcgaactccactgtcccacctcaatgcttgaataaacaagttgcctgatttgggctcgcaaattggaattaaaaaagcgagcgcgggccgggagccacttcaagtgaagtgacagccggaaaccgcgcactgatgtcggatgaccgccagaggacgtatgtccaagggaggccatgcgcgccggtgccctagaagcaggttggtaaacagtacaacgaacatcgctagaaagggcggacggcaatggcgggacagaaaatccgcatcaggcttaagtcctatgaccacgaggtcatcgaccaatcggcgaagaagatcgtcgaaacggtgacgaacgcgggcgcaactgttgttggccccgttccgctgccgaccgagaagaacgtcttctgtgttatccgttctcctcacaagtacaaggattctcgcgagcacttcgagatgcgcactcacaagcgcctcatcgacatcgtggacccgacccccaaggccgtggactccctgatgcacatcgatctgcctgcggacgtcaacatcgaaatcaagctgtaagggaggaggaagcattatgtctaatcgcaaggctctgctgggcaagaagctcggcatgtcccaggtgtgggacgagaacggcttcttcgtgcccgtcactcttgtcgacgtgtccaccaacgtggtgaccgccgtgaagaccgaggaatctgacggctacaaggctgtccagctcggctacggcgccatcgatcccaccaaggtgaccaagccgctggctggccactttgccaaggccggtgtcaccccgcgtcgccacctcgtcgaggtgcgcaccgacgacgtcgatcagttcgaggctggccaggaactggccgctgatctgttcgaagagggtgctgaggtcgacgtgaccggcaccaccaagggtaagggcttcgccggtaccatcaagcgttggggcttcaagtcctaccgccgtactcacggttctcacaagaacgagcgccgtcccggttctgtgggcgcatgcgccactccgagccgtattctcaagggcaagcgtatggccggccgcatgggtcatgtgaccgccactacccagaacctgaccgtcgtctccgctgatgtcgagaacggcatcctcgccatcaagggcgccattcctggccccaagggcggcatcgttctcgtccgctcggctgtgaagggagcctgataaaccatggcaaacgttactctgaacgtcaccgacgccaagggccaggccaccggcaccgttgaagctcctgaggctctcttcggcgtttccgccgaggatgtccaggctcacatcccgctgatccaccaggttgtcaccgctcagctcgctgctgctcgtcagggcacccacgccaccaagactcgtggcatggtttccggcggcggcaagaagccgtggaagcagaagggcaccggtcgtgctcgtcagggctccatccgtgcaccgcagtggtaccacggcggcaccgtgttcggcccgcagccgcgtgactactctcagcgcacccccaagaagatgaaggccgcagctctgcgctacgccctgtccgatcgcgccaacgccggtcgcgttgccgtggtggagttcggtatcaccgagccgtccaccaaggccgctgtcgccgctctggccccgatcaccgcggacaagttcaccacggtcgtcttcactcgcgacaacatcaacgagtggctctccgtgcgcaacatcccgaccgttcacccgattttcgtcgatcagctcaacacgtacgacgtgattacctcgcagtacgtggtcttcaccaaggaagccttcgaggctttcgtggctgccaagaccgagccgaaggaggcctgatttagatggtcgctattcacaagcccgctcacgacgtgattcttaagcccgtcgtctccgagaagagctacgccgcttccgaccgtggccagtacaccttcgtggtggctccggatgcgaacaaggtgcagatcaagcaggcaatcgaagagatcttcaaggtcaaggtgacgaacgtcaacaccctcaaccgcgctggcaagaagcagcgcactcgcaccggtttcggccagcgcgcttcccagaagcgtgcgatcgtgaccgtcgccgagggccagacgatcgacatctttggtaactgaaggttagccgagaaaagttaaaggaagaactacattatggctatccgcgtttataagccgacgaccgcaggccgccgcaacgcgtccgtctcggatttctccgagctgactcgttctacgcctgagaagtcgctggttcgcaagaagtccaagaccggcggtcgtaactcttacggccgtatcacctcccgtcatcgcggcggcggccacaagcgtcagtaccgtctcatcgatttcaagcgttgggacaaggacggcgtgcccgccaaggttgccgagatcgagtacgatccgaaccgctccgcccgtatcgccctcctgcacttcgcagatggcgagaagcgctacatcatcgcgccgaagggcatcaagcagggcgacgtcatcgagaccggtgctcaggctgatatcaagccgggcaacaacctgccgctgaagaacatcccgaccggtaccgtggttcatgccatcgagctccgtccgctgggcggcgctaagatcgctcgttccgctggtgctgccgttcagctcgtcgccaaggatggcgcctacgctcagctgcgtatgccgtccggcgaaatccgcaacgtcgacgcgcgctgccgcgctaccgtcggcgaggtcggcaacgaggaccacgccaacattcagctcggcaaggctggccgcgcccgctggatcggccgccgtccgatcacccgtggtgagtccatgaacccggtcgaccacccgcacggcggtcgtacccgcggtggtaagccgccggtctccccgtggggcaagggcgaggttcgtactcgtcgtccgaagaaggcttcgaacaagatgattgttcgtcgccgtccgtccggcaagaaccgcaagtaagggagtatcgagaagatgactcgtagcatcaagaagggccccttcgtcgacgcccacttgcagaagaaagtcgacgagcagaacgagaagggcaccaagaacgtcatcaagacgtggtcccgtcgttcgatgatcacccctgatttcatcggacacaccttcgccgttcatgatggtcgcaagcatgtcccggtgttcgtcaccgaggccatggttggtcacaagctgggtgagttcgcccccacgaagaccttcaagggtcacgtgaaggacgacaagaaggcccgtcgctaaggataaggaatagaacatggaagctaaagcaatcgctcgtcacgtccgcgtgacgccgcgcaaggctcgccgcatggtcgacctcatccgcggcaagaaggcgaccgaagccgtcaccattttgaagttcgcccctcaggctgcggccctgccggtccgcaagaccctggagagcgccatcgccaacgctcgtgtgaaggccgacaaggccggcgagccgttccgcgagaacgacctgtacatcaaggagacctacgttgacgaaggtgtgaccctcaagcgcttccgcgctcgtgcccagggccgcgctgctcgcatcaacaagcgcacctcccacatcacggtcgtcgtggctaacaaggaaggagcccgctaaagatgggtcagaagatcaatccgtttggctaccgtctgggcatcactgagaaccaccgctccaagtggttctccgactccaacaaggccggcgaacgctaccgcgacttcgtgcttgaggatgatcagatccgcaaggagatgagcaaggacctcgagcgcgctggcgtgtcccgcatcgtcatcgagcgcacccgcgaccgcgttcgcgtcgacattcacaccgcccgtccgggcatcgtgatcggtcgtcgtggcgccgaggctgagcgcgtccgcgccaagctcgagaagctgaccggcaagcaggtccagctcaacatcttcgaagtcaagaacgccgcgctggacgcccagctcgtcgctcagggcatcgctgagcagctgaccaaccgcgtcaccttccgtcgtgccatgcgtaaggcccagcaggacgccatgcgcgccggtgccaagggtatccgcatcaagctctccggccgcctcggcggtgcggaaatgagccgttccgagttctaccgtgagggccgcgttccgctgcagaccctccgcgccctcatcgattacggcttcttcgaggccaagaccacgtatggccgtatcggcgtcaaggtctggatctacaagggcgacatgaccgaatccgagttcgaagagcagcaggctcagcagaacaaccgtccgggccgtcgtggtggcgatcgccgcccgcgccgtggcaaccgttccgccgccccgcaggccgccgaagcccccaaggctgaggctcccgccgaggccgctccggctgcagaaacgaaggagtgagcaagaatgcttatccccaagaggactaagtaccgcaagcagcaccgccctgtgcgttctggcatgtccaagggcggcaacgagatcaacttcggtgatttcgccatccagtccctcgccccggcctacgtgaccaaccgtcagatcgaagccgcgcgtatcgccatgacccgctacatcaagcgtggtggccgcgtgtggatcacgatcttcccggatcgtccgctgaccaagcacccgctcggtgcccgaatgggttccggtaagggtgccccggagttctggattgcgaacgtgcgccctggtcgcgtgatgttcgaaatcggtggtgtgtccgaggacatcgctaaggaagccctccgccgcgctatcgacaagctcccgatgaagtgccgcattatcgcacgtgaaggtggtgatatctgatggcagtcggtaccgctgattactccatcaagaatctcaacgagaagaccaacgcggaaatcgaaggcttcttgaagaagtccaaggaagagctgttcaacctgcgcttccagcacgccaccggtcagctcgagaacaccgcccgtctcaaggctgtcaagagcgacatcgcccgcatgtacaccgtgcttcgcgagcgtgagcttggcatcagccaggagccggccgctaccgaatccaaggagaagtgattatggctgaagagcgtaacttccgtaaggttcgccgcggctacgtcgtgtccgacaagatggacaagacgattaccgtcgagctcgagcagcgttcgacccacccgctgtacggcaaggtcgttcgttccaccagcaaggtcaaggcccatgatgaacacaacgacgcccacattggcgacctcgtgagtattatggaaactcggcctctgagcaagaccaagcgctggcgtctcgaatccattatcgagcgcgccaagtaagtaaagttcggcaaggctcgccatttaccggggcattatgggcaaccacgatgccccggtaaatggggagaaccagctcggctaaggagaatcaatgattcagcaggaaacgcggcttcatgtcgccgacaacacgggtgcgaaggaactcctcgccatccgcgtgctcggcggatcgaagcgacgctatgccggcatcggcgacgtgatcgtcgcctccgtcaaggacgccattcctggcgggtcggtcaagaagggcgacgtggttaaggccgttgtcgtccgtaccgtcaaggaatcccgccgtgcggatggttcctacatcaagttcgacgagaacgccgccgtcattctcggctccggccgtgaaccgaagggcactcgtatcttcggaccggtcggtcgtgaactgcgcgagcacaagttcatgaagatcgtgtccctcgccccggaggtgatctgacatggcagccaagatcaagagcggcgacctggtcaaggtcatccgcggcaaggaccgcggcaaggaaggcaccgtcaagcaggtgctctccaacgatcgactaatcgtcgaaggcgtgcagatcgtcaagaagcacgtgcgtgcaacgcagcagggccagcaggctggcatcgtctccactgaggctccgatccatcgctccaacgtgatggtcatcgatccggagaccaagcagccgacccgcgttggcatcaccgttaaggaagaggcgcgtgacggcaaggtgaagaccgtgcgcgtgcgcgtcgccaagaagtccggaaaggagctggcatgaccgatactactgtcgaagcgccggccaccccgcgcttgaaggtcaagtacaacgagcagatcattcctgagctcgagaaggagttcaagtactccaacccgatgcaggttgcccgtgtccagaaggtcgtcgtctccatgggtgttggtgccgctgcccgcgactccaagctcatcgaaggtgccgtcaaggacctcaccctgatcaccggccagaagccgaagatcaccaaggccaagaagtccgtcgcgcagttccacctgcgtgaaggccaggccatcggtgcgtacgtcaccctgcgtggcgaccgcatgtgggagttcctggaccgtctgctgaccctcgcgctgccccgtatccgcgacttccgcggcatcaacggccaccagttcgatggccagggcaactacaactttggtctcaccgagcagtccatgttccacgagatcgatcctgattcgatcgatcacgtgcgcggtatggacatcactgtggtgacctccaccaaggacgacaaggaagcttacgcgctgctgaagcacctcggcttccccttcaaggagaactgatatggcaaaaaccgctcttaagaacaaggcggccggcaagccgaagttcaaggtccgcgcttacacgcgctgccaggtctgcggtcgtccccactccgtctaccgcaagttcggcctgtgccgcatctgccttcgtgagaaggctcaccgcggtgaactgcccggcgttacgaagtccagttggtaaacatcgacgctgaaggtccgcggcccgaacgcttctagaagaagcgtgagggcggcggaaaccatagcgagaaagggcaacaagcccaaatgacaatgacagatccgatcgcagacatgcttacgcgtctgcgtaatgcgagcgcggccaagcacgaaaccgtggatatgccgtactccaagttcaaggcgaacatcgccgagatcctgaagcgtgaaggctacatcaaggacttcaccgctaaggaagccaaggtcggccagactcttgaggtcaccctcaagtacggtccgaacggtgagcgttccattcagggtatcaagcgcatctccaagccgggccttcgtcgttacgcgaagtccgactccctgccgatgccgctcggtggcctgggtatcgccatcatctcgacttcttcgggactgctgactcagaaggaatgcctcgaccgaggcattggcggcgaaattgtcgccttcgtgtggtgagaaaggagagctgaaacatggcatcgcatattggtaagctccccatcgccatccctgctggcgttgaagtcaagattgaaggccagaacttctccgccaagggcgctaagggttctgactcctacgtggttccggaaggcatcaccgctgccgttgaaggcaacgagattgtcctgaccgccgctgatgacctgcgtccgacccgtgccaagcacggtttggctcgttccatcatggccggcatggtcaagggtgttcacgatggctactccaagactcttgagatcgtcggcaccggttaccgcgccgtcgccaagggccagggcatcgagttcttcctcggctactcccacaccatcaccgtcaacccgcccgaaggcatcaccctgaaggtgaccgacgccaaccacgtggttgtcgaaggcaccgacaagcaggtcgtgggccaggttgccgccaacatccgcaagctgcgcgctccggaaccctacaagggcaagggcatcaagtactccgatgaacgcatcctgcgcaaggctggaaaggctggtaagtgatatgagcgttgctattctcggaaaaggcaagaaggtagctctcaagcgccgtcacgcgcgtatccgcaagcgcatctccggtacccccgagcgtccgcgcctggtggtcacccgctccaaccgtcacatggttgctcaggtggtcgacgataccaagggcattaccctggtgtctgcctccactcttcaggctgacttcgccggcttcgaaggcaccaagactgaggccgccaagaaggtcggcgagctgatcgccgagaaggccaaggctgccggcatcaccgcagtcgtgttcgaccgcggtggcaacaagtacaccggtcgcgtcgcagccgttgctgatggcgcccgcgagggaggtcttgcactgtgagcgacaacgaaacgaaggaaacccaagtggctgaagaaactcagaacactgtggcgaccgaatccaacaacgaggaccgcaagggtcgtcgtggccagcgcggtgaaggccgtcgtggcgagcgtcgtaaccgtcgtgaagaaaaccacggcgacgagctgctcgatcgcgtggtgaccatcaaccgtgtgtccaagacccacaagggtggccgtaccttcagcttcgccgcactggttgtggtcggcgacggcaacggcaccgtgggtgtcggctacggcaagtcccgtgaagtcccggccgccatcgccaagggccagctggacgccaagaagcacatgttctctgtgcctcgcgtccgcggcaccatcacccacccggttcagggtcacgacgctgctggcaccgtcctgctgcgtccggccgccccgggtaccggtgtaatcgccggtggctccgtgcgcgccgtcatggaatgcgcaggcatcaccgacgtcctgaccaagtcgatgggctccgccaccgccgttaacgtggtgcgcgctaccgtcgacgccctcaagcagctcgaagagcccgaggagatcgccgcccgtcgtggcctggcgctcgacgaggtcgctcccgatgctctgctgcgcgcccgcgccgccggcattgccgaggctcgcaaggctcgcgaagaggctgctgccgctaaggccgccgaagagaaggatggtgagtgatactcatggctaagaacctgaagattaccctgcaccacggcatcgtgaaccgtaccccggctcagcgcgccaccgtcaagaccctcggcctcaacaagatcggtaagaccgttgtccgcgaggacaccccggccaaccgtggtctggtgaacgccgtgcgtcacctggtcaccgttgaggaggttgactgattatggcagataacgaaatcctgcagatgcacgacctgaagcccgccccgggtgccaagaaggaccgcacccgtgtgggccgcggtgaaggctccaagggtaagaccgccggtcgtggcgccaagggccagacgaagcgcaaccacgtgcgtccgggctttgaaggcggccagctgccgctgtacatgcgcctgccgaagcttcgtggcttcaagaacccgttcaaggtcgagttccaggtcatcaacatcgctcgtctcgtggagctcttccccgagggcggcgaggttgctgtggccgacctgatcgccaagggcgctgttcgtgacaacgctccggtgaaggttctgggcgacggcgagaccaccgtggctttcaccctcaagggtgttaaggtttcggcttccgccaagtccaagatcgaggccgccggcggttccgtttccgaggactgattagtcctacggggagcgcaataggctgtacaaccccccgcccgccaataggtggacgggggttcccttttctaaaaaattgttgttctgagtgcagagaagcagtctcaacacaatgatcgttttgagtatgcttccccccgttcagtacgacggagcataattcaggtaacattcgcgagacatgaagtggccgaagtaggcactttagactatgctcgttcgttagtttgtgtatttcgcgcgattggcgcgctattgggaggaaatctaggtgaggacactaatccaggccctgaaaaccaaagagttgaggaagaagattctcttcgtcctgttcatcatcatcgtctaccgcatcggttcgttcattccgacccctggcgtggactacaacgtggtgaacaagtgcatggccactatcggcagcgcctcccaggagaacttcatcggactggtgaacctcttctcgggtggcgccatgctccagctgtctatcttcgcgctgggcgtcatgccgtacatcaccgcgtccatcgtggtgcagctgctgcgcgtggtcatcccccgcttcgaggccctgcataaggagggccagtccggcgaggccaagctcacccagtacacccgttacctgaccatcggcctggccgtgctccagtccaccaccatcctggtcaccgcccgctccggcgccctgttcaactaccagtgcgaccaggtcatcccggacggctccgtgttcaacctcgtggtcatggtcctcatcatgaccggcggcaccggcctgatcatgtggatggccgagctcgtgaccgacaagggcatcggccagggcatgtccatcttgatcttcatgtccatctgctccggcttcctgccccaattgtgggagatcggctacggcaccaacggcaccgacggcgactggctcaagttcggcatcgtcgtgggcgtgctcgtggtcatcctcatcttcgtcgacttcgtcgaactgtgccagcgccgcgtcccggtccagtacacgcgccgcatgatcggccgtaagatgtacggcggctcctccacctacctgccgctgaagatcaacatgtccggcgtcatcccgccgatcttcgcctcctcgatcctcgccatcccgaccctgatcgcccagttcggcaagtccgaccagtcctgggtcaagtggatcaacgccaacctggcgaacaccaccagcgtgtggtacatcgccctgtacgcgctgatgatcgtgttcttctgcttcttctacacctcgatcacgttcaacccggacgagaccgcggacaacatgaagcagtacggcggcttcatccccggcatccgcgccggcaacgccaccagccgctacctgacctacgtgatgaaccgactcaacaccgtcggcgccgtctacctgctgttcgtggccctgatcccgaccgtgctgatcatggccctcggcctcaacgccaagctgccgttcggcggcaccacgatcctgattatcgcgggcgtgggcctcgacaccctgcgccaggccaaggcccagaccgaacagttccagtacaccggcttcctgttcgaaaacgtggaccacaaagagggctgacgcccgcttggcagcggtcgcccgcaatgggcaggcggccgcgcgaggagtggaacagtccagtggactgttccacgacggagcaatctttcttccgcatataactcaatggctcccttaaccaagggagccaaaaccgtattaataaccgacataaaaggagaccaccatgcgtctgctcatcatgggcccccagggcgtgggcaagggcacccaggctgctctgctcgccgaacacttcaacatccccaccatctccaccggcgacatcttccgctacaacatcaagaacaagaccgaactcggccttgaggcgatgagctacaccgacaagggcgagctggttccggactccctgaccaacaagatcgtcaaggatcgtctggccaaggaagactgcaagaacggctggatcctcgacggctacccgcgtaacgccgcccaggtcaccgctctcgacgagatgctcgccgacctcgacactccgctcgaccacgtggtggccctcgaagccgcccgcgacgtgctgctggagcgtatgaagaagcgcgccgccgagcagggccgcgctgacgacactccggaggccatcgccaagcgcctggagacctatgagaaggaaaccgctccgctgctcgacatctacgaggcccgtggcctgctcgtcgtggtcaacggcgtcggcgacatcgacgagatcagcggccgtatcatcagccacctcgagtagtaggttcgccagcccgggcaacaagccggagtgatgccgaaataccacatcaacgtttccatacccctgtgcgacacgccgagtgttcgtacaggggtatgtgcgtatatagttgacagttggtgtgtcttcggatatgccatagtaatcatccaacggaataggactagaggcacatggcaaaagacggtgtgattgaagtcgaaggacaggtcgtggaagcactgcctaacgcgatgttccgcgttgaactcgaaaacaagcacatcgtgctcgccacgatttccggcaaaatgcgtaagaactacattcgtattctgccgcaggatcgtgtcgtgctcgaaatgagcccttacgacctgaaccgcggacgcattacgtaccgttacaagtaaaggtacacaagaaaaggataaccatgaaggtcagccctagcgtgaagaggatctgcgaaaactgccgcgtgatccgccgtcacggccgcgtcatggtgatctgcgtcaacccgcgccacaagcagcgtcagggctgagagcagattctccagcggcactaagtaaataaggcactctctcacagtgcttcccgcaagggaacgacactgaaccacgggtacgtaggcccgtgccgggtaaccgggcgagcgggtgcaagacctacggcaacaagaaggaatcgcaatggcacgtcttgccggagtcgacatccccaatgagaagcgcatcgagatcgccctcacctacattttcggtgtgggtcgcactcgtgccaaggaaacgcttgccgcgaccggtattagcccggacatccgcgtcaaggatctcaccgacgagcagctgattacgctgcgtgactacctcgaagccaactacaagatcgagggtgacctgcgtcgtgaagtcgatgcagatattcgtcgcaagattcagatcaactgctaccaaggccagcgtcaccgtaagggacttcctgtgcgcggccagcgcaccaagaccaatgctcgtacccgcaagggcccgaagcgcacggtcgccggaaagaagaaggccaccaagtagtcggtggcatgattcgggccacgggatgattttcatcccatcgcccgaacgtcaacaacaaagttcgttactaggaaacgagggtcaatggcagcgcctaagcaagccgctcgtaagccccgtcgtcgcgaccgcaagtcggtcccggtcggccaggctcacatcaagtccactttcaacaacacgatcatttcgatcaccgatccgtccggcgccgtggtgtcctgggcgtccggtggcgatgtcggcttcaagggctcccgtaagtccacgccgtacgccgctggtatggctgccgagtccgccgcccgcaaggcgatggaacacggcgtcaagaaggtcgacgtgttcgtcaagggcccgggttccggtcgtgaaaccgccatccgttccctgcagtctgcgggcctcgaggttggttccatcaccgacgtcaccccgcaagcccacaacggcgttcgtcctccgaagcgtcgtcgcgtctgagcactcagcaataccaaatccatccaaaaccgcctgaccggtgagtgcaccaccgagttcaagctgaaaggataaccacagtgcttattgcacagcgtccgactcttaccgaggaatctctgaatccgcagcgctcccgcttcaccatcgagccgctcgagcctggcttcggctacacgctcggcaactcgctgcgtcgcacgctgctgagctccatcccgggtgctgccgtgacctccgtgcgtatttccggtgccctgcatgagttcaccactctgccaggtgtccaggaagacgtcaccgagatcctgctgaacatcaagggcatcgtgctcaccagcgaatacgacgagcctgtggtcatgtatctgcgcaagagcggcaagggcgaagccgtggctggggacatcaccccgccggccggcgtcaccattgccaacccggagcagcacatcgctaccctcgccgacgatggcgaactcgagatcgagttcactgtcgagcgtggccgtggctatgttcctgcccagatgaacaagcaggacaacgatgagatcggccgtattccggttgattccatctactccccggtactcaaggtgagctacaaggtcgaggccacccgtgtggaacagcgcacggacttcgacaagctcatcctggacgtggagaccaagcccgccatctccccgcgtgacgcggtggcttccgccggttccaccttggtggagctcttcggcctgtgccgtgagctcaacgcccaggctgaaggcgtcgaggtcggtccggccccggtggccgaggagaccaaccccgagatggccgttccgattgaggacctcaacctgacgcagcgttcttacaactgcctcaagcgcgagggcatccacaccatcggtgagcttgtctcccacaccgagcaggacctgctcgacatccgcaatttcggtatgaagtcaatcgatgaggtcaaggagaagctgcagaccttgggcctgagcctcaagtcctcgccgatggccttcgataccaataatctcgaaggtggcacgttcttctcgccggaagacgagtgatctgcctctttgaccaatcgttcgttcactaggcaagcagatgttcgggcatatgcccacctgcttgcctgaagaacggacatataaggagtaaacccaatgcctacacctaagaagggcccgcgtctggcttccagccccgcacacgagcgcctcatgctggcaaacatggcgaccagcctgttccagaacggccgcatcaccaccacgctgccgaaggccaagcgccttcgtccgctggcagagcgcctgatcaccttcgccaagcgtggtgatctgcactcccgccgtcgcgtgatgcgcgtcatccgcaacaagtccgtggtgcacatcctgttcacccagattgccgagcagatggagcagcgggaaggtggctacacccgtatcgtcaagatcgctccgcgcgttggcgatgccgctccggccgctgtgatcgagctcgtcaccgagccggttgccaagaaggctgttgtgaaggaagctgaagccgccgccaaggttgccgaagaagaagctccggccgttgaggctgaggccactgaggctgctgaggctattgaggctccggtcgaggagaccgccgccgctgaggctgaggctcccgctgaggaagccgctgacgccgagaaggccgagtgagctgaatagcgtttcgctaagctagctgaaagggctggaatccgtttgggttccagcccttttgcgttgttttcatagaatctacaacgtacgtacggcccgaatggcctcggctcttgcggccagctgatcatcggcgggatatgcgatatgctccaaagtcaggccctgcggcgcaatcggcccgcttgagccttcacgtactggctcggccattttgccggcaaaccactccagtgatttgcgtcccgaaccaactttgatgcatgagccgaccagggagcgcaccatattgcgggcaaaggcgtccgccacaatcgtgaacactaccaggccggactccagcgacggagtccgatatgcttcatgcgatgccatctcatccggtactaggggagtgatcggcacccgccgccaataggcggtcttgacttcacggatcgtagtgcctcccggattcggagtggcgaaggaaccaaaatcgtgcaggccgatggtcaatgaggctgcgcggttcataagctccagatccagcgcttcatccacggtaagtacgcatccacgcaggcgcgggtcgacctcagacgaacgatcggcgacccgatacacataagtgcgctccaatgcggagaacctggcatcgaagccgaccggagctacggcaatgccatgaatgacgatgtccgaaggcagcacagccttgagtctgcgagtcagcgcctcggtgaccggaatggtcatgtgacctacgcagcgattcagtacctcatcggatacatccagatgcgccacttggtgggaggcatgtacaccggtgtcggtgcgtccagccactgtcaagcgtaacggttcggccgcgtcatcggtcggcacccgcagcaccttgtgcagcgcatcttcaatggtgccttgcactgtacgaagattgggctgtttggcccagccatagaatccgccgccgtcgtaggccaagtcaatgcgcagtcgtgtcatagccattcattgtaacgagtgcggtcggcgagacgagtgcggtcgtcaagatgcacgcggccggcgaagtgacctgcctgtaacattctcgcgcgtttgttgaaacgggcccgccttaggttgaaaccatcaaacccggttacggcttgcggcgtcagcgtgcgctcaacacgcctaaccgcttgaagccacagaagccgccacagcaaggagcaggcacgatgatcgaatccgcagcacgcagactggcccatgaactggtaaaccgccgcgaagcgatcaatcgagagctgtcccgcaacggtgtgcgtttcggcatctacaagaacggcgaataccatgaccggctgttcccgtacgaccctgtgccgcgcattatcgaatccgacgaatacgacgaattggagaagggcctgaagcagcgcgtcaacgccctgaacgcctatctgaaggacatttattccgataagcgcattattcatgatggcgtcgtgccggaagaatacgtatacacctcggccggctacttcccgcaggtcaactgtgtgacccctcccggcggcattttcgcgcatatcgccggcgaggacctggtccaaggcgaggacggccgctggtgggtgctggaagacaacctgcgcatcccctcgggtgccagctacccgctgttcgtgcgcgacatcgagcgccgcatctccccgcgcctgttccgcgacgttcgtattcgcgataatcgcgaatacccgcgcctgttgcgcaaagccatggactttgtctccaccgagggcatcgccgtggtactgactcccggccgctacaattccgcgttcttcgagcacgcctatctggcggagaaaaccggtgcggcgttggccttccccgaagacctcgaagtggtggacaacaaggtctacttcctcgactacgccggcaaacgccaccgtgtgggcgtggtttaccgccgcctgtccgacgaattcctcgacccgttcgccttcaatcctgattcggtgatcggtgtgcccggtatcctgtccgcctaccgcgcgggcaacgtggccatcgtcaacgcgccgggcaacggcgcggccgatgacaaggccgtctactacttcgtgccgcagatgatcaagtactatctcggcgaggaaccgattctcaacaacgcgcccacgtacatgccgatgttcgaggccgaccgcaaggaagtcctgaatcggatgggcgagctggtcatcaaggatgtggccgaagccggcggttacggcgtggtgtttggttcgtcgctggatgccgccgcacgtgaggagctcgccaaccggatcaaggaggagccgcgtcgattcattgtccaagaggtgattcagttccgtgatatcgatgtggtggacccgaagaccggcgagatgtcgccgcgcaagtgcgatttgcgtgccttcgtggtcaccggcaagaatacgcacgtgtggtattcgggcttgactcgatactcgtcggtgcccggccagatgattgtcaactcgtcgcagggtggcggattcaaggatacgtgggtgttggcacccgaatccggcgtggagcacgagtacggtgccgaaacgcaggtggcgaacctgctgagccagtcccgccaccattcgttgtcgctggtcaccgcttccaaggcagacaacctgtattggctgggtcgatacaccgagcgcgccttcaccacgctgaaccagttcttcccgttctacgatcgtgtgatggacaccgatgtggacgccttccgtccgttcgctcacgcactcgacctgcccgaagatttcgaggacttcgacgggttcgtgaacagcttcctgtacgacgggtccaatcctgattcggtgcggtcggccgtaacctccgcattcaacaacgccgtgattctgcgcccggaattgagctcgcgtctgctgcagtacgtggagttggcgatgaccaatatcaccgatgccgccaaatacgcggccgatgccgaggacatctacaagcagcgcgatattaccgatgacatgctcgccttctggggcggcatcgagaattcgccggtcgaccccacgctgaaggcgttcatcttcatcggcaaatatctggaacgcatcgacctgtacacgcgcttcggcctgacgatggaggatctggaagcgccgctcaagaagctcgccgcctattcgatgaccttggacggcatgccgctgcccagctgcttcgccgacggactgagctggctggtcggtcagctgccgtctcgcggatatcaggaagtcgccgacctgctgaagaagtaccttgacgactactccggccgtgtcagcgcgctggccatcaaagacatgggctcactgagctccatgaacatggacgccaagcgtccctgatcccgacctgacaccctgacgggttcaaatgctatggtggtatggcgaaaaaaccgtgcgcccgagtgccggcctgtgcatatcagcagattgccggaatatatgcgtgggctgtgagcgcacggaccatacctcagccatggctgtagtgtcgttatcccgagaatatgccggttgccggctcgtgtgcaagtgcaggagacgttgtgaaaaaactcgtgttcgactatgagatgaggctgtccttcagcgcaccggtcaccgatcacaggttccagcttcgctgtattccctccactggccctcgccaacaggtgattgacgtggaagtgaagattcagcccgaaaccgaactcgaaaccaccatcgactcctttgactccgtggtgatgaccggattcatccctgagccgcacgacatattcagctactcggtgaccggcatcgccttcgtggacaatgcgcatatccataaggaagcctataaaccgctgtaccgattcaattcagcgctcaccattcccggcccgaacgtggaggcgatgattgccgtatgccgcgaacgcttggcggcgctgccttccgacgccactccggtgcagcaggctgccgaagtgatggatgaggtctacaaggcgtttgtgtatacgcccggttccaccacgattcgcaccaccgccgaacaggccttggctcagcgcaagggcgtatgccaggattatgcgcacgtgatgctgtccgtgtgccgacatgtgggattgaccgcgcgctacattgccggtttgcttgggggagagggcgcgacccacgcttgggtcgaggtgtatcaggatggccgatgggtcggactggatcccacgcataaccgattggtggacgacagctacatcaccatcgcccacggccgcgattaccgcgactgcatgctcgacatcggcatcttctccggctacaacgtccagcagtcccaatgggtcaacgcctccgtccacgaacaggtggcataaataaaattccaagccccctctgatgagctgagccgtgaagaaaacgccggaggcgtttttaggcgaaggcgaacgacagtgagcaaataaaatggcagctggaaagctgtccttaattgcgttcgagctgtcagccgtaaggctgaccgagggagagagcactcaatgcagagtggccccgccgccgcttctaccaccaccaatattcggattttcgtcgttgcaacattcggattttggtagttgaccaattcggactgttaatcggctcatcgtctgacccattgcaatctcacacaaaatcgcattatcccacgccgaatcgagctcagcgaaactccgatttgccaggtcggcagaatgtggcataatgaacaagttgccattttggcagcatggataagtgtccgagcggtctaaggagcacgcctcgaaagcgtgtgaggtgaaagcctccgcgagttcgaatctcgccttatccgcctttagggttccgggtttgtcccggaaccctttttgtttttgatacgaacgtccgtattcgctcctgtgctgtatcgtatacggcgtgtcgggtggaaaatagcgaaaaggataacgttgtactcagcgggacttgcgtactaagtacaaccatcgtattatcgatatcaacagaagtacaaggttgtattaaatatccagaacgcacattcaccgctgattggcgatgccgcaaaacaggtgaaccaagaagatgggccgattgcttttggtatttagcacaacgttgtcttgcggtattgaagacaacgattaaaggagagcacatgtccgagcattcgcacgacaataaaccgggggagctggaggaatctcgactcgtcgtcgataatgactttgaagtagctccggtcaacgacagactgttcgggtcgttcgtggagcatctgggtcgctgcgtatacgacggcatctatgagccgggccaccccgaagccgatgaagacggtttccgcaaggacgtcatcgaactggtcaaggaactcggcgctaccacgattcgctatcctggcggcaatttcgtttccggctatcgctgggaggatggcgttggtcctcgtgatgagcggccgcgtcgcctggacttggcatggcattccaccgagaccaatcagtttggtctgcacgaaatggcgaaatggctggaaaaaaccggcggcaacgagctgatggaagccgtaaatctgggtacccgtggtcttgaagaggccctcgacctgttggaatacgcgaatattcccggcggcaccaagctctccgaggagcgtcgcgccaatggtgccgatcagccgttcggcatcaagatgtggtgcttgggcaatgagatggatggcccgtggcagaccggtcacaagtccgccgaggattacggcaccttggcggcctcggtggcggcaggtatgcgcgccatcgatccgaacgttgaactggtggtctgtagttcatccagccacgtgatggacaccttcggcaagtgggaagaaaccgtacttgagaagacgtttgacaacgtcaacttcgtctcctgccatgcgtactaccatccggaacttcagcctgatggcacccgtgacatgaagagcttccttgcctcgggcgtcgatatggacggtttcatcaacgatgtcgccgccgccatcgatgcaaccaaggcccggctgaagagcaagcacgacgtgttcatctcgttcgatgaatggaatgtctggtatctcaacgaagagccgagcaagaatccggaaggcatcggcaattggccggttgccccgcgcctgctcgaggatgtgtacagcgccgccgacgccgtggtgttcggtgatttgatgattaccctgctcaagaacgccgaccgcgtgcacgccgccagcctggcccagttggtcaacgtaattgcgccgattatgaccgaaccgggcggcccggcgtggcgtcagaccacgttctatccgttctcgctgaccgcaaagctcgccaagggcggcacggtgcttgaaccgaaactggcttccggaacgtatgaaaccgacaaatacggtgaagtgccgacgatcaattccgtagccgtgcgtggtgaggacggtacgatcagcgtgtttgtggtcaatcgctccatggaagcggccaatgactttgccatcaagctgccggaaggattcgcactttccgcggtcgaggcgcaaaccctgcacgaggatgatctgctggcaaaaaacacgctggaagaccagaaccgagtcgttctgcaccccaacaccaccatcacgtccgacgccgataccggcactgtgcgtgtgaccttgccgccggtctcctggaccgccgtgcacgtgaagtgattcgagtgacggtggcgcatgacagggcgcagtctcttatggttgctgtgccctgtacaaccaccaagcaatacccaaacaatcatcaacatgcccggattgcagaaagagaggttcggattcgccactaatgtaatgtggcataccagtcaaaggaagacaatgccgtcattcacatcgactggaacaattcgatacccaacaaaggaataaggagaaaagacgggtatgtaaaaagctaggttgaaagccggcggtcagaaagtcccttgttcggatggcgtgcgtgcgtttcttcaaccagaaagtttaacctctacgttcgatcgtcctgcagtattgtcagaaggatatttgcctaatggtgcatggggtccaacggaggaaagctccttggctgaattctgaggttgaggggtagatgattccgatatgaggaggagatgctcgacccgactgtgacttaccataataagaacataatgacgctgttgaaggtgtgtcatgtaataagcagaaatggattcgaacaatgggaaaccgcgtaactatcaaggacgtggcgcgtgaggcgaacgtctccatcaagacggtttccaatgtgctgaatgacactggcagtatgagaccggatacacgtcgccgtgtggaagaggtgatgcgtaagcttggatataccgtcaatatttcggcgcgtgcaatgcgatctggcggcacaaagcttattggactcaacatcttcgatttctcgcagccgttcgttccttttttcactgacaaggtcattgaatacgcaaaagaacgccattacggtgtagtcatcaacacatatggttccgacggtgaagggttggttgccagcgttgacgagtcctatcgtttaggggcggaaggatggattctgttcgtaatgtcgccgctcgcggatgaaggggccgttctggagcagccatatccgattgtaacgaccggagaccatctggcctacgggaaaagcgattggatcaccatgcccaacattgaatccatctccacggttgtaggaagatttttggatgaaggtgcccaaacggttgctctgatgggtgttcttcctgaactggtggatgaggcagtgctgcgtcgtcagacggaaggggcccaggcgttacgcgcccaaggatatgtgaaggcatttgaagagcgcggattatcggtgaattggcggtatgtgattccggcagaaagcatgaatcagcgtgaaggtatgcgcgtgacaaaagctatgctagacaagctcccatgcccggatgttgtagtgtgtctcaatgatgccattgctttaggcgcaattcatgaattgcaacgatgtggtttgcatgtacctgacgatgtacaagtggtcggcttcgataacgtgccggaagccgagtactcggtgccggcgctgaccaccatcgatcctcatatcgatgattatgccaagcatgccgttgacatgcttatcgaccgcatcgaaggatactcaggcccggcccgtacgtacaccaccgatttcacattggtggaacgtgcctcaactcgacttgcccactagcatccaacaagttcgcatcggcttcgtgaggagtgtgtgtctactcgaacaatgcggcgtcagtcgctgggtagccaagttggaacgcggtgtaggcgtgcttggcggccagtgcggcgaggatgagcagcgtatcgctctcggtggaagatttcgattcggtcacggccttgatctgcgcgcgggcgcagtccatttcgatggcggcggcggtcggtacggtttggccgcttgccttgtcggcgatggtggtggggttggccagtagttggtcgatggcatagaccttttggcgggggtcgttttggccggaagaactggattgtgcgccggaatcatcaaaattgccgttcgccagcgcaaccaactgctgcccggcggtcttatgcatatcgctcaacgccaacgtagccccagcggtctgtcctcgtgcggccaagacctcgatagcgaatccggcgcgatcctcggccacggccatcgcatccaataccgatcggtcaacgttggcggacgtgacgccatcaagacgcgccggcgtcacctcaggcgcggactgcccgaatttatcggccagaaaagccatccattgcttggtctgcgcgtcacgtaacgttccctcggcaaaacgacccgaacaatacccggcaacgtcaatccaagccaggggggcggccagaccggtggcatactgctctaataacggtgtgccttcagccggatgggtggcgtagttcgccaacgtcatcgctttctcgcaaggggtcatttgagcttccgcctcggcccgtccggccaatcgcggcatcgaacacgccgaaagcgaacacagcatcgcgctcgcgcatagtacggatgccaagcgccgggtaaaccgtcctgaagagaagcgtgtctgcatggaaacatacactaatagctaactgtgactactcataggccatgcgccacataacttcataggaggtacggatcgatggaactggacctgacaggaatacacaagctcgccgccgagcaaggaatcgaccccgaaaccctggatgatgcgctggcagaggccctgcgcctcgcctacctcaagaccccgcacgccgccaagcacgcgcgcgtggagcttgacgaacgttccggcaacttcaccgtgtgggccgccgacgaaattccggtcgaacccaccgaagacaacccttaccccgttcccaagctgggcgaggaatacgatgacaccccgcgtgacttcggccgtctcgccgcagccaccgcacgccaggtcatcacccagctgttccgccgcgccgaagatgagaaggtattcggtgcgttctccggccagaagggcaagctcatcaccggcatcatccagcaggatgcttccgacccctccaacgtgcatgtcgcgatgggcgatgtcgaagccattctgcctcgccgtgagcaggtgcccggcgaacgttaccgccacggcgaacgcatccgcgtgtacgtggtgaacgtggcccgtggcatcaaaggcccggaaatcgtggtgtcccgctcccacccggagctggtccgcaagctgttcgagcgcgaagtgccggaactggtctccggtgccgtgtccatcatggccatcgctcgtgaggccggcgcccgcaccaagatcgcggtcaaggccaacaccgatggcgtgaacccgaagggcgcgctgatcggccccggcggcgctcgcgtgcgtgccgttatggagaaccttggcccggagaagatcgacatcgtcgactactccgacgatccggccaagttcgtggcagccgcgctgtccccggctgtggccaccggcgtgcaggtgatcagcgagaagaacaagaccgccatcgccttcatccacgacgaccagctgtccttggccatcggcaaggaaggccagaacgcacgactggcagccaagctgaccggctggaagatcggcatcgaatccgccgaggcccatgccaagaaagtcgccgccgaaaaggccgcccaggctgcggccgaggctgctgctccggaagccgaataggccgccgggctcgaaggcgaatgatcttcagggcgcattatttcctgatacgagccgcgtcagcaatggcgcggctcgctgcgtctacgctatccagcgctatgagtatgcttgattggcgtatgtgggctggcgcagtgtgcgcgaaatcgcccacaccagagacgaggtaacacgatcatggtcgcacgatgagacagggtaggcttgccgtcatcaccaactgaccacgcccatgcacgcgcgtggtcacagaataggagtaattagtggcgaaaccacgcgtatacgaactggctaaggttttgaatgtcgatagcaaaaccgtgcttgagaagcttaaggacatgggagaattcgtcaagtccgcttcttctacgattgaaccgccggtagcccggcgtctgaaggcagagttcgccaaggacaacgccaagggcgattccaagcccgtgcagcagcgccgcccggccgcaccttcagccccggcttccacttcatcttccgcaccgactccggccgctcccgcacgtcaggcatcgcctgcctcggcacatcagcaggctccgactccgggtgcaccgacaccgcgtccgcagggcggcgcacgccccggcatgccgacccccggccgccacggtcagaacgacaaccgtgagaatggtcgcgataatcgcgaaggccgtgagaacggtcgtcagagtcgcccgaacgatcgccgtaacaacgatcgtcgtaacaaccagggccgtccgaacaatggccagccggttcagcatcagaacaaccgcggcaatgccgcttcaaatgcgattccgcgcccgcacgctcagggcccgcgcccgggcaacaacccgttctcccgcaagcagggtatgcacaccccgacgccgggtgatattccgcgtccgcatccgatggctcgtccgactgctgataacggtcgtggcggtcgtccgggccgtcccggccaaggccaggggcagggccgcggcttccgtggcggtcgtccgggccaaggtggtcagggcggtccgcgtcccggccagtggggccacaaccgtccgggtcagggcggcggctcccagggtgccggtcagggcggcgcacgcggcggcttccgtgggggccaaggcggcggcaataacttccagggtggcggtgcaccgagcaacggtcccgcacgtggcggcggtcgcggcggtcgcggcggtgccgcaggcgcattcggacgtcagggcggcaagtcctcaaaggcccgtaagaaccgtctggcaaagcgccatgagtatgaggagctgaaagcaccgaccatcggcggcgttcgcatccccaacggcaacggccagaccatccgtctgcgtcagggcgcgtccctggccgatttggcggagaagatcaacgtcaaccaggccgcgctggtcaccgtgctcttccacctgggtcagatggctaccgccacccagtccttggatgaggagaccttccagattctgggcgaagagatcggctggaacatccagctcgtctccgcagaagaggaagacaaggaactgctccagcagttcgacatcaaccttgacgaggaagaactgcaggatgacgaggatctcaagcctcgcccgccggtcgttaccgtcatgggccacgtcgaccacggtaagacacgactgctggataccatccgcaagaccaacgtcatcgcacgtgaggccggcggcattacccagcgcatcggtgcctaccaggtcaccgtgaaccttgaaggcgaaccgcgcaagatcaccttcctcgatacccctggccacgaggcgttcaccgccatgcgtgcccgtggtgccgagctcactgacgtcgcgatcctcgtggtcgccgccgacgatggtgtgatgccccagaccgttgaggccatcaaccacgctcaggccgccaaggtgccgatcgtcgtggccgtcaacaagatcgatgtgcccggtgccaacccggagaaggtccgcggccagctcaccgagttcggcttggtccctgaagagtatggtggcgacaccatgttcgtcgacatctccgccaagcagaacctgcacgtcgacaagctgctcgaagccgtgctgctcacggctgacgctgagctggacctccgcgccaaccccgacatggacgcccgtggtgccaccgtcgaagcccgactcgacaagggtcgtggtgccgtggccactgtgctggttcagcagggtacgctccacgtgggcgatgccatcgtggccggcacttcgtacggccgcgtgcgtgccatgctcgacgagaacggtcagccgatggaagcggccggtccgtccacacctgttcaggtgctgggcttgacctccgtgcccaccgccggtgacctcttcctggtcgcctccgatgatcgtgccgctcgccagattgccgagaagcgtcaggccaccgagcgtgccgcccagctggccaagcgtcgcaaggtcgtctccctcgaggacttcaagaagaagttcgccgagtccgagatcgacatgctcaatattgtcatcaagggcgattcgtccggttctgtcgaggcgctcgaggattccttgatgaagatcgaggtatccgacgaggtcggcatccaggtcatccaccgcggcgtcggtgcgatcacccagaatgatgtcaacctggccacggtcgacaaggccgttatcatcggtttcaacgtgcgtccgaaccgtcaggtcgcggacctcgccgagcgcgagggcgtggagatcaagtactactcggtcatctaccgtgcgatcgaagacatcgaggcatccctcaagggcatgctcaagccggaatacgaagaggtcgtcacctctcactccgagatccgcgagatcttccgctcctccaagttcggcaacatcgccggcgttatggtgcaggacggcgaggtcaagcgtggtacgaagtgccgtatcctgcgcaacggcgtggccacggtcaacgacctcgagatctcctcgctgcgtcgcttcaaggacgacgttcagtccgtcaaggaaggctacgaggctggtatcaacctcggcaccttcaacgacattgaactcggcgacatcatcgagaccttcgagatgcgggaagtcgagcgcaagtagtcattgttaagccccctctggcgagggggctgtcagccgcagactgactgggggagagacatggtagttccatgattttctctcccccagcctcactgcgttcggcagcccctcgtcagagggggctcaagtctagaaaaggaaattcctatggcaggaaccaacccgcgcgccgcacgtattgcggccttgattcagcgtgtcgtcgcctcctccattgagcgcgaactgcatgacaagcgactcgccagcatcaccgtcaccgaagttcgtgtgaccaacgatctgcagatcgccaaggtctactggacccagctcggccacgaaggccacgaggaaggcgaacgcaagcgcgcccagcaggcgctcgatcaggccaagggtcacctgcgttctctggtgggccacaaggctggactgcgcctgactccgcagctccaattcgtgttcgatgaagtgcccggcgaggctcacgagatcgaagacattctcgccgtggccaagaagcgtgacgaagaactcgcccgcgcccgcgccaccgcccagtacgccggcgacgccgatccgtacaagcatgacgacgagcccagcgacgacttcgaagacgactctgacgaggagtagtgtgcttcatacaacacccagcggtctgctcatcatcgacaagccgcaaggcgtgaccagtttcgacgccgtcgccgccgtgcgcggcgcgttgcacatcaagaaggtcggtcacgccggcacccttgaccccatggccactggcacgctggtcatcgccttcggccacgccacgcgactgctcaacgccatcgtggcgcatgacaaaacctacgaggccaccatacgcctcggcctgcgcaccactaccgatgatgccgaaggcgaggcgcttgtcgatgatgaagcccgctcccgctggcaaacgctgtcagcgcagctgaccgagggcggccagagcggcgaaccaacggcgtcaccaactgcctcatggcaaaacctgctcactcgcaccatcgccaccaatttcaccggcgatatcgaacaagtacccaatacgttctccgccatcaaaatcaacggccagcgtgcctacgacttggctcgcgaaggcaaggatgtggaactcaaaccccgcctggtgaccatcagcgaattcaccgtgctggatatccgcagcggattcgtagcaggggagcaggccgctgaaccattgcgggaagacgcgaacacgggaacgattcccgcacttgatattgacgtgcgggtcagctgttcatcgggcacctatatccgcgcgctcgcccgcgacctcggcaatgaacttggcgtcggcggatacctgacccgtttgcgccgtacgcgagtcggccgattcgcgttgccggacgataccagcggacttatcgcctctgagtcgatgcttgacacgcgaacccataccgtcaccgcacataccgatcagaagacgttcactaatcgggaagggcaaaccgtcacgcgcaacaagtgcgtattgaacactcctgaaggtcttgccggtgacgagcgccgcaactggctgcttgaccatgccctcaccatggaacaggccgctcgaggcgcgatgccggcgcttgacatcacacctgaggaagccagcgaattgcgcttcggccgccgtatcgagcgtacaatcagcgagcccactgccgccattgtgccgcaaacgcatgatgtggcggcgattatcgagcgtgccaacgctcatcaggccaagccggtcaccgtattccccctcgcgtaaagtagacgcggtgaaaagtgcagcttgatacaggccgcgcacaacaacgcctatattgcatgaataacatcgcacggataaaaggaacagcacactgatggatatcacgcacctgacccctgacgccgaaggttcgattgaatggccctcgttcagtaacgacaagaaggccgtggtgacattgggcgcatttgatggcatgcacttgggacatcaggcggtgatcaagcgtgtggtggaactcgcgcaccagcatgatgctttttccgtggtgattctgtttgacccgcgccccgcattcgtgcacggctgggccgcctcgcaccatggcgaggaacccgcggtgcagaacgtggatgccgaagccttgaccagtgtggatgatcgactgcaccgcatggaacagttcggcgtggaccatgtgttggtggtgcactacacgctggccttcgcagccatgtcatacattttcttccttggcagactcaccggcaagctgggcatgcgtacgctggtcctcgggcaggatgccgccatgggcaaggggcgagaaggtgatgtgaagcatatcgccaatcttgccgccgccaccggtgtattcgaacttgacgtggtcgatgaccgtggcccgggtgaagtgcgcattccgcgcgatttcaagccggaagccccgagcgaatggggagagcccgtcgacccgctggccaatgccaccaaggccgagcgccgcgcatggagcaagaagaaccaggccaaggcaatgcgcgcctggagctccaccaatgtgcgctacctgctggctcatggccgaatccaggatgccaacgccattctgggtgctccgcacgccatcgaaggcgaagtggtacacggtgaggagcgcggccgcaccatcggattccccaccgccaatcttggctccgacattgcaggctacattccggtcgacggcgtctatgccggttggctggtagatggtgaaaaccgttggcccgccgccatctccattggcaccaaacccaccttcagcgagaaaacagggctcaacgaacgtgtggtggaggcctactgcatcactgaagaatggatcgacctgtacgaccacaaggttcgcgtcgaattcgtcggcttcctgcgcccgcaggtcaagtttgatggccccgaccaactcgtcgacgaactcaagcgcaacgtcgaggagaccaagcgtcttaccgcctgaggcatatctcagggctatttacgcactcccaaggcgtctaatgcgtcggacaatgtgttggactccaccagctgaagtccctcgacatgcaccggcttgcgcagtggcggaatgaccgccgtggtgaagccgaggcgtgcggcctcgcgaaggcgatattccatacgcggtaccgggcgcacctgaccggtcagggaaatctcaccaatggcgcacgtggctcgcgcaatgggttttgacgtggcggcgctcgccagtgccgccactatcgccaagtcggaaccgggctccttggcctggcccccggcaatagtggagatatacaggtcgttggacagcaggttgagcttgctgtgacggtagagcaccgcgaccagcatggcgatacggctggggtccacgccattgaccgcacgacggggtgtgggcagcaccgacgtggtgaccagagcctgtacttcgataggcagactgcgatgcccatccaatgtgaacgtcacgcaggtgccttccacgggtgccgcgttggccgcatcagggccgtctccagacaggaacaatccggcgggatcggtgacctcttcgatgccttcaccgctcatgtcgaaacagccgacttcatcggtcgggccaaaacgattcttcaccgctcgcagcattctcagcgcagtctcgctgtcgccttcgaattggcagaccacatcgaccagatgctccaatgtgcgcgggcctgcaatcgaaccatccttggtcacatgaccaaccagaaatactggaatgtcaagtgtcttagcggtatctatcagcgcgcttgccacttcgcgcacctgagtcgaaccgccggaaatgccatcgacctcctgcgagacgatggtctgcgccgaatccacaatggccaaggccggcttgttctgttcgatcagccccaatactgtggacaggtcggtggtggaggccagtaacaagttcggctccaccgcattgatgcgggaagcgcgcaaacgaacctgcgcctgtgattcctcgccggaaatgtacagcacggtgttggcgtgtgttgatgatgcgttgccccgcatcggcaccgtgttcgatgcgttgccctgcgcccggcccgactgttgggcagaccgctgacctgcccctcggaacgtactgtctcccgccacaacgcgcgcgatattgccggccgtctgcaacagcaatgtcgacttgccgatacccggttcgcccgctatcagcgttactgaacccggcaccacgccaccgccgagcacacggtcgaattcggaaaacccggtaccgagccgctcgacgctttccgtgcccacttcggtaatcggacgggctgcagatctggcgttgttggcaaccgtaaccgactgcgtgcgtgatgttcggccgggagcggccgtgcgagagcctgccgccggccgagcctcgtgaaattcctcgaccgtgccccactgaccacactcggggcaacggccgtaccacttcggcccgttccaaccgcattcggaacatacatactgcacacttgatttcgccatggtctcaccctaacccaaacaccagcggacggtaaatttttaccgttcacaagagtttcacgcggcttgcgcacaacgactaaaattacggccgcctagcgtcacgcggctgtgagagaatcggggcatgactaatagtgagaactcctcgaccacgcaatcccatggcaagttgattgcagtggtggttgccgcagctgttgtgattatcctggcagtgctttcggcctttgtgtggccgggttgggccatccagaagaatgatggcacctccactaccacccaaaacagccagcagaaaaccgaatcatccgagccgaccaagccgaccatcgacgccacagctttgccggatgatgccagtgagctgttgaaggccatgccgggcagcgtgctgaattacgcgcgtaccaaggcggatgcctccacgacgtggaattccgcgtcgccgctcgaggagtacactctgacctactccactggtgatgccgccaaggatgtcacgctggtcgccgcgcagtggtcgtcggcggacaatgccaagacccagtacgatgcgttggtcgctgcgcagaccggcgatgagtcggcatccggcaacgtcaaggtttccggcaacgtcacgggcgcgtacgtggtgaaggccgatgcctccaacagcaagaacgccgttgccatctggcagaacgataccgtggtcttccaagctaccggcaccaaggaagcggtcgatcgcttctaccagaagttcccgatgtagcatctagtatcggctgtcagctgctgcacaaacttatgaacgttggggcatccacattgctgatgtggatgccccaactgcgttcagggcatatgcggactatcggcaacatactggttccctctgtctggcaacacgtgtattatggtgcgagttgcaacttttacgattaatcgaaatggaggcttcagatgggttctgtcatcaagaagcgccgcaagcggatgagcaagaagaagcaccgcaaactgctgcgtaagacccgccaccagcgtaagtagtcttacctgcaatcaaggcattagaaaccccgtgatcgttatggtcgcggggtttctcttttgcttggctctttgccttgttcgggcaacagtaaagcccgcacctgcgatgtgcagatgcgggcttggaaaagcttagtgatgtgagacgatcacttgttggcgttggtcatcacgcgcgggccgttcgggtcgccgacgatgaccttgtcgaccatgttgaggaacaggccgtgctccaccacgccgaccgtgttgatgaggtcttcggccagctcctgcgggtgatcgatgcgctccaggtgcaggtccaccacgaagttgttctcgtcggtgcgcacttccttgccgtcggcgtcaagacgaagcaccggcttgtagccgcgggcctcgaacttcttgatgacttggccggcaccgaacggaatgacctcgaccggcagcgggaacttgccgatggtgtccacaaccttggactcgtccacgatccacacgatctggttggagttggtggccacgatcttctcccacagcagagcagcgccgccgcccttgatgccgttgaagttcttgtcgacttcgtcggcgccgtcaatggtcacgtcgatgtggtccacgtcgtcgatgtccacgatcttgatgccgtagctctcggcctgggcctgcgtgcggcgagacgtggtcacgccagtgaactcaagaccttcctcctgatgacggcggccgagctcgtccaccaggaacttcacggtcgaaccagtgccgaggcctgcgatcatgccgttttcaacgagcttggcggcttcgatgccggccgccttcttcagcgcatcctgctgtgccttatccatggtttctcctttgccatccttgcctccgccgcacggatcaacggcgtgaagccttatctcctatcctaacgcgaatgagcgattttgtgtcatcgtgtccgattgcggtacatattcgtgtgtttgggtgtcagtgtcgtacgaatggtgcgttggtgatggtcaggttgccgtcgccgtccacatagccttcgatttcgatgctgcctttgatcggcatcggctgcccgttgaaatacgggctcgttttcggcgcgggggagaaggtcagcgtaccggataccgtcagcccgctgggctttgcggggggtacaggttgcgttgattgtacaggttgcgttgattgtgccgctaagggtgacgaagacttggtctccggccttgcggcatccgtctgatccgtcgccgcagccggcttgcgcaaacttgccgcatccgctttgccgtccaataccaattgcacgtctggaggcacatcggtgccatgtgcgtattcggagcccagcagcgactgccagccttcaatcggtagatagccgtcgcgcgcacccgaacggcaatcgcccgcataggtgcgtgccagttcatcgaccagctcattgccttcgttgccggcgtgacctttgacccatcggaaatccaccgggccagggcgttgcgagatttcacggtcgatcgcctgaataagctctttgttcttcacgggttttttctgtgaatttttccagccattcttcttccagcctttgacccacttggtcgagcaattgatggcgtactgcgaatccgattcgatgagcaatggctcagggcccggatgcgctcgcaaagcttccaacactgcgcacagttcgccaatctggttggtgccgttggtcgcgccgccggcgtcgtagccgtggtcgtcgtgcttatggccaggcttgccgccggcgttctgctcatgatcggcccaggcccagcccattggcccgtttggattccctaatgcggaaccgtctgtggatactgtgatagtcatgttctccaccctaacgcaagctgtgcaatctcttgctgaagtggggctgcccagcgcgaggcaaaacaacgtagtggagggtgtggataacatcacacctattgactttgcttgaaaaacatgccatcgcgcgtgaataggtgagcgctcacaagaaagacaagacatttcctctctgcgggtgaggccggcaacaatggcgcatccggtatctggaatgagaataagggactgtacaaaaccagtgacggcaacatcgaaatcctcaaaccagaggcggacagcgatggttcgacctccacggccgcatccaagggcaccatgcttatcgcaggcaactccaaaaccgtggcactcggtccaggcggcatggccttggctcccggcctgccgctcggtcttggctggttcatccgacgccgcttaggattggatgcctccgacattctggaccgtaagctcggcttgaagtaacggctggttcggacgtgattgctgtcacgtacggatcatgacgacagcgcgaaggtcctcatcggtttacgtcgatgaggaccttcgcgcgcattaggggagtctgttgcgggctgcgctacgcgggtcatgctgcgcgggcgtgctatgcgaacaaactacgcgaacaagtcgttcagtgcctcggcaatcgtcggatgcgtgaacaccatatcgcgcaacgtgctggccggcgcgtcaagatccatcgccaacttgacgatattgatcacctcgtgcgactcgacggaaagcagcatcgcacccagaatgcggccagtattgcgttccacaatcgccttcatcagaccatccggtcgccgcattacctgggccttcggcacagcggccaccggcaatcgcttgaccacataatccaatccagccgccttcgcctcgcgctcattcaatcccacgcgcgagtaaggcgtggcgaggaatgtgctcgacggcacatgcttgcggtccttcaccgtgtacggacggtcggaaccattgagctgcgaccacaccacgcgatagtcatccagcgaaatgtacgtgtgctgcgggccgccgttcacatcgcccagagcccaaatgtcggctgctgtggtgcgcagaagatcgtcgactttcacggcaccgcgttcggtgagctccacgccagctgcctcaagatgcagtccctcgacgttcggcgtacgtccggtggccaccagtaccgcgtcggtggtcaggcagaatcgggcttcagccggctcggcgaaccgcggctcgccatcgtctgatggtttcgtttgaacgtgtgacatcgtggcgtgatcggtcgggttgctagtggggctggtggttgttgtagtgtcggtggcgccggtggcgtcggtggcaccggtgatatcggtatgagcgttcccggtgccggcgggggtggaatcgcaagcttgcgatgcgccgcgagtcatacccttcaccgcaacggacaacctgacgccgccgtcagcagcaggcgcgatggccttggtatccgcgttgaacaggaacttgacgccctgcgcttccaactgtgcgcgaatcgcggccgccacatccgcatcctcgcgcggcaggaactcggcattgtgctgcagcacggtaaccgccgtgccgaaatcggcaaacatcgaggcaaactcaagtccaatgaatcctgaaccgataatcaccagtcgctgcggcatatcgtcgagatccatcagtccagtgctggtgtagacgccgggcgtagtgtggataccgggaatatccggaatgcgcggcgtggcaccggtattgatgaagatcttgctggcggtcacggcgaccgggccctcagcggtggcgatttccacgctatgagggccggtgaagtgagcgcggccggtgattacggtgatgttgtcttggtcggcgagcttgtgatagttcttgtcgcgcagcatcgaagtgacgcggcgcttctccttgatagcagcctcgaacgctgcttcgcgggtttcgggagtactgttcgcgccatcccgccgcgcctgttcggcggacaaaatcagtgacttggacggcaagcatccgatattgatgcaggtgccgccgtacatgtcggcgcttgcctcggcgacgacgaccttgcggccggctgcactgagcttggcagccaaggttttgccgcccttgccgaatccaatgatcagggcgtcggtggtgatagtgggggaggtgttgggtgtgctgatggcattgggtgtgctgatggacatggttacttccttacgtattcgagtgataagagtgcgttgtgctgatgtgttgtgtgccgtgcggcgtctgttttcttctttgactgccgaagcgttatcgactgatgctggctaggggaaacgcgcgggattattagcctttgcgctcgctgaatatctgttcggtgatgtcgtggatggtggtgtgttcgagttgttcgaggcaagtgcggttgagcccggcatagatgtcgttcatcactgcgcccattgaagatgacaccagacagtcctcgtgtacgtcgcccggtgtccagttcactttcacaaaagtggtgccggtggcttccgctaccgcgcgcaaagtgatttcggcggcgggccgggccagagcgtacccgccttcagcaccctctttagtggcgatgagtccggctgaggcgagcggtcgcattactttgcgcacgcgcgccgcattggtacatatgttctcggccaggatctgactgggcaggtgtgtggcgcgatggtcaaggtagaccaatgcgtgcactgccagtgaatggtcgccgttcatgaaacgacctccttaccgagtcgatactgtagctatgatgtgtacagttatgatactgtaatcatatcagatacagttagtgtgtcaaatcggggttgaagaggtggatgactatgtgtataagtgaggtgtccacatggttatccacaatgaatgtgcgtaagtgaagctaggaccacatacctcgaatcggcttccgtttccgcacccactacccatatggtggtgtcatgaacaggatgaccgacggcatcaccaactatggagctctgccaggctctatatacgatccgcctccggaagaatcggagacagtttttgttccgcccgaatttgcgggggcattttctgctgactcgaaatacccgacttttcgcgactcgccatcgccaaacagtggtgcacatgattctgcggcggcaccgaccatgagcgaaagccttgcccagcgcaaacgcgacatggtcgcacgctgcactgaggaagcgaaacgggcgggcaagaagctgcttttcggcatgaccacttccctcgctctgcaatccgtaccgattcccgccgattgcgacctcgactcggccaagctgcacactgtatccagcgttaagagcaagcggtttcgtacacgccatgcaccactgcaaacgcatatttggaaacatgcggctaaagccgccaatgtggaaatgaaccaacacgtgtttgcgctggacctgtttcacgtatgggctcaacttgccccgtatgtttcttttgagtccctgattgtgctcggggatgccgtcatcgctgctacgagcaaacagccagtattggccaaggatcgtgatgctgctgcaatctatcaggatctggtgaagttcgtggagcgatttacccgattcagagggcgcccgtcctgcgttcgagcattgcctctgatatcacctggtgctgattcgcccaaagaatcagaagaacgactctctctggtggcgcatgggattccacagccggttgcgaactatgtggtgccggacgcggcttttgcatctggagctcccataacgttggacttagcgtggccagagttcaaggtcgctgttgaatatgatggcgatcatcatcgtacgagtaagactcaatggcgccgtgaccaagagaaaaggggcatgctggtcgggcggagatggctggtcttcatcgccacggcggcaagtatcgctaacgaggatactcgtgctgaattcgctttcaacgtggcgagggcgcttgcttcgcgcggtgccgtattcgagtttcatgtagttgccatgtctcttgaagagttggcgcagagcctgctgtgaccatgatgttcgaaacggactgatgtaaaggcaatatttgtacgacctgttgttgtggtgtgtgcttgatattgcatgccgttcgattgcgatgcctcgtagtgatggatttcgtgaatgactagtgttcgattgtggagggaaatgtgtcatagtggtcgattgggggtgttgtcggtgcattgagcgtggatttgcgccaatgggtgtgggacgctacgcgtgttttgccgatttttgcgtggcgtcccacggcccctcgggtaatggctgtgacgggtgtggcaggaatggcgtctttccggggtttccagtttgagtgtgtgggatggggaaaatgtaaaacgattgacttagctgttgtcccacgcttttgtgggatggcaactctggaatgggcaaattcgtcgtggcgtcccacaacgatgttaaaactcgaccatgatgcaagccgaccgaacgcttcggtggtcatctggccgctgtgaccccacaatgatgatgggaaactcggtcataatgtaggcaggcgaacgtttcgcggtcatctggccgtcctgccctgcagtgatgttgagaaaatgcagtcacggtgcatgaggagaaccgttgacctgcgtgtttcagtggtcgcgaactgcatatgcgctaaaaaagctctgcagtggattgcatgaatccaatgcagagccttattagttgcggtgaacgcgactaacgcagcgatttcactcgctcagggccttgtcgaccacgacggtggcctcgtcgagtaccttgtccagagcctcgggggagacgaaggactcggcgtacaccttgtagatgttctcggtgccggaggggcgggcggcgaaccagttgtccttggtggtgaccttcagaccgccgatcttggcgtggttgcccggtgcctcggtcagcttggcggtgatgtcttcgccagccagggtggaggcggtcacgtcgtcgccggacagtgccgcgaacttggccttctgctccagtgtggtcggggtgtcgacgcgcttgtaccaagactcgccgaagcgctcgacctgctcctggtgaagctgggccgggttcttgccggtcttggcagtgatctcggcggccagcaggtcggggatcagaccatccttatcggtggtccacacgcggccatccttgcgcaggaagctcatgccggagctctcctcgccgccgaaggcgacttcgccgctgaacagcgggtccacgaaccacttgaagcccaccggcacttcgatgaccttcgcgttgatcgatgcggccacgcggtcgatcagggaagaggagaccagcgtcttgcccacggctgcgccctcaggccagcccggacggttgccgccgaacaggtactccacgcacacggcgatgtagtggttcgggttcatcacgccccagttcgggcagacgatgccgtgacggtcggcgtccgggtcggtgccgccgaccagatcgtacttgtcccaagcgccggcgttgagctcgtcgaccaggcccttcatggcgtacggggaagacgggtccatgcggatcttgccgtcgtggtcgatggtcatgaagcgccaggtcgggtcgacctcaggacgcaccacgccgatgttcaggccgtacttctcgttgatgagcggccagtagttcacggaagcgccgccgagcggatcgatgcccagacgcacgccggagttgcggatcacgtcgaagtcgatgacgttctccaggtcgtccacgtagtgctcgcggaagtcgaagccctcgacgtactcggacttgatggcctcctcgtagggcacacgcttgatggacttgaagtcgccgagcagctcgttggcgcgagcggcgatggcattggtggtctcggccggagccgggccgccggtgacggggtcgtacttgaagccaccgtcggtgggcgggttgtgggacggcgtgacgacgatgccgtcggcgaggccctcgccctcgaagcgctgggtgccgtcggccgcacggttgtgggtcaggatggcctgggagaccaccggggtgggcacgaagtcgtcacgggaatcgacgcgtacgtgcacgccgttggcgacgagcacctcgatggcggtcttcttggccgggccggacagcgcgtgggtgtcggagccgaggtacagcgggccggtgacgccggccttcttgcggtattcggcgatggcctgggagatggcgatgatgtgggcctcgttgaacgaggtcttcagggacgatccgcggtggccggaggtgccgaagatgacacgctgctcggggacttcgggatcggggacgaggtcatagtatttgccgataacctcatcgacattgatcagatctgctggggtggcgggctgacccgcattgtttgctaccatgctccctattctgccacgttttttcgccacgttgggtacgatcatgttaagagttgtcaacttttgtgcgaatcgtgtgccggttgtctagcgtttggtcatttcctcctcgatttcctccagcgacttgccgttggtctcgggcaccaagcgcatcacgaacgggatggacagggccgaaaacacgccgaaaatcgcgaacgggccgcccacattgttgccgaacgcatcgagcagcacgaggaagaactgggagacgatgaagttgcccagccagttcgccgccgagccgaaggaggagccgatgccgcgcacgctcagcgggaagatctcgccgataagcacccaggcgatcgggccccacgagaccgcaaagccgaggatatagaaagcgatgagaatcatcgtcggcacggccagcacggccacgtcgcccacgaagttcatcacggcgagcactgcgagcgaaacggtcatcacgatggaaccgaagatcagcacgcccttgcgcgggaaacgatccatgataagcgtggccacgatggtgctcacgaagttcaccacgccgatgcccaccgacacccagattgcgtcgccttcagggaagccgaagcccttgatgaacacctgcggcaggaagtagatcaccgagttgatgcccacgagctgctggaacagcatgataccgatggcggccaccagcgccggacgagcgatacggaacagttcgcgcacaccacccttggtgtcctgtgcggccacggccttgatttcgtccagctcaatctgcacctgggtctgatccacgtccttgcgaatcagcgtaagcactttgaaggcgttgcgggtgtcgcccttgttcaccagataacgcggggattcgggcagcaacaggccgccgagcagcaacaaggcggccggcaccagcgccgaaccgagcatccagcgccagtcgcggatgccgaagaggttgtggttcaggaatccgaggttggaggcgtaggccagcagaatgccgaaggtgaccatgagctggaacagcgtggacagtgagccgcgacgctccttcggcgccagttcggccaagtacgccggggtcagggcggaggccgcgccgacggcgagacccaggatgatgcgggcgcacaccatcatcgcgaatccggtggaggaggcgcacaggcctgagccgagcaggaacagcagcgcggagacgatgagcagcttcttgcggccgaaccggtcagacagtgcgccgatcgacagcgcgcctgcgcacgagccgatcagcaccgaggaggtgatgaaaccggtctgagagacgctcaggccgaagtccgattcgataagcggggaggcgccggagatgatgccggtgtcgaaaccgaacagcatgccgccgagcgcgccgaaggtgaagatgaatgcgctgttgagcgggaagcgcgtggagaagccgtgcgattcggcggcttcgaggtcctcgattgcgttggctgccgcgtttgtggccgcgcccgccactccggccacgccggtttcgatggtttcgattgcggtggccgccgccccggttgcgctggtttcctgcgccgcggatgccgtctgtttcgatacgggtgatgccgttgtcgtcgtcattgccttgtcctttcgccgttgacggaccgcgcctgttgcgtggcccctctgccgcgtgcaaggtcaggcttcgattgtctgaagtcgcccgaaaacaaaaaaagacctggaacaacgtggaattcgcatattacgatacgcaaattccacgtcgctccaggtcttgcctcgttttgagtaacaaccctgctacgcaacgtgtgtgaaagatagaatacgacttccgcagtcgcgacactccgaataggcagcaaaaaacgatgatttttgacaacgattgcaggattctgcatggtggaatgatgtcggaatgggcgctgcggcaaatacggagaacgggtgtggcgaagcatcatcgcggaacattatggcgggacaccatcgcggagcaccgtagcgcatagttgccgtttcgcgatgctttgccggcattgccgtgcttttggggcacccagcgccgataatggaacacagtggcatacggcagcaaggaggaaccgtggcgaacgcatcgaacgcaacgcctgcagtaattgcggcgcgcatcgtcgatgccgtcggcggccccgcgaacattaccagcctgacccattgcgccacgcgactgcacttcgaactggccgatgccggccatgtcaaccagcacggtcttgaatccatccccggagtcctcggtgcattcccgcgagccggcaatcgttatcaggtcatcatcggcggagcggtcgcctcggtgtacgagcagatcgttcggctgcggacggcgcgattgatgccggcagcgcaattgccatcggcagtgatgcagtcagcgtcgcagtcaacgcaacccactcagtcaatgcagcccactcagccagcgcagcccgcgcagtcagcgcaatccacacagcccacgcaacccgcgcagtccgcgccgtacctttccgacgatgccgcaccatcgcgcgatactgccaccgacgccgaacaaagttgcggcccatccaatacatcccgtcacttcacgcctcgtaccgtccgcgagtggggcagtgccgcccgtgcccgggctgccgcgtttttcgactacctgtccgactcgttccgcccgattctgggcgtgctactcggtgcctcgctggtcatcgccatcgtcaacgtgatcgttgcactcggcattgtgcctgatggcgagacgtccaccggttggatactactcaaggcgatttgggagggtgtgttcaccgttctgccgattatgatcgcttacaatgcggccaagaaactggacgtcgacccttggctcggcggtgcgattatggccgcgcttatgaccccgcagcttactggcgtgatgtccggaatgtccgggacgtccgtatccagcgctctctccggggagattcaatgctcggccaccgccacattcggcaccgaaacctgcaccgtgtcggcgttcggcataccgattcaactcaacgactacagtggcaacatcttcgtaccattgctcatggccgccgtgctcgccgtggtctaccgcgggctgaagcgcgtcattcccgacagcgtacagctggtgttcgtgccattcctctcactggtcgtcgtttttgcgctcaccatactggttatcgggcctctgggaatatggctcggcagcgggctgggagcggccacagcatggcttaacgcgcacgtgccattcctgttcgcgctcatcatcccgatgctctacccgtttctcgtgccgctcggtctgcactggccgttgaacgccctgatactgatgaacattcagacgctcggctacgacttcgtccaaggtccgatgggtgtatggaacttcgcctgcttcggtgccaccgccggcgtactcgtgctggccgtacgcggcaaggattcggccatgcggcagaccgcgatgggggcgttgctcgcgggattgctgggtggcgtttcggaactgagcctgtacggcatccatctgcatcaccgccgcgtctaccgctggctgctcgccggctgcgcggccggcggagtgaccagcgcggtgttcggctggctgttcccgtccgtgctgccatccggccagatggtccggggcgttacgactacggcattcgccttctcctcgttgctgacgattccggtgttcgatcggatgtgggtgtacgcgctgtccatcgccgttgcgtttgtaatggcgatggtgttgacggtgttgttcgggtaccgcacgccgtcgcgcgccaccaagacgcagatggtctcggcagacgagaacgcacgcccgcaggatatggcgagggggattgacacgaccgtgtcggatgtggagtctgcggaagattctccatcgcgggctgcccctgatcgggctcttgactccaacgccatcttgtcgccggtcgccggccggctggtgaatctggaagcgactggcgatccggtgttcgcctcccgcgcgctgggggagggcgtaggcgtcgtgccggagacgaccggtgagacagccgtgctcgcaccggtcagtggcatgctgaaaaccgtggcccgaaccggccatgccttcggcattaaaaccgatggcggcatcgaggtgctggtccatatcggcattgacaccgtcgatatggatggcgagggattcgctgtggtcgtggctaaaggcgagcggatcgcggcgggagagccactggccaccgtggatttcggcaaagtcgcggcggccgggcacagcgttgtggtggtggtgacggtggtcaacgccgctgaactgaccgtggtcacgccgttgatcggcgacggtagcggcgacaacaacggcggtgactgcaaaaccgtatcagccggcagcccgatcatcgatgtggaacaatgacgttgcgaaaggatgccatggaaatactgcgagtgttcaacaacaacgtcgtgctcgccaaaggcggcgacggcggtgaggtgattctcaccggccgtggactggggttccaggccaagccggggcagacggtcgacgagtcgaaagtcgtgcgcaccttcgtgccgtcggacgggcgtgacccggaccatctggcgcagatgctggcggacattccgcccgaaatcatccgcgtggtcgtcgaatccatgcaggaagccggactgggggagcgtgagaccggcagcaccacgctggtcatggccttgtcggatcacgtggcgaatgcggtggagcgggtgcggcgcggcatcgacatcacctacccgctgctcggcgaggtgagcaacctgtacccgcaggaatacgcgcaggggcgtgcgatgctcgcatcgctcaatgcgcggctcgacgtcacgctgccggacggcgaggccaccgcgcttgccatgcatctggtcaacgccggcttcgccaccggcgacctgtcctatacgtacacgatgacgggcgtgatccagcaactgcttgacattatcgaccacagctacggcatcacgttggaccgcagttccgtgaatgtgggcaggttcatcacccacctgcgctacctgttcgtacgcatccaccagcaccagcaactgacggacgagccggcaccggtgatgaaggtgattcgtgagtcctaccccgccgcgctacgatgcgcgcgaaccatcgcctccctgctcgaactgcgcctcgacacggatatcagcgacgacgaaatcgcctatctggcaatgcacgtcgcccgagtcaccggccacgcatcgtagtaacggattagcggattggcgaatcagcgaatcggctcgagtgtaccggtcatttcggcgaaattcgaggtggcatttgaagcagcggcctgcgcggtcttttccagcgcggaggcgtcgggcacgcgcacgatcagcgcgcggtgatccaccgagaaacggatgtggcgggtttccggcagcatgtcaccgtccacctgcgctttggccggcttttccaatgtgatttcggcactgacgccctgaacctgttcgatggtcgagttcgtggacagcgggttctgttcgggcttgccgatgatcgtctggtgcaccacgtcgccgaacaggttggcccagccgaggatgccgccggtggtgtcgatgatttcgaagtccagcagaccatcgtcataggatgccgccggcatcagcgagaacatgggaatctggccgcagttgccggccatcaccgtgcggaaatcgagattcttgatggtgtgggtcgagccgtcggcgctggtgactgtcagcgtgccgcggaacttcggcgcgaacaggttcttcacgccgcccacgaagtaggcgagccagctgatgttcgccttgagctcggggttggtgtcgtcgatcatggccgcatcgaagccgatgccggcgatgatgaggaaggcgtggccgtggtcgtcctccgggtggtcgagcagggtgagacggcccatgtccaccaggcgggagccgtgggaggtggccacggtcagcgcggcgtcgatatcgtccacgggaacgcccatattgcgggcaaacaggttgccggtgccgatggggatgatgcccagcgcatggccggtgccggagacggcgctcgccaccgtgcgcaccgtgccgtcgccgccgaccgcgatcaccacgtcggcgccgtcctccagcgcctcaagcgcgcagaccctgccgtccttgtcaagctgggtgtcgtagaagcggatgcgattgagccccttggcctcgcagaacctctggatatgcagcctgcgggcttcggcctgcggtttggacggattcacgatgaaggcgtactgcacctcgtcgtcccggcgcttctccagcgtctgagccagcttgcggcggcgctgcgcgcgcagagcgatgacgatgacggcgatgagcaccaccacaatggcgattgcggcgatgatcagaaacacggtgagggcaggctgaggcatggctcctattgttatcggtggggaggtcgtttgcggccatggtgcgccgtacgtgaacatttcctgcacgcaacagccccgtggggcgtgattatggttcaatcgcgtctcatctgacgaaattggccgggtggacccgtccgcggactttcccgggcttccctgtgatttccgcgtgactcccgcgcattcggccattgtcggtgtctgcttacgcggctagtctggtgcccatgcttgatattcaattcatccgtgaacacaccgatatcgtcaaggaatcccagcgcaagcgcggcgagtccgtggaactcgtcgacgaagtgctctcctccgacaccgcacgtcgtgaggcgctgaaggccttcgaagaggctcgcgcccagcagaaggaaatcggcaagaaagtcgcctccgccccggcggacgagaaggccaagctcatcgccgaaaccaaggaactgtcccagaaggtctccgaatacaagtccaaggccgattccgccgccgaggaatacaccaccgccatgtggaagctctccaacatcgtggagcccgaagctcccgaaggcggcgaggatgactacgtggtcgtcaagaaggttggccagattcgcgacttcgcggccgaaggcttcgagcccaaggaccacctgaccctcggcaccggcgtggccggcatcgacatgcgccgcggcgtcaaggtcggcggctcccgcttctacttcctgcgtggccaggtggcccgcatgcagatcgccatgctcaccatggccgtggaccaggccgaagagcacggcttcacgctggccatcaccccgacgctggtgcgccccgaggtcatgcgcggcaccggcttcctgaactcccacgccgacgagatctaccgtctgcgcgagcccgatgaccagtacctggtcggcacttccgaagtggcgctcgccggcatgcacgagaacgagatcctcgacctcggcaacggcccgctgcgctactgcggttggtcctcctgctaccgccgcgaggccggtgccgcaggcaaggatacttccggcatcatccgcgtccaccagttcgacaaggtggagatgttcgtttacgccaagcaggaggactcctacaaggagcacgagcacctgctggccatggagcaggagatgctcgccaaggtcgaggtgccctaccgcatcatcgataccgccgccggcgacctcggttcctccgccgcccgtaagttcgactgcgaggcttgggtgccgacccagggccgctaccgcgagctcacctccacctcgaactgcaccgagtaccaggctcgccgcctgaacatccgcgagcgtatggaagacggcggcacccgcccggtctccaccctgaacggcacgctggccaccacccgttggctggtcgctatcatggagaaccaccagcagaaggacggctccatcgagatcccgaaggccatgcgcgcctacatgggcggcaaggaagttatcgagcccacgaagtgggaggcctgagtctcatcgtgctttagctccctttaatgggggagctgtcagcgtagctgactgagggagagattactgagggagagatcgctgatagccagcaggcgaatccaagaccgaccgcactgccgaatatcaacatccctcccttctgtataatgaatacttgcgcgtgtgaacgcgcatcaggacaggtgtctgagcggcctaaagagacggtcttgaaaaccgttgaggggcaaccctccgcgagttcgaatctcgccctgtccgcgaaccgaggcctgggcaacatgcccaggcctttttttctttttctggaacctgtcttcttgattgccaccggggtgctgatatattggtttgtgatgccgtaacatgcggtgtccccgttgatatgacgggccgatcggcgtgagccgataagaaaaggcccgacgtttgcagcaccgggcctttgcgttgattaccggcttgcgcctttaatcaacaaggttgcaagatgcaatcatatcacgatgcacggtagtctgaccgtgaacgggcgcaccgtgatcgtccatgtgggcgatggcgaggcgaacgccacggttgacggcacgcacttcaacgtgcgtagcctgtggcagctctaccagttgctgagactgctcgtgtagcgtctcattaaggtgcggtgccccctggtcgggtatcgcgccggcgacctgaaaaccgataatgttggcaagtgcttgcaatttgcggtggacgattgcaagctaacgtcttggattgttgccgctatccaatatctcattaggtctaccggcggaccaaaagtacgttgctttgtaaggggagttaatgaaataaacaaatccgcgcaatcgagcatcgaaccggttcaatgctactcgcctcaacgggacgcgcggtaattgttagttaagttgacaataaaagaatgagggcatacattagtaatcagtcatcacactgagatgatgatttcactacgaaggagtagagatatggtatctcgcaataagcgcatcgtggctgcttttgccgcggtagcagcaatgggaatgggcttggccggttgcggcagcgacactgccggcgacacgaagaccaccgatgatggtggcgtggtcaacatcacctacatgcaccgtctgccggattccgagggcatgactctggtcaacgacatcgttgccaagtggaataagcagcatccggatattcaggtcaaggccaccaagttcgatggtaaggcctctgacatgatcaagaagcttgagaccgacgtcaagtccggcgaggctccggatctggctcaggtcggttacgccgagctgcctgaggtcttcaccaagggtctgctgcaggatgtgacccagtatgccgagcagtacaagaacgacttcgcatccggcccgtacagcctggttcaggttggcggcaaggcttacggcctgccgcaggacaccggcccgctggtttacttctacaacaaggctgagttcgagaagctcggcatcaccgagattccgcagaccgccgatgagtttatcgccgctgccaagaccgctgccgccgctggcaagtacatcatgtcctaccagcctgatgaggccggcaacatgatctccggtctggctggcgcctccggtggttggtacaaggtgaagggcgactcctgggtcgtcaacaccgagaccgatggctccaaggcaaccgctgacttctaccagcagctgctcgacgccaaggcagccaccaccaacccgcgttgggatccgtccttcgatgcatccatcaaggatggctcgttgatcggtactgtggccgccgcttgggaagccccgctgttcatgacctcctccggtggcaccggctccggcgaatggcaggtcgctcagctcggtgactggttcggcaacgctggcaagaccggccctgacggtggttccgccgtggccgtgctgaagaactccaagcacccgaaggaagcaatggagttcctggattggttcaacacccaggttcctgatctggtttcccagggcctcgtgccggctgctaccactgaagacgctgagactccttccgagtggtccaccttcttcggtggtcaggacatcatgaaggaattcaagaccgctaacaacaacatgggtgacttcacctacatgcctggcttctccgcagtcgccgccaagatgaacgaaaccgccgccaaggccaccgatggctccggcaaggttgcagacatcttctccgacgcacagaccacctctgtggatacgctgaagaacttcggcctgtctgtttccgagtgacattaacggttagggttccttccagccgctgatatcctcaaccacacatcgaaaggccggagctcaacactccggcctttccttttactcgagttcggttcgtcattaattgtgtttgatctgactgcatcgattcgaactgcattacgtactttctatttctcactgttcttttgaaagacaggtttccctatgactgcaacaacaaaaacggcgaagacgggggtcgccaggcgtgccgataagccaaaggcttctgatgctgtgaagcgtgagaatcgtaccggctgggccttcatggcaccgtttggcatcctgttcgctctggtatttattcttcccatcatttgggctatttattccagcttcttccgccaggtcaccacgggcggtggcgcatacggcggcggggaactggtcgataagttcgtcggacttcagaacttccaatacgttattacttccggcaacttctgggctggcgtgggcagggtagtgctctacaccgtgattcaggtgccggtcatgatcatcgcggcacttgctctggcaatgctcatcgattcctatatcgtcaagcacatcaccgcattccgtctgagctacttcctgccgtacgccattccgggcgtggtcgcatccatcatctgggtgtacctctacaacggccagatttcccctatcgttaagggacttgccgccatcggcatcaaggtgaacttcttcggcgacaatgtggtcctcggctctatggccaacatcacgacctggaccttcaccggctacaacatgctgatcttcctcgccgcactgcaggccattccgcacgatctgtacgaggccgcacgcatcgatggcgccagtggcttccagatcgccatgaagatcaagctgccgaacgtgcgtgcagccgccctgcttgccatgctgctctccatcgtcggcaccatccagctgttcaacgagccgcaggtgatgtcgatttccgatccgagcatttccaagtcgtacacgccaatgatgatggccctcaatacctcgcagggcacgctgaccccgggtggtgacggacctgcatccgctgtggccatcgttatggcactgatcgctggcgtactcgccgtggtctacacgctcgttgaaaggaaggtgaacgcagaatgagcaccgtagaagctactgataaggaatcccgcgcggtcgcacgcgctcgtaagaaggctgacaggattcgcgacaagcatgccaacgacctgcctcgttccatgcagccttccgcgctggtcaagaccatcaccatcgttgttctggtcttcgcgctgatctactttctgttcccgatttactgggccatcatcgcctcgaccaagacgccgagccagatgaccggcagcaacggtctgtggttcgccgtgggtctgagcgatttgcctgccgccatcgccaagaactatggcacgctgattggttggacccgtggccagttctggcgctgggtgctgaactccctgatctactcgggtgtttccgctctggtgggtacgctcgtggctgtgatggcgggatacgctaccgcaaagttcaacttcaagggtaagaaccttgccattggcgtgattatgggctgcatgctgatgccggccgctctgctgaccattccgcagtactccatcttccatgccatgcacctgaccaacacgatgctctccatcatcatcccgtgctgcgtctctccgttcggcttcttcctgggccgcgtatacgcgcagacctcagtgccgaacgagctgcttgaggcggcgcgtatcgatggtgcaagcgaagctcgcatcttcttcaccattgtgttgaggattctggctccggcaatggtcacgatcttcctgttcctgttcgtggccacttggaacaacttcctgctgccgttgatgatggtctcttccgacaccttgaagccggtgaccttgggtctgtacggcatggtctctctggctaccttcactgatcgtggcgctctgatgatgggtgctctgctcggtgtgctgcctgtgatcgtgctcttcctcggtctccagcgctactggcaggccggcctcgccgctggtgcggtcaagggctgacgcgttaagcggacagcccggtgggctgtctgtagcgtcggcccgagcgaggcggtagccgagcgaaggcagcattgagtctcgccgtaggcgagtccttaattgcaggggccgaaggcgacgcgttaagcggacagcctaagaccaataattcccgccgtccggtgcctcgtgctactccttccggcgccggacggcttctcaacaataagtagcacgcaaccataccgatccagagccttcctgattcttgtcatgagattgtcggtgaaactgaccgggaagctccggtgatgttcaattcgctcttccggcgttgccgtggggctactctcaaggatttatacagtcaggatcctggacgcccgacggttgtgtcggattcttgttttatatgcatatattgtttacaatttaattatccaaaaaaataatcaatgtcctcaaaggagagactatgactagcaccggccgcttcaccttgcctagcgaggagaattttgcggagaagaccaaggagcttgccgaactgtggggagcagacgccattcgtaactccgatggcacgcatctggatgaggctgtgcttgccttgggcaagaagatttacaatgcgtatttcccgactcgcgcgcataacgagtggattacgctgcatatggatgagacgccacaggtgtatctgctgaccgatcgcattctcgccgaatcggatacggttgatattccgctgatggaaagcttcttcgctgagcagctgaagccgaatcgtgatgccgaccctcacaagtattgggaggttgtagaccgcaccaccggcgaggtcgttgattcggcgaactggacgcttgacgcggacgaggacaccgtgcatgtgagcggcgttgccgcatggcatgagtacacggtgagtttcctggcctacatcatctgggacccggtcgagatgtacaaccatctgaccaacgactggggcgacaaggaacacgagatcccgttcgacatctaccatccggccacccgcaagttcgtgttcgacacgttcgagcagtggcttaaggacagcccgcagaccgatgtggtgcgattcaccacgttcttctaccagttcacgctcctgttcgatgaaaagcgccgcgaaaaggtcgtcgactggtttggttgcgcctgcaccgtaagcccgcgtgcgctggatgatttcgaagccaagtatggctaccgcctgcgcccggaggacttcgtggacggcggtgcctacaactccgcatggcgcgtgcccagaaaagcccagcgcgactggatcgacttcctctccggcttcgtgcgcgaaaacgtcaagcagctcgccgacatgtcccacgccgccggcaaagaggcgatgatgttcctcggcgaccagtggatcggcaccgaaccgtacaaggacggattcgacgaactcggcctggacgccgtggtcggttccatcggcgacggcaccaccacccgcatgatcgccgatattccgggcgtcaagtacaccgaaggccgcttcctgccgtacttcttccccgacacgttctacgagggcaacgatccgagcatcgaaggcctcgacaactggcgcaaggcccgccgcgcgatcctgcgctcgccgatcagccgcatgggctacggcggctacctctccctggccgccaagttcccgaagttcgtggacacggtgacccatatcgccaacgaattccgcgacatccacgaccgcaccggtggggtggccgccgaaggtgagctcaacgtggcgattctgaattcctggggcaagatgcgctcctggatggcgttcaccgtggcacacgccctgcccaacaagcagacctactcctactacggcattctggaatccctgtccggcatgcgcgtgaacgtgcggttcatcagcttcgacgacgtactcgcgcatggcatcgatagcgatatcgacgtaatcatcaacggcggcccggtcgacaccgcattcaccggcggcgatgtgtggaccaacccgaagctcgtggaaaccgtgcgcgcctgggtgcgtggcggcggcgcgttcgtgggcgtgggcgagccgagctcggcaccgcgcttccaaacgggccggttcttccagctggccgacgtgattggcgtggacgaggagcgctatcagaccctttcggtggacaagtatttcccgccggtggtgccggaccacttcatcaccgccgatgtgccggtcgacccggcggcccgcgaggcttgggagcaggccggctaccgcatcccgctgagcggctgcggcggcggccagtccatcaagccgttgggcggcatcgatttcggcgaacccgtgctcaacacgtatccggtcaatgaaaacgtgaccctgctgcgcgcggacggcggccaggtacagctcgcgaccaacgattatggcaagggccgcggcgtgtacatctccggcctgccctattcggcggccaacgcccgactgctggaacgcgtgctgttctacgcttcccacaacgaagacaagtatgcggcctggagctcgtccaatccggaatgcgaagtggcacacttccccgagcaagggctgtattgcgtaatcaacaacaccgatcagccgcagaagaccacggtgactttggccgacggcaccaccgaggacttcgacctgcctgacagcggtatcgcctggcgtgaagcctgatcccacgttttggagaacggacccatcatgactgaaagcaatgaagttttattcggcatcgcctcgcattttgcgctggaaggtgccgtgaccggtatcgaaccttacggagacggccacatcaacaccacctatctggtgaccacggacggcccccgctacatcctccagcagatgaacaccagcatcttccccgatacggtgaatctgatgcgcaatgtcgaactggtcacctccactctcaaggctcagggcaaagagacgctggacattgtgcccaccacctcaggcgccacctgggccgagatcgatggcggcgcatggcgcgtctacaagttcatcgaacacaccgtgtcctacaacctcgtgccgaacccggacgtgttccgcgaagccggcagcgcattcggcgacttccagaacttcctgtccgaattcgacgccagccagctgaccgaaaccatcgcccacttccacgacaccccgcatcgtttcgaggacttcaaggccgccctcgctgcggacaagctcggccgcgccgccgcatgccagccggaaatcgacttctatctgagtcacgccgaccagtatgccgtcgtgatggatgggctcagggacggttcgattccgctgcgcgtgacccacaatgacaccaagctcaacaacatcctcatggacgccaccaccggcaaggcgcgtgcgatcatcgatctcgacaccatcatgcccggctccatgctgttcgacttcggcgattccatacgctttggtgcgtccactgctctggaagacgaaaaggacctcagcaaggtgcatttcagcaccgagctgttccgcgcctacacggaaggcttcgtgggcgaactacgcggcagcatcaccgcgcgcgaggccgaactgctgccgttcagcggcaacctgctcaccatggaatgcggcatgcgctttctcgccgactacttggaaggcgatatctactttgccaccaagtaccccgagcataatctggtgcgcacccgcacccagatcaaactcgtgcaggagatggagcagaaggccagcgaaacccgcgccatcgtagccgacatcatggaggctgccaggtgagccgtcagccgaaccatacccgaaccagcatgatggaggcagagcaatgaacgatcagctgaccgaggtatacgccagcatcgacgccctgatcgattatgccttggcccatcttgaccttgacccacgcaacgcagactggacccgcaaccaaatcttcgccctcttccgcctagattcctaccccggacccaaaaccacaacgtcggcggcgtcagtgtcagacgtagtccaagacattgttggcagccgaagccaggccccctatggcgaaaagacccccgaccccctgctcgccgccttccgcgccgccgccacaaccgccggccttttcaagccggaggaaggcccggcctacgccgacaccatcatgggcatcctctccgccaaccccgctgatctcgacgaccgattcctgctcgtcgagcaccgggatggcggcatggccgccatgcaatggttctacgactactgtgtggccaacaattatgtcaagcgtgcccagctcgaccggaacccgcgcttcgactcgcacgggctgacggtgaccatcaacctcgccaaacccgaattcaagaacatgaagaaggcggcggccggcaacgccgtggccggcggctacccgaagtgcacgatctgccatgagaacgagggcttcgccggacgtgacaagcgcacgctgcgcaccttgccggtcacgctcggcggcgagtcatggttctggcagttctcgccctacggctacttcgaccagcacggcatctgcgtgaacaccgaccacacgccgatgcatgtggaccgcgacaccttcggccatctgctcgacttcgtggaccgtttccccggatacttcctcggatgcaacgccgcgctgcctcgcatcggcggctcggtgctcgcccatgaccattaccagggcggcggcgaactgctgccgatgcacaaggccgccacttgggccgccttcacacttgccgactatccggacgccgtggttgaaatccttgactggcccggcaccgccgtgcgcgtggtgtcgaagagtcgccagagcatcatcgacgtatccgacatcatccgcgaggcatgggtcggttatgacgacgcggcgaacggcatcgccagccatgacgcggatggcaaccgccaatccgccctctcgcccagcgcgatcatcaccgaacgcggctatgagatgagtctcatcttccgcaacaatgcgatcagcgacgagtacccggaaggtattttccatgcacaccccgaatactggccggtcaagcaggagccgatcggactgatcgaggcccaaggcttgttcattctgcccggacggctcgtcgaccagctcggcattgtcgaagaggcgctcgccgaaggccgcgatttgcccgatgaagtcagcgaattcagtctcgaatggggcgaactcgctgaaacgttggccggaaaccacgaccgcgaggccatccgccaagccgtacacgacgagctcggcagcgtctgctaccgcatcctcggcaacacggccgtcttcaagcagaaagccaccacgcaaacattcctcgaaagccttggttttgccgctaggtgaaacaggtcaagtgaagtaagctcaatactgaaggaaaaaccgaaggcaagtccttccaaaggagggaatatgactactgttctggttacgggcggtgctggattcatcgccacccacaccgacatcgaactgctcaacaagggctacgacgttatttccgtagataactacggcaactcgtcgcccgtggcgcttgagcgcgtcgagcaaatcaccggcaagccggtcaagcgttatgacggcgacgtgcgcgatgaggcgctcatggaacgcgtcttcgctgaaaacaacatcgactgggtcatccacttcgccggtctcaaggccgtgggcgagtccgtggccaagccgatcgaatactacgacaacaacctgtactccacgcttgtgctgctcaaggtgatgaagaagcacaacgtcaagaagatcatcttctcatcctccgccaccgtgtacggcacgccgaaggaactgccgatcaccgaggagacgccgaccggcggcaccaccaacccgtacggcacctccaagctgttccaggagcagattctgcgcgacgtgcatgtggccgatccgtcctggaccatcgtgctgctgcgctacttcaacccggtcggcgcgcacgagtccggcctgctgggcgaagacccgaagggtattccggcgaacctcaccccgtacgtggccaaggtcgcggtcggcgagctcaaggaagtccaggtctacggcgacgactacgacacgcccgacggcactggtgtgcgtgactacatccacgtggtcgacctggccaagggccacgtggccgtcattgaccacatcgacaaggaaggcgtgttcgtctacaacctgggtactggccacggctactccgtgcttgaggttatcaaggcttacgagaaggccgccggtcatccgattccgtacgcgatcaagccgcgtcgccccggtgacatcgccgcctgctacgccgacgcttccaaggcggagaaggagcttggctggaaggccgagctgaccatcgacgacatggccgcctcctccctcaactggcagaccaagaaccccaacggtttccgcgacgcggagtgatatgagcagatgagctccctctgatgagggagctcatctgtcgtttatcacacaatgcgcctatcggcggcccagcgggtgagctcggtgcgattcgaaagctgaagctttcgcaacaccgagctcacgtgcgtttcgaccgtcttgatcgaaatgaacagttcggccgccacctctttatacgtgtaaccacgcgcgatcagccgcatgacctcctgctcgcgggcggacagccggtccagctcctcatcatgagcccgtgccgcaccatcagcgccgccatcagaccccgccgccggcacaccctggaaggtcgaaagtacaaaaccggccagttttggcgagaacacggcatagccctcatgcacctgcttgatggatgaaatcaaatcagcgccggtaatcgtcttggttacatagccctgggcgccggcgcgaatcaccgaccccacatcctgcggcgcatccgaaaccgacaatgccagaaacacggtagtgggggagtagggccgcgatttggcgaggatctcggcaccgccgccaccctcgccgccgggcacatgcacatccagcaacaccacctgcggcttggtctgtgcgatcatcgccaccgaaccgggcacgtccgccgcttggccgacgatatcgaaggaatcgcgcaacgtggcgattacgcccgcacggaacatctcatggtcatcgaccatggccacacgaatcttggctgtctcgttctcgctcatcgatgttctccctgcgccgctttcagcgcgatcggcatatgcattctgacctcggtgccccagccggccctggacactatctccactgtaccgccgcgccgtttgatgcggccgataatcgattcgcggatgcccagccggtcgggcggaatggcgtccatatcgaagccttcgccatggtcgcgcacgaacacttcaaccatcgtgtcgctggcctcgcaatacaaagacaccggctcgccgccatgcgtgaccgcattgaccaacgcctgacgggtggcgtccagcagcgcatcggtctgggcgctcggccgcgcgtcgcccacggtgaccacctcaatcggcttgccgtgctcgtcctccacctcggcggcgatctgcttcaatccggctcccaccgaacgatccgatgtggaacgttcctgatacagccattcgcgcagctcgcgctcttggctacgcgccagggcgaatacggtggtcggttcctcggagttcagctgaatcagcgccaacgtttgcagcacgccatcatgcagatgggcggtcatgtccgcgcgctcctcttcgcgctccttcaatgcctgctcgtgggtgagtcgttgcagcatcgcgttcgcccacggcatcaccgccaccacgataccgacgatcatcacgaatccgctggcaacaatgcgtcgaggagaggtgccccacccaggaatgctgacattatgcacatacaatgcccatcccatgaaaatcagtgcgatgccgcccaacatagacaacagctgcgtgcctcgcggactaagattcatccatgccagtgcgatgccgcccaaccctaccagcagcggaaacacaatctggacatccgcaccggtgctggtgagcaacagtccagtggccatcaacgcgaaaccggccaatgccacgacggccggtttcggagcacgttggatggcctcggacaatgattccggtgcggcagccgattcgtcgtcatgagcggcaagtggctgattgcctcgcgcaagcggcgcctgattaacgggcactgtgcgagccgcagccgccacctggtctccggcaggcatgaacacccacaggaatacataagcgatgatgcctgcgccgtagaggacggtcagtgcgatgaacgcaatccgaacccatgccacgccgatgcccaagtgcagggcgatgcccttgcacacgccggtgagccaacggccctgccgggggcgcatcaacggcatgcgcgcgggcagcaatggttcgggagatgacgtcatactcctattgtgccgcgctcagggcgttgcggccggggttttacccggtgttcagggaacaatcagggtgttccccgagcgttgtggcagtggtcgggcggtgtaatggaatcatgagcaatccaaacgcgaatccatatcagccacagccgcagcctggtccgcaaaaaaacaagacatcgcgacgcttcttcacttgggtgcgatccagtggactggttcgcggcgacgaccggtggatcggcggcgtatgcagcggcatcgctttacggcttggctggagccccacattagtacgtgcgttggtgattgtatgtacattgttcttcggttttggcgcagctctgtacgcactcggctggtttctgatgccggatgtacgcgatgggcacatcttggccgaggacctcattgccggccaatgggactggaattgtctgggatgcttcctgttcctcgccgtggcaatcgtgattccaggtgcggggtggggttgtattgcgctcgccgccttagcgctatggctgttggccaaaagcggcattcgccagcaggaagggtacggattcggggcatctgcgccgcgaccggtttcacagcctgtgtcatatccagctccacagcctgtctcatatccagccgcgcaaccagtacctcaatctcctttgtattcagctccgcaaccttttccacaacctgtttcacaacctgtttcacaaaccgcgcctagtgtttcacagcctgtttcacagcctgtctatcagtcgatgcccagcgtgatgccgggtactgtgcccggcgcgatgcccggcacagtacccaacgggccgtttgcccccgaccgtatgaatgcgacggcctatgcccccaccgagtccaagcgccgcaagccggcgggcccaatcgtggtcttgagcatactgggccttaccttcctctcctttgccggtctgatgggactgatttgggtaaacgacatgggcattatcggcattatgcgtctgggcaccatctggattgccgcagtatgcatagtgatggggctggtggtcatcattctcggattcagaggacggcgtaccggtggtctgattcctctcggactggttgccggtggatgcgcgctctgcatgaccatcgtttcaggcacgtatggcgtgtactaccgtgatcttggtgccagcggcatcaatactgttgtttcactgagccaatctgtcagtgcgagaaacagcgacggcatgaacgatgtgcaaaaggatggcatcttcgttgccgatgccagcgatgccacgtttgaaacattgcagcaaggtgtggcgttcagcggtgaaaactacaacaccgatcaggcaatcattgattggtccgattgggacaagacacatggaccgcacacggtgaagatgctggatggcaaaacttccatcagtaattgcccggtcggtaccatcaccatagccgcaacacaggcgcaagtgcatatcgttctgccggattcctgcacttacgccttcggcaccgccgactcctactactccacttcgagtgacgttggcggcaaatacgagatggtatacaacaactacatgggtccaagctttgttttcttcgaagctgaaagtgccaccaatgggcctgatcacgaatggttgtataaggaatccgccatgccggacaacggcccagaattaaaaatcaatattccctatgtggtggaagcacgtgtcaacgtggtgtacgcctccgattgggaaggctctacgttccagccgcttgccgatatatacgacggcaacagtacaagcaagaacacaaccgaacaatcggaatgatcaagccgttgcaactaggagatggaatcatgactgatgaaaccaaggaattcgcctccattgaggatgcgacaccgaccacggccataccttccgaaaccgacgcgaccaccgcgaccacaaccatggtgaccgtcgatgaccgaaccgataccacggtgctgccatccgcagcggatgatgacgaaacggctgtgctgcccgtccccgacaatcatgcggatgcgtcggtctcggatgtggatacgcaggcaacagctgcctctccatcgcccatcgaaccaaccacagatcggattgccctggaaacagttgccgatgccgtggagggagatggtgggccgattccatctgccgatgatgtgccgatgtacgcagcatcttcagcacgacctccctatgggcagtctcagaccgccggcaaaccatgccagcctggggggagcgccaagaacgtccagagcgccaagaacgtccagaatgctaaggatgtcaagagtgccaagaacatccagaaacagagcaccagcgcgcctactgtggtattcggactattaggcgtgattatcggcgtgatcgcgctggttttcgggtacatatctccggatcggatgatttcgttgttctcgccgaatccgcaattgctgacggctgttatttgcgccgtagtgggactgattctggtaatagtggccgttgtatgggccatagtcggtgccgtcaagaagagaaaatagcgttacaaaccattgcattacggtcccagtagaagcacattatgacgggagccgaccgataagagccgaccgttctatgctgatgggggggaggcatagtaactatgaagcggatttcggtgcggcgggtagcgagcgtcatcgtcaccgcgatggcgatgacgctggtattcgccacacttggctgggcgatgatgccgcaatggaacacacggccctacaccaagcacatcgttatcgcttctgccgacaccaccatcacccctgcccatgcgaacattccccacgaggggcgatatcgtacgcgtgaaacccgactatccatcaagaccggcgacggcgtcacgctacccgccgtactacgtgaaccggtcggcgctcccgggccacgcccggcttgtctgttcattcacgggtccggtaccagtggtgccgaggatttcggcgatatcgccaacgccatggcctctgccggtatcgtgaccttggtgccggccaagcgcaacgacaactacaccgtgctgcatcgcgactacccgcgttttgctcgcgaatacgggcgttcgctcgacgtgttgcgtggcagaatcggcgtggaccccgccaaaaccggcatctacgccgaatccgaaggcacctggatcgccacgattctaacctcgaaacggcaagacattgcctttgccgtacttacatccgcaccggtgttcaatggacgtgagcaaatggccatggctgtcagcgcctatacgcatgaggccggcgcgcccaagcccgtggtcaaagacatggccaaattgatgtcgctggactacgcgccatttgatctagcctatgccgactttgatgccgaccggtatctgaaatccctcaccatgccggtgctggtgaactacggcacctacgatacggccatgcccatcgaacagggggcgcagcggatcatcgctacggccaacaagtccggcaacgagaacgtcaccgtacgctatttcgccggcaaccatcagatgcgggctggtgagggcttattcaccccgaacctgccattggccgaaggctatacgcaagcgctggaaaattgggtgaacggtgtgactgccggaaccaaagccgatggatgggcaacgccccaagtcgccggtgcgacacctcaccagcgcttcgccgcgccgcaacgtaccagatccggtatcgtcggctcgctcggcgtgctggccggtctgatggtggcagggcccgtgctgatcgtgatggcggcgatattaggtattggcttgactgtgttttcttggctacagacgttgctggccgggcgacgtagtgtggcgactgtgcgggccatgcatgcgacgccgagtgggctgggagccgcccaacagcgtacgttgcacggcattgccggcttatctgccggtatcggcacagcggtgatggtgattactgggctgttgtacggctatatgagcgccgtaggcgtatcggctgtattggttatgcctcaaccgcggctgtttgccgtcggatgggtggtgctgcgaatagcgaccatgctgttggtggtgctgtttgcttgggaaatggaacgtgtctggtattgccgcgccgatatcgtcggtgtgcggcgcgtcatatgcgtgatggtagcgctcggcactctcgccacactgatgacactggcattttggggcctattctcgctgtaattctgccgatgtgcgctggtaaatggggcctggcgggcaggctgcgttggtggtctgggtgtggggcgatcggcagattgcgttggcctgggtatggccggccgacgtacatcagtcggggtgtccgatacacagtgaatggctgagtattacgcttgggaggcttcggcctcctctaaggtgtcgaaaccgccgagctggactgtgtgcaacaaggtttcctcagtgatattgcgttgcgggctggctgcggcgcgctcgccaatcatcgcttcgtaacgttcgaaggtctggtcggaatacgtaccaagctcgccgcgcagataggtttcgaatgaggtggcagatggtgtgtcttcggtggtggtgagtgcgcgcatcgcctcgccgagcttggggtagcgctcgcggaaatccttggcccaggcgacctgctgggcgatgacctgttcctgacgggccgcgcgctcttcagagagacgcggaatatacggctctatgttcttcgtgaaattttccggtgcggtggaggccatcatgcggccgtatttttcggtcacgaggttgcggcccacgtggtcggccgcgtcaagatcagcggcatagctggtgagtaatggccgctcccatgtgaggaactgggccaaccgcatctggtggaacaccggccagttgccttggcatgccgcgcgtccaccctcattgttggtgcgctggaactgatcccattcatgacgcacaatagcctcgcgcagttcatcatcagtcagttcgttggtcatcgacgttcctttcactgatacctccctctgatgagggaggtggcacggcgaagccgtggcagagggagcttgaatctacaaacttttaagcaccggatcatcagaggcgatgtggtcctcgacatacgggcgctgccattcgaggaaggtctcgccggacgtggtcaggtgttcgcgtttgagttccttgacgatatccaccgcaatctgctccacaatatcgttgattttctcgattgctggagccgcgcccttgccgccttcgccaaatccggccccgccatagcaggctgccgaactcaatcgcatcacggtttccaactgttcgcccacgttcggcaacagcgcgaacatcgagccagacagcttgcgcaatgctgcgaactgccacttgtaatacggcatatagcccaccaccatcggcacgttaaccaggaacaccaacgaggcggtggcctgcacgaactcgtggatggacagccatgcggccgcgccgtcgccgcgcttcaacgaacgcggcagattatattgaccggcttgggcgatcatgccgagtcgcttggagatcagcgcgagccgcacatcgtctggcatgtttttgaacccttggcgcgtcttggaaaacagaccggtgggatcggcgaacacctcgccattggtggcggcggccaaggtcgattcctgaagcatcagccactcatgcggcgcggtctgcgccggcgcagtgcgatacccggtgatcgattcaaagaagtcgccgatacggaacacgccgtcacggcgatttgcgccctgtgcgcgcggtgtgacggggaagagcggtgcatcaatcggagtcgtcatcgcttccgccacatcagaggacgccgcgcctgactcggcagtggcggcatcgtccgtagcggtaccgggggtgggtgcgtttgccgcatcgggtatgacggtggagcctgcacctgcggaggggaatgccccggaagcatcggacctggcatgcgcctcgaacgtcacgcggccttgcgcatccacgctgaacttgcgcggcagcgcctcgtaatcggcctcaagttgctcgccgatggccgcgtaatcctcatccgtaagccacaggcagaagcgcgggccgaaatcgtggtcctgcgaatacgcatcatcgaatccgtagcattccgagccatgacccaccagaccggcggcgatacgcccggcatactgcggatacttcgccgcaatcatcggcttgcccatctgcgtccagaacgcgcgggccagcttcagtccggataccgggcatgcggaaacggcctcggccgcgcccgcagaaccggtcgacaccgaaacggtggatggggaaaacgccgcgttcgcaccggtctcgggtaacgcctgcgccaatgcgcccggcgtatccgcgtccacggccgatgacgcggagccgacctgtgcctcgacgcccgcaccggtcttgccctgtgccgggctgttcggcagccgcgagccggactggggcagcgcgcctgcatcgccggcaacacctgcattgtcaaccgtcaccccggcctgcgccgccgcttcctcggcctgccgcagattgtcggcggtgatacgccagtaatcggtgtccttgccgtaacattcctcgatcacggccagcgcatgccggtatccagtaaccgcatccgcataccgtctctcggcaaagcacacctgcgcgaagcccgccagtgcggaggcataatgcgcggaatgttccagatggccggtgcgatagatttccagcgccttggctgcatgccaatgcgcgtcctccaacttgtgttcggtcagcagggtcaacgccagattcgtgtgcgagctggacacgtcgatatccgcgtccgggttcacgctcgaggcttcgataatgcgcagcgcttcacgcaactccagttccgccttgtcgggccgattcgtctcgctgtagagcatcgacagattgttgtgcagtgctgcgagcctacggtcggtgggcgccagcgaatgccggcagacactctgcgcctgatgatacaaatcctcggcctgatcgtattgtttggccgcgcgcatcgaggtggcgcaattgattagcgtggtggcccacgcctcggatgtgccggtggtcaagcccatacgagcggccagttccagcgctcgctgcacaatccactgattctccttgtgccgaccttgcgagcgatagaagcccatcgtttcgttgagcacggtgagcagtccggcctcgtcgccggcgttttccgcgtccaccatcgcctgttccaagtacgggccggcttcggtggcggccgtgtggcgatcgaaaatcgcgtccagtccgttcaggaattgttgggtatcaaaggttgcgggcgattgatcggcatcgtccgcaacctggttcgccgtggaatcggcaccttgtgctgcggccgccgcatcggtgtcgtcggcatcgtctggaccatgcgcgaattgcgcggcgaattgtttgagcagtgcttcctcatccataccgccagacctccctgaatcgtgtctgatttcagtctattaatactgtgaacaaacacgtcagggagtttgctgtgagcttggtctcagtccaccttggtttcgcgcaagcggtgaatggcgtcggtatcggtttcgcagcgccacgagtggaaggccagcagccctacggcaagcagagccagcggcataccgcccaggccggtatagcgatagttcatcgagaaggtggtgagcatcgcgccgccgacaatcgagccgatggcattgccgaagttgaaggccacctgcacggctgcgccggcgatgagctcgccgccgccttggccggcttcggtcatcagcaattgctgtggagcggaagtaaagaacaatccgacggcgatccagaacgtcagtacagcggtcatcggctgattgcccggagtgatcagcaccagcaacaagccgaggcaggagatggactgacctattgcggccgcgccggcatgcctccaatggtcggtcagacgacctccaagcagaccgccgatgaccataccaaagccggcaagcatcatcagcatcggcaccagggaagacgaccatccgccggttttctgcagccagggggagacgtagctccaccagcagaacacaccggcattgccggtgaacacggcggccaaaatcacccacgggccacggcgggtgaggaacttgaactgaccggcgatgcccgcgtctttaatcggtgcaacgtacggaatccacgccaacgccagcacaatcgtcattgccgcccaagcggccaaaatgccgaaggcaagacgccaggaaaggaactcggccatcagggtgcccgccggtacgccgagcatattggccacggtctgtccggtgaccatcacggatacggcctgcgcttccttgcctttctccgccagagtcttggcaatgagcgtggccgtgccgaagaacgcgccgtgcggcaggccggcgacgaatcgcgcgacgaccagcatggcggcattgacggaaaacacggaagccagattgcctaccaaggcaatcgccataaacaatatgatgaggttcttcggtggcaccttgcggccgaacaccagaatcagtgtgccgaagcacacgccgatcgcatacgcggaaatgtaatggcctgcggtggggatgcccacgccggtggcggccgcggcctgcggcagaatacccatcatcacgaactcggcggcaccgagaatgaacgcgcccgaagccagtgcaagcagactcttcttcatggttcctctaattacttcagtattacttacaaaaacagtgcggcaatcgattgattcgagcgatatattacggtggtccgccaacaaatacgggccttgccgcgacgtggtttgtcgctgtgcgcggcgggttgtttaccgctgttcgatcgcttggtttgattgttgggacaggaaacgaaaaaccggattgctgatttctcaacaatccggtccagttgtcgggctggcgggatttgaacccgcggcctcttcgtcccgaacgaagcgcgctaccaagctgcgctacagcccgtttggcaacagatgtagatactacattgtggtggtggacaatgcaaatcggcatgtcgcgagtgttgcgtgatggtggattcgccatgtgtacaggtctctcaagccttgtgcagggccggttttgcgtcatgtgagcgggtgttcagatggccgtgcggtctgccgggctcataatcgccggccttgcgtacactgatgaatcatggctgaagttgtcgaaaataccgaaaacactgagaatgaaaccccggccgtcccgcagatgagcaccgtcgaacgtgcggaaatgctgctcaagcaggacgccaccatccgcgagaagatcaagtccggtgccacgctggacgaagccgtggacccctccaacaaggagttcggcccgctggctcaccccgagcaggtgcagatgcgcgtggccaagcgcgcgatgatgcttgaggccggcattgccccctacccggtgcacttggacgtcaccgacaccatcgaggcggtccgcgccaagtatgacggcaagctcgaggctggcgaagagaccgaagacatggtcggcattgctggccgcgtgctgttcctgcgcaacgcgggcggcctgtgcttcgtgcagctgtccgccggtgacggcaccaagattcagggcatgatctccaagaaggagattggcgccgattcgctcaagcagttcaagcagctcgtcgaccttggcgatcacttgtacctcaagggccgcgtcatcgcctccaagaccggcgagctgtccgtattcgccactgagtgggctatcgcctctaaggccctgcagccgctgccggccctgcacaaggacctgaacgaagacacccgcacccgcaagccgtacatcggcatgatcgcggacgagaacatccgcaacatggtgcgcaaccgctccaaggccgtggcctccctgcgccgcacctttgacgaccacgacttcctcgaggtcgaaaccccgatgctgcagaccctgcacggtggcgcggccgcccgcccgttcaccacgcacatgaacgccttcgaccttgacctgtaccttcgcatcgccccggaactgttcctcaagcgctgcctggtcggcggcatcgatcgcgtgttcgaaatcaaccgtgacttccgcaatgagggcgtcgacgccacgcacgcccccgaattcaccatggtcgaggcctaccaggcctatggcacctatgattccatcggccagctggtcaaggagctcgtgcagaagaccgccatggacgtctacggctcgcacaaggtcaccctgctcgacggcaccgaatacgacttcggcggcgaatggaagaccatcagcatgtacgactccctgtccgaatcgttgggcgaggagattgtgccgaacggcggcccggacgcccccggcacctccgttgagcacctgggcgccatcgccgacaagctcggcgtagagcgcgacgacgtggagaaccacggcaagctcgtcgaacacctgtgggagcacttctacgaggacaagctttacgagcccaccttcgtgcgtgacttcccggtcgaaacctccccgctggtcaagggccaccgcaccaagcccggcgtggtggagaagtgggatctctacgtgcgcggcttcgagctggctaccggctactccgagctcaacgacccgatcgtgcagcgtgaacgtttcgtggctcaggccaaggacgcgctcgctggcgacgaagaggcttgcgacatcgatgaggacttcctcgaggctctcggcgtgggcatgcctccggccggcggtatgggtatgggtattgatcgactgcttatcgccttgaccggtgccacgattcgcgagaccatcaccttcccgctggtcaagccgctcgttggctgattaggcatactctggctcccctcagagaggggagccgagttatatatgaaaggattgcttatgtccatcggcttgtgggttcggggcgcgcgtcccaagaccttggccacttccatcgcgtcggtgatggttggggcggcgatggcatacgcgcatatcgagcagtcgggcacctgcatcgcaatatatcccgaaccggcctcctgcgccacggcccgtgaacagcagaccctgctgatggaccgattctggccggtgaccatcctgtgcctgctagtcgcgctgttcctgcaaatcgccgtcaactatgcgaacgactattccgatggcatccgcggcactgacgccgggcgtgacacggacgaatcgaaatcaggcaaaccccagcgactgaccgcatccggactggtaccggccaagcatgtactgttcgcggcgatgatttgcgccgccatcgcctgcatatgcggcattgccgctatcgtgatttcccaagcttggtggctgtttgccgtgggtgtggcctccttgctggccggctggttctacaccggtggcaagcatccgtatggatacgtcgggctgggagaagtcggcgtgttcctgttcttcggcttggctgcggtattgggcaccgaatacgcgctgtgcggcacggtggacgtcggcggactattgggtgctgtggcggctggcctgttctcctgcctgatcatgatggtgaacaatatccgtgacatcgacgaggatcgtgagcatggtaagtgcacgctggccgtacggctgggtgaatccggcgcgcgtacgctgctgattgtgtgctgcgtggccgcgtgggccatagccctgctcatgtgcgcgaccctatggtggccgtggggcgcagtgctgttgatctcgggcgtcggaatacctgtgcgcatggtctccagcgtgaataaacgtcaattccgcccggctctgcccgccgccagcttccagaccttgctgtttgcggtggtgctggcggtttccgtgacgctctgagagcgaaataataagacgaatactcgtgtttgggcgcacgcggctgtagactgaaccgtatgacttataaactagtactgctccgtcatggacagagcgcatggaataaaactaaccagttcaccggctgggtcgacgtaccgctgaccgagcagggtgaagccgaagccaagcgtggcggcgagctgctcaaggagaagaacgtccttccggacatcgtgttcacctccctgctgcgtcgcgccatcaacaccgccaacatcgctctggatgccgcagatcgtctgtggattccggttcagcgtgactggcgtctcaacgagcgtcactacggcgctctgcagggcaagaacaagaccgagatccgcgaagagtacggcgacgagaagttcatgctgtggcgccgttcttacgccaccccgccgcccgagatcgacccgaacgaccagtacgcccagaacaacgacccgcgctacgccggcgatccggttccggaagccgagtgcctggccaacgttgttgagcgtgtgaagccgtacttcgagtccgctatcgagccggagctcaaggccggcaagaccgtgctgattgctgcccacggcaactccctccgcgccatcgtcaagatgctggacaacctgtctgaggaagagatcgccaaggtcaacatcccgaccgccatcccgctgctttatgagctggacgagaacttcaagccgatcaagccgcgtggcgagtacctggacccggaggctgctgctgccggtgccgccgctgtcgccgctcagggccagaagtgagcctaagccgctaacacggtacaagctgtaaggggagtcgcacataacgtgcggctcccctttgctatgcctgccaaatcccccatggggcggtgattaccccatggggcggtaaaaccctcatggggcggtatgccagaatggcttaattccgcggtttcacatatccttcaaaccgccccatgggcaagttaccgccctatgggtgttttgccgccccatggatacgccggtgtaccgcccaaaagcaacaaaaaacggcgtccagccgtagccggatcgccgctttcgggcatcctcctcaaaccacaggagaacaagtgttcagttattcgcccaatgtgagaacaagtcccaatcagtcgatgtcggtgccctcgtcgcgggtcggctccttagtggggtcgaagccggagacgatgtacaccacacggcgggcggcggacacggcgtgatcgccgagacgctccaggaagcggcccagcagcacgatatccacggtctgctgacgggtgatgtcatcggacagcgctagatcgaaggtctggtggtgcagattgtccagcttgtcgtcagccaggatgatggcctcggcggtcttggcatcgcgatcgaagagcatggccaccagctggtcagcggtgttgtccaggaagtcgatcatctcggcgaacaccggttgagcggattcaggaatcgcggcggccggataggtgcggcgagcggcctcggccacgtggcgggcaagatcgcccatacgctcgaacgtggaagccagacgcatggtggaaacgaccacacgcagatcggtggccaccggattctgcttggcgagcaacttgacgcactggtcaatcacagaggactccagggcatcgatttcgatgtcgccgtcaatcacagtctgtgcggcttcaacgtcctgattcagcagggcttccccagctcctttgatcgccttgcgtacgttctgcgccatacggtcgaggtcgtcagcaacctgcttcagctcctcgttgaaaataacgcgcatttctctagcctttcatgcttgcttattgcaacctgtaccagtgtattattccagtacttgttccccacttcaacgtaggtaatggcaacctcaagttgttctactgttcattgggttgttcacctgaaattcatgttaccggcgtgccggcaaaccgcaatcccggcgtgtggtgtgaaagaatgggggcatgacacagatgccgctcgtcgccgcgattgctcttattgtcacggctgttttatttgtggtaggaatcatcacgctcatcgtgggatttgcgacacatcgagtgtccatggaatcgccgctggccgatgatgacgacaatgacgatctgtccgacgacaccgccacgctgctgtccatgctgccaggtgcgtccgtggtggtcgacgagcacgacgaggtggtccgctgcaatcccgccgcctaccgcctgggtgtggtgtcagatgacgccattgcccagcagcatgtgctggatgccattcacgaggcgcgcaagtccggtggcaagcgccagttcgacttgaccaccgatactccggagcggtacgtcgcagaccagaacaagggcgatcacgtcgccacgcagtccgtccaccgccccaactggctgaaggtgactgtagggcgtatcaacgagcagttcgtcatcgtgttgattaccgatgtcagtgatgtgattcgtttcgctcaagtgcgtgactcgtttattaccaatgtgtccgagcaattgttgggccccactgaggctctggccaaactcgccgattcgctggagtccggcaatctggacgaacagcaggtggctgccgacgctcgccgggtgcgttccagctgcagcaagctcaaccacatggtgtctgatttgctgctgctcatacgcgcgcaggagccgattacgccgtcttccgccaaccgactgaacgttatggaacagctcagggccacggcggcgcgactggagccgcaggcagccgaggctggcgtgcagctgaacatcaagggcgacgatgatctagtcatcaatggtgaggcggaccagatcgacagcgccgtgaccaagctcatcgaaaacgccatcggctattccaaggaaaatggcgtggtcagcgtgtccgcatccaaagacaaggatggcgaccgcgcggtgattcgcgtgattgaccaaggcacgggcatcgctaagaaggaccaggcgcgcatcttcgagcggttctaccggggcgtggaacagagcaatcgcacggcggatggcgtgggcctaggcttggccatcgtcaagcatgtggcgctgacccatcatggcgatgtgaccgtatggagcgcgcccgggcaaggcagtacgttcagccttacgttgccgttggcgcagtgaggtaaggaattggtggcatgccttgcatgccaccaatgctgtttgatgagcgacctgcggccgcggtctctccctcaatcagctacgctgacagctcccgtcatcagagggagcttgtgttgcgttactgtccgaggcggcggtagtcccagcggtcgaagtattcccagaccagcagtagcaagccaataatgacgccggccacgcacataatcaccaacggcattacgctgtagcccacggccagcagaatcagcacgacaatcaacgccacaatccatagaccggtaccgatggcaaacaccttacgcagatccacccgtacgggcttgggtgcgggtttgcggacggcagggtcaatgagaggcgcgaacttcatactcatgcactgtagtaagagtagggaggggcgtcaaacatccctccctacgatttattcaatcggcatcagttgagaccgatcaatgtgcatggcatatatggtcggcaatgcggggcatatatgccatcacaggtgctcgaccacgtagtcgacgcacttggtgaaggccatgacatcagccggttccaccgaggggaacacgccaacgcgcagctggttgcggcccagcttgcggtagccggcggcgtccacaatgccgttctcgcgcaggatggacagtacctgagaggcctggactcgctcgtccagatcaatggtgaccacggcgttcgagcgtgcgtccgcatcgacgacgaacggagcggcgtattcggagcgctcggcccacgagtacaggatggatgcggacttggcgcaacgtgtggtggcccaggcgaggccgccgttgttgttgagccagcgaatctggttttccatcatgatcagggtggccacggcgggcgtattcagggtctgatccttgcgggagttgttcagtgccgtggtcagcgagaggaacggcggcacccagcgatgtgcgccttccagatgagcgcttgattcgacgcctgccgcacgatcgatagcttcgggggagaggatggcgacccacagaccgccatcggcaccgaaggccttctgcggtgagaagtagtagacgtcggtctggctgatgtccacaggcaaagcgccggctgcgctggtgccgtcgatgacggtcaaggcaccagcttcacgacttccggccacgcggcgaatcggggcggccacaccagtggaggtctcgttgtgagcccagcaatatgtgtccacgccctcggtgagctcaggcagacggtaagtgcccggctcgccggggaacagcaccgggtcttcaaggaagggtgcgttcgcggcggacgcggcgaacttggcactgaacgagccatacgtgccgaatgcggcgcgacgggtgatcagcgaagcgcaggcaatctcccagaacgcgctggcgccgccgttgccaagcgccacctcatacccttcaggcaggtggaagaactcgcgcagaccttcacgaatcgaagcgaccagttgcttgactggtgcctggcgatgtgatgtgccaagcagggtggtggcgccggcgtcgagcgcggcgatctgttcggggcggattttgctggggccggagccgaagcgaccatcttcgggcttcagcgactcgggaatactcagtgtgatagtcatggtttcaagggtagaccagtgttggggaatatcgcggataatgctcggtgtgcgggattactgcggggttactgcggaattccggggtgccgggcggcagtggtggcaatgcggaatgcagtgcagaatgtacgcagcacatcatggttacggtgtgtcggaatgacatgagttagtgattcttccgataaccggatagtgaggttcgtgaacgggcggaaacaaggcagttttttcacccggccgcacggttacgtaaatcgtttgacacacccggatggtgggggatcacattgaggattgacctctgttcgttgtacagtactcaattgtgacggtcatacgaggtcatcgaaatgaccccgccgaacccatccaaggagttaacgtagtatgaagcatgcttcgcataaagcgaccacggtctcgcgccagaagttcagcttagcgaaggcattgtttgcctccggcaagggttctcattccgttcgtgctgtgcgtgcggtgcaatccgctggtagcgacgccgttgttttggggcttgatccggccatcgccgagaagatcaacgaaatcgctccccagacccgccgttccattcgtgaggccgctcgtgccgctgaacgccgtagccatattcttgcctcggcctcactggccgctctggtcggcacggccgcaggtgctctcgcgttttccaacaatgaagacgccacgaactcgttcgtggctgatccggccacgacgaccacgcagattaagcgcatcagcgatgtgactgcggcttctcgttccgaagcgcgtactgatttgagttcatcctccgttaccgcacagtccaccaatgaaggcggctgggggctgagcaattcagacagcaccttggacgccaagctgatgaatcgcaataatgcgaacaatcctgtggtgtcggctctcgtggatgccgatggcgatgctgtgccggctggcttcaacccgaaccatgccgttggcaccaactccaacaactatccgtggggtcagtgcacgtggtacgcgtaccagcgtcgtgccgaactgggcctgccttccagcggcaacttcggcaatggtggcgcgtgggcggcgtcagcttccgctctgggctattgggtggacaacactcctcgccatgtcggtgatgctgtggtgttcgctcctggccaggccgatgccgatggcgcgtacggccatgttgccgttctggaaaagatcaatgccgacggctccattgagatctccgaatccaatgccaagggattgggtgtgatttcgacccgtacgttcagcgccgccgaagccggtaagttccagtacgttcactactgattcatttcattggcttacattcggtgattactgttcggatgtgacgtcgccctatcggcaatcgttcgcgcgaaatgacatttcaagtgttgcggccgcgtattagtccgaactgacctgtgccgacacgccgatatatcccaatagctccggggtgttttatttcttccatcctgtacgagttaatgcgcaccgtgtagggtgatggttctatgaagaccaaaactgtagcttcttccattgttgccgcgattgtctcctgtgcctgcttgtttatgtttgttcctacagcaactgcagctgagggtgttactgtgacttccaccaagtccttcccctcgtacacccaggtgcgcaaagatctgacgactgaagccactgccacgagcgttgaggacaatgctgattggggcggcattgagaacctcgatgtgccgcagacggaatctcaggcggaaaaggatgccgcagcggccaagaaggctgccgaagaggaggccgagaagcaggcggaggtcgaggctcaggcgacccaggagcaggccaacgccgcgagccgtaatgagtctcgctcttctgttacttattccgatgccagtggttcggtttccgctggtgccggtgcctctatcgaccgtgcgtattctttgatcggacagagcatggactgcaccgcattggtcagtcaagcgttggcggcccgtggcattaacttccacggttggcctgaagagtacgtcaatgttcctggtggccacgtagtcacagacggatccctgcagccgggcgatattctgatttatgccaacaccggtggatggaacggtggtgcacactacgatcatgtggcgttgtatgtcggcaacggtcaggcggtccatggtggatggaatggctatagcgtggctctcgctagtgccatgaccgaaaagctcaccatcgtggtgcgtatcccgtgatgcagtcttattgattgatttattgcaggcctcggatgccgatcggtatccgaggcctgttgcgttctcctgccgaatgatgcacccgcgacatcatcttcgaaatgctattcctgttatgaaatcgacccatgtgtgctagtgtatggcgttgatgatgagcgttaagactattatttccacatcagtggcgattatcgccacgggtgccatgtttgcgtgcgtagccccgtttgcctctgccgattccgcgcagacgagtgctgtggtgtcctcacgttctttcccgaaggcgagttcggtgaagaagaatttgttcgccgaatccacctccacctcggttgatgagaactctaaatggggtggcatcgagactcttgatgtgccacagaccgagtctcagggcgagaaggaagctgctgcagcggcggcggctcagaaagccgctgatgaagctgctgcagcccagtccgctgctgctgcggcagccagccgctctgaacagcgtgcgtcgattccacaggttgacttgggtaaaatgactggcactggcactggcgctgagcttgctagcttctcactgaagttccaaggctatccgtatgttgccggcggcaacactccggcaggatgggattgctccggttttgtgcagtacgtcttctcccagtttggcatctccctgcctcgtacctctggtgctcaagccaccgtgggtactccggtcgcaagcttggcggatgccaagccgggtgacattcttgcgaatggtactcatgcggccatttacatcggtaacggacaggtgatgaatgctatgaacccggtgcagggaacggcagtaagcgacgtttccgtattcggtggagctggatattccattcgccgcgtgatgtgacaagaattatgcggtaagcgaattcgtattaaggcacgtcctttggggtgtgcctttttcgtatacgcggatttctttttgagcggaggataccggccaaaccgagtgtcgcggggtattgttgagatacgcggtattcgtgccgcaataacttcaaggaggtcgtcatgattaacgacaaggctattctcgtcggcgttgacgggtcgcatgccagttacaaggcaacatggtgggccgcgaattatgcaaagcacgcggggctgacgctgcagattgtctgcgcatattccctgccgagctatgccgccgtttcgttcgatgccacttacacggcgatgggggacgataacgccgcgcattccgatgctcaggagattctgtccaaggccaaggccatcgcagacgagcagggcgtcgaagccgccacactgattgttaccggagatccggcatcggtgttcgtcgaattgtctcgtaactacaatctgatcgtcattggcaaccgtggcaagggcggtctggccgagcgcctgctgggcactacgtcctcatcgctgccggcatatgcttactgcccgattgtggtggtgccgtacaccgatgatgacggtaacctgatgcacctgaacaacacgatcaccaaggtggccgtcggctccgacgaatccaagtggggtctgaaggcgctggacattgccgccgacttcgccacgtgctggggtgcggaactggacgtgatttccgctgtgccgaacctgaagggtgtggacggcgaggacgccgtcatggagtcctacaaggacgatcttgaggtgcgcatcaagccgttgcaggaatcgcatcctgatctgaagatcaacaagcagatcgtttccggcccggccgtgagcgccctgaccaaggccagctacgatcacgatgtggttgttgtcggctcccgtggtcgcggcggtttcactggcttgctgctgggctccaccagccagggcctgctgcagcatgcggtcggcccggtgtacgtggtgccacgcaagtatgttgaggccgcggaatcgcgtctcgacaccgtgccgagctcgcccgccgaagtgcctaccaagtcgctggaggagattgccggcgtcgaggagattccggtgtccgcagccgagcctgaagtcgcccagcagatcgaaaagaccatcgatcccgatcgccagtaaagtccgaatatacggaaagaggctcccgccagggagcctcttcaatttatatcccgtctcagtgcttgacggtgacgttcatgcgcaccggggtctcctgcacgtaggtgtgcttgaccgtgcaacccttgtcgatatggcgggtgacgcgctccttgagcttgtcggcatcctcctcggacagaccggcgtcggaagcatcaatcaccacctgctcctcgaaaccggtgtaggcgtcattttccgggtcgtacgtgccatccaccacaatcttggcacccttgccctcacccagcgtatgttcgatggcgaactggctggacagcgcggcgcaaccggccagcgcgaccttcatcagatcgcccggcgtgaactggccacgatccttgccgaacttaatgtgtgcgccatcgtcgctgaacgcatcccacgaaccgtccttgttacgctcaacccacagtcgcttacccatagctgctcctttattttcagccgccggcgatctggcccatcgccatgccagcgggggagcgcggcacctggccgctctcccgcatcagtggacttctctattatgcccctaagctacactggtgcacatggctttgaccgaagaacaactcgcagatattcgctcccgtatccccgcacgtcccgaaacggacattccgatgccctatgaggacctggtgcgcaagatcctgaccgaaggcacgctgaagtccgatcgcaccggcaccggcacgatttccctgttcggccagcagatgcgctttgacctgtcgaagtacttcccgttgctgaccaccaagaccgtgttcttcaaaggcctggcctatgagctgctgtggtttttgaagggttcctccaacatcaactggctgctggagcacaacgtgcatatttgggatgagtgggcggacgagaacggcgatctgggcccggtctatggcgtgcagtggcgttcctggcccgcgccgacccccgaggacccgaatcgcaccatcgaccagatctccaatgtgctcgacctcatcaagcatcatccggattcgcgccgcatgatcgtctccgcgtggaatccggccgaggtggagaagatggcgttgccgccctgccacgcgctcttccagttctacgtggccgacggcaagctaagctgccagctgtaccagcgttcctgcgacatgttcctcggcgtgccgttcaatatcgcctcctactcgctgctcaccatgatgatggcgcagcaggccgggctcaagccgggcgaattcgtctggaccggcggcgactgccatgtttatgacaaccacgtcgaccagttccttgagcagctgggccgcaagccctacccgtacccgaccatcgagatccgtaaggccgattccctgttcgactaccagtatgaggacttcaaggtcgtcggctaccagcatcaccccactattaaggcacctgttgcggtctgatgctgattaccgtttcgtggacagcgaatactgtgaaggtgacggcccccgagtcttcgctgtccactacactaaggcccagttccgcaatccaggaggagtaagcgaaatggagcatgacagtagccgtagcggctatcacgaacccgagcccggatctgccgggctgtctgccactgaagaagactggggtgacgattatcccaagaccttctcggtgaatcttatctggggcgaagcccgtgacaaggaaggtcgcgccggtgccatcggcctcaatggtggcatgccttggcactgtgccgaggatatgaagcatttcaaggagctgaccgtctcccatccggtgattatgggtcgtaagacctgggaatcgctggggggcaagtaccggccgctgcccaaccgcgacaacatcgtcgtttcccacgatccgatgtaccgtgcgccgggggccactgtggtcaccagtcttgacgacgcgctcgatatggcccgtcaggaggcgattccggacgacggtctggaccgttcggagatttggatcatcggcggcgcccagttgttcgccaaggctttgccgttcgcggacaaagcctatgtgactgatctggccgccaccgtggatgccgacagctacgcgcccgatatggcgtcgctggtcgaggccgggatgtggcgggaagccgaagtgggcgagtggcatacgcccgccaaggaggagtccggcatcgattcctatcgtttccgtatcttggccaaaaccaagtaagcatgcgaatccggcttatgccctttatagcggcatgagccggattcatattcattcgaccccaacaatacagtcgggccgtgtgcggcccggtgaagcccgattgaggattgattcaaagctatgagcaatacccagccctacaccgtaatgaccgtctgcaccggcaatatctgccgttcgcctatgggtgagatcattctgcgtcacttctttaatgagcgcggtcttggcgaccaggtgaacgtggaatccagcggtgtgtccgacgaggagtggagccacccgatcgacccgcgtgccgtgcgcgtgctacgcgaacgtggctatggtgatgagattccgcgtgaccacttcgcacaccgcatctcgcgtgaggaaatcgaccgtaccgacctgttcctgccgatgaccgcctcccacatgcgcgccctgctgcgcatgctgccggccggcaagcgcgccgaagtgcacatgtaccgcagcttcgacccgaatctgcccaagccgaagcccggccgcgaagatcagatcgatctggtggacccgtggtacggcggcaagcacgagttcgaggtcgccatcgaccagattgaggaagtcgccccgtacatcgtcgattgggtggcgaagcagctgtaggaatcggcctgtggccgatgctgtgtgtttcgcagtcttacgactgcgggtctctacctccgtcaccgcttcgcggtgccgcctccctcgtcagaggaaggtacagaagattacctccctctgtaagggaggtgctgagcatagcgaagcggagggagagactaacgagtcgggtgcctcagaacaccagttgcaccagcaacatatatacaattgtgccgccggcgattgaaagcagcatattgcgtttccatacgtgcagcagcacgatgacggtgcaggcgatgagttccggaaggccgtgtgaaccggtcagaatcggggtgttgcgcagtgcgtataccaccagtagaccggtcatcgcatagggcaggacctggccgaaatactcgatgatgcgcggcggctgcttggactcgggaaacaccagaaacggcagaaaacgggtgcacatcgtgcccagcaccaccgtcacgatagtgattgcgccttgccagatggtcatcgtcatcgcgtctgtccttccttctgctggtccgctgcgtggctcatggcatggtctgccgtggcttccggggcgtcggcggccggccgcaacacgtccagatgcgggcgcaacgcgacgaacagtatcagcatggcgatcatcgagggaatcatgaaatcattggccccgaatatcagcaggcaggccagtgatgtcagcacaccgatgacggcggacagtcgctcgcgatgcttgccgtcgagccactgatcgaggaaaatcaccagaaacagcgcggtcagtacgaaatcaagaccgtcggtattgaacggcagatgcgcgccgatcagcccgcccagtgtggcaccggtcacccaatacagctgattgcacagcgtaacccagaagtagaaccagccacggtcgatgccggcagggattttcgcggtggagttgatggcaaaggtctcgtcgcacataccgaaaatcaggtatgggcgcttccagccgagccctttgaatttgccgagcatggacagcccgtagaacaggtgacgggcgttgaccatcagggccagcagaaagccggcgagcgggttgaacgcggagagcagcagattcaccgtgacgaattccattgaaccggcgaagatgaacgcgctcatgcacatcggccatacgaaggagaagcctttggtgcccatgagaatgccatacgaggcgccgagaaacaggaaccccaggcaaatcggtatggtcagcggaaacgccgctttgagcgccggcagccaggcgttggtgttggtgttggcggtgtctgccatgtggatgatgttctccttgtgcaactggtctgccggccgatgttcgccgatgatgccatatgcggttatacacgcatggtgtcgataaacggggtgagggtggcgtcgggaccctgtgcgcgaagtcacagtgtggaggatgtcacatcgtctacggtgggatagtccttgtggcgggcgcgaacacgtgctgagatgaaaccatgagcacatatcaagcgggccgaatgcttttagacctggtcccgcgaatacgaaaagacctcggtcgctatgaccggggtctttagtgaagtacccccagagagggggatacggtcccatggaacatgggccgaaatccatcgctccgaaagcatgcctgtacctctttaccaattgcgaagtcaataataccaacggtttccggttcttgccggtagatatgcgagcagtgttgctccttgttgtcatcttcatgcgactggcggccgaaacggcctgtaatgagtgattgaatcagcctaaaaaccaatgattgcaaggcctcaggtggcataggtgcatttttaggtgcagcggcccgtagagagcctattcaggctacttggtggcatttttgatggcattttttgaagcggctacattgtgccatcgatttcggatttagcaaggagttttaccatgcctgtaaggacgaagaaaggtagtacagggccgtcgttggagcgccggagcaagttcggcaccgtgacgccgcgttatgatgcgtcgggcgatcttgtcgcttggcaggtgcgatacccggacccgaagcgtccgggcaaaaaggtccagcgtcagttcaaaccggatatggagcacgaagcgcaccagtggctcgaagaggagcgacacctggtcgaactggaccgcaagaacatccaggaatgggttcacccgtccgaacgccgtcgcaggaagcgcacgagccttatctcgttcgaggattacgtgacccagtgggcggaggaataccgtttgccgaacggtgagaggatagccggaggtacgctccgcaatctgaatctcgatattgcgcatttcatgccgggcttcaagggcaaaattctggccgagatcacaccgaaggacatcaaacgctggtatgacgcgccgcaccctgagggacaatgggcattccgccgatcatgcatgcgactgaaagcggcgttcaccagcgccacaaagatgagtatggacggctctccgccgttgatccgagacaacccgttcatcctgcccataccgccagcaccgcgttccgccagagaggacgttccgcctgttacacctctcgaactcagtctgatagcggagaatatgcccgactacacaagactgacagtagtactcgccacgctcgtcggaggcctccgttgcggcgagctgtgcggcttgcaggtcaaggacatcgatctgaaagccaaacgcctgaccgtgcgccactccgtcaacagaggatattcggatcgcggctcgacgcgcatagctaagaccaagaccgactccagccgacgcactgttcccatccctgacggacttattcccctgatccatgatcatttgctcaagcattgcgaatggacggactctgaagctatggtgtttcggcctaaacgtgctgtggtgatgagccagaccaccctggaaggccagttccgcaaagctagggagaaggccggacgtaccgatctgaccttccaatcactgagagcgagccacgcgacgctgctcatgctcaagggaggcactctgagggaagttatggacgaacttggccacgttagcgagaaagtcgctatcaagcactaccagcgtatcgtcgcccagcatcgcagccaggtcatcaatcaacttgccgaagactttatcaaagcagctgtcgtatatgaagagcatgaatgaagcaatagtgattctgtttagaatactattagtaagcaaaatacactaaaaatatatgactggcgacgatgcaatatgtattttgttcatgtcgtaattacattactaaattcgaaatatctaagacttctctgtttctcattgtggatggccttattttagaaggccatccaacaaatcttagtcatattggattcgatttaatgtcagtatttcactgacggtcttttataatgttcttttatttattctccttcgtaatctcattatttcgtaatttacgtatgcttacaatactatataaaataagtgcaactaatgctgcagatcgagtccagttggtattgcagataatcagcgcgagaaggataaggccacaatatattgtggacctaatccaacgatagggatacttatcgttgatttgaattgactgtattatcgcccaaataaacgcgccgaccataattgcaccattcaaccataggaggagtgatcttcctgtagggtcgggggtgtctgagactgcaaaattaccgaaccagcatatacacgcacctgtaaacaatgcctcgggtgctatcagcatattttgcgagaacatttcacaatgctccttctattgaacactgactccgggtggaatggctatcgtgagacagattccctttccggtggctatagcgcgggtgatttgcagagcgagattcgcaaggtatagagtccctaccgcagaaacaagtatgccggcaattgttccagcaggtcctccgaccgtggtccccaacgcagtcaaggccgctgccagcgcctcggggcctatgccggccgcgacggttacggcggtagcaatgcctacagtaagatccgagtgggaaatataccatccatcgcatttcgccatcgctccggatggagaggcaggaacccttgcaaacgaagtgttatcagcatgagtagctcctaggacggtatcttgcaagaatgtatattgagattccgaaaaaccgtatgtattcttaagctcgctctcattcaaggtaataatcaactgattgtccacatatttaaaatgtgtgccaacagatacgattttatttaaagtgtcttgctgctcgtcagtcaattcaataggattagtttgacatgttgtcacgtcaatagggggtgaattgttctcgacagctgttgcggttcctgtgaaagctgacatgcacaaaaagattgcaataatgctgctcagtatgcacctaaagtatttcatgataatctcctttgattattgtttggggaatcttatcccaatttaattaaagcattgatgtatattcgaagactctatcattggtggttttgtcatctaaagatgacaaaaccaccacggctcctgacatctctaacgctgccaatctttgttcgtatgccctctctgtatgcgaacagtgctacatacccaatgtctaacataccagcagaaggcatgagacgactcatactcatgcttaagggcgacactctgagggaggtcatgaacgaacttggccgcgtcagtgaggaggtctccatcaggcactatcagcgcatcgttgcccggcaccgcaactaggccgtcaaccaactcgccgaagacttcatcaaagcggcacagtgaataaggcataacagaataagcacattactgaaggcttccgcacactcaactcaataggtcaattatcaaaaaatggcattcaatgaaaatacactcaagatatgaatatattgtcatctctagatgacaaatgcgaacatagttctttaagcgtatccacttacagcgtctttcagtttcaatctccccacacaaggtgcacacagggtgcgccttgcgccatcgagggagattatcatgccgagaatcagtcattctcatgaaagttatcagtcaaagcctccacggagtaaatggggaaccgtgctggctcgctacgacagaaccggtgcactaatagcatggcaggttcgggcctataggaacttttgtggtgcttataaccgtggcccggccttgtgggagcaggcgtgtcggcctgtcatttttgtcgcgtggaaaatgatgcgcccccggtggtgggctggatggcgtgagaacgccatccagcaaagcgaagagatgccccgtgtgcgggcgtgcgatgaagaagaacgggcggaccggcaagggcgtccagcggtggaaatgcccggcctgccggttgagctcgacgatgccgcagcggcggcgcaggcgggagcggacgctggaggagttcctttcctggctgctggggccgtcatcccaaagggcggcggactccgcgggcgacgcccgcgccctgcgcaaacgaatcgcatggtgctggcgcatccgcccgcgcatcgccccgccggacgccaggcgccacacggtcatggcggacggcacgtacatgggccacggctggtgcctgatcatcgccatcgacgggcaaaccggcgaggtgctggactggcagtggtgcgcgcacgagtccaaggccgcatacctgaccctgttctcccggcttcccgcgccggacgtgctcatcgccgacgggctgcgcggcgcggaggcggcgtgcacgcaggcgtggccgggaacgaggatccagcgctgcctggtgcacgtgcagcgcaacacgaggacggacctgacgtccaggcccaggctccaggccggccgcgagctgaagaggctgtccgacgggctcacctcggtcgagacggccgggcaggccgtcaggtggggcgaggccctcaacgcatggcacgaacggtggaaggacttcatcgccgaacgcacctacgcgcgcgacgacccgtccaaccccaaggcgtcgaggcgccggtggtggtggacgcacgaggagctgcgacgctgctaccggcggctggagaggctgttccgcgagggcaggctgttcgcctatctcgagccggaactgctgaagggcggtccggtggcgcgcaccacgaaccggctggagggcggcgtcaactcggtcgtcaaggacgtattgcgcaaccatcgcgggctgcccgaggagcacatgcgccgcgcgtgcgaatgggtatgctacatgaagaccgcgcacccacgaccggagtcattcatccccgacgccctgcggaagggcgaaaaggcaacgacgcccgaaccggacgacagcgtcgcgcccgcatacgggaccggcatcgactggaacgaattccacaccaccacgcgataccccaacaccaccgactgacaacgaaaaccagtctaaagcaccacaaaagttcctataggcctgaaatctctggccatccagagcttcctgtggctcgcaatcgatagcgcaggagccggcccccatgatgcacagggaatccggctcctacttccatttcctcctcagaggctggcttatctcatactatatcgttcaccaacgaccagtgatatctgattcgtttcgggaagagtcagcttgtgcgaagatccacggtccgaaaatccaaggatgcgaccatcgggctgaaatccatcgtaccgttgcgtgtatccccgagtgcgccaaggacctgatccgggatccatagacgagcgtcctcattgccgggcttgaaatctacacgcaacgtctcgatgatgtgtcggctgcgaatccccctggcaaagtcgagatccctgtcgtcctgatgggattcgcgcgcctccaagacaagacggttcaccccatactcgtattccaagacgggcagcagcagttccagacattttctcctggcccgctccgaactcaccgacccgtcgagtggtatggccgccaccacgatgtgcgacaatgcgagtcgttcgataatcggtatggatttgcgtttctccgaaggtgtcatgtcgcgccagtgaagtttgggcacgtgtcttttggtgaccgtggtcagcatccgatgtacatcaacttcctccagattgcagatgcagacacccatgtagtatgcgggaacgtcttgtccctgcgttctgacgctttcatcgccccaagcgactagattactcattggctttcacctccgtcatgtctcttcttctgcgggacgagttcagcgattcccgatcgaacggcggtagcaccgtgtaggtgttcaccttggagaaccctgtggggctcaatggcgtggaaatactttctgatattctgctgaccaacccgcgttcgaccaactcatgcagccctctttcggctgtgtcagccgaccacccgtaccattcgggcatgcgctcagaaggtagccggcagtaggatttctctcccagtacaaccagtagcatggccaatgcgggaagactgatttcctcgtcgagaccggtgcgccagaactcatatgacaggcgcagaaaccgttgccgaggcctctgatagggtccgccagacccatcctgggacagaagacgcaccttgacctcgcggccggagcctgatcgttcccgcttgattagtttccgttgctgcaggcgggagagtatcttcgtggctgcagcttttcctgaatcgattccggcatgctgaaagcatccgaacgcccttgcccaggtctgcaatggcagtgtggtgtaccattccccgttctcatcgctgctgctggtcgatgccgctatcagcagatacgccttgagaccgcgcaaatctccgttcctgatgaaccgggcaagcacgctgttgcgctcttcgttgccacgtggaagctgcacgaaggatttgtcaatcggcacgaatgaccgtttcgagcgggcaaggagtgtctctacggtctcacgccagtcaatctgattatcattcatatgctacctttcgcatgaacatcatcaccattgcccgcaatgctaccatgcaagccgaagagagcgaatgtttcatcattgcagatgacgtacactacagcgggtatatgtatatatctctctaatatctattttgtcatatctatgccattgcctgacatgtcctatgccagcttccatggaaaacgcatccgacaccccgtgctgtcgcgtcgagcgatgtactacagcagaaatatccgacattttcaccggtctgcacatcaggatttgcgacgctatcccattcctcacctacgaacaagacgaaccagccccctacagcgaacatatccgctcctcatctctgctcaaaacgtaattcgtccgggaagatcggggaatccccctgattcgtatcccacgacggcttgtgctgtggcgggaatccgttcccggattggccgggttcgccggcatccgcatcgcccgcatgcggttgcgcgcccccatggtccggggcacccgtacttggtgaggggcgttgtccggcggcgtccgcctccgttttcctttgcatcgactcgttgacccgtcgcatggcgtcggtgagcctttcggcggcctgttccagtgtggaggggttattgttctcgtgcgccgtgtgtcgggcgtggtcgagttcggctccgagatcgatgcgtggccgggcgtcgtcggtcctgtccgcggaatccttgtagagcgtgtcggcctgttcgatgacctggttcagtttctcccgcgcgtcggcgagctgcttgcgttcgcgtgaggctttggccttgccgacggcgtcgcgcaggtccttggtgcgggcctggatttggccgttcgttttttccatggacgtccgccggtggtcgagctggttcgtcgtcatgtccggatcgcaggcggccggcggttccgggagccggtatcgcgtgatcgcggcgaccagttccagggtcttgggatcctgcacatccccgtcgccgagtctcaggtatggttcggcctgttccaataccttgccccagtccgttcgtatcgtgtccgactgcttgattgcttgattgcatgacgtgagcgccgcctgatggtcccggatgctcatcatcgcagccagacccgcggccgacccgatgatgacggccaatgtaagcgtgatgccgatgatgcggacaagggggatgcgtcggcgtacggggacctcgtccgattccccgggcgccatttcctccggtgtgatggcgtcgtcggctgtctggccaccggtttccctgggtttcggggctgttgccggttcctcccgcctatgcgtgacgggcgtgtgtgtcttggtcttctcgtttcgcgtggctcgtgccggcctgtcgtcgagaacgggtgcgatgggccggaaccggcgtccgggtctcgttccggctggtggttccggcggcgctccggccgttcccgggtcctcgatggcgtgcgcggcccattggtcgagttccggccatgtgccgggatggtcgtggatctgggtaagaaggtcccagttgccggggtcgctcatgaggtcggaaagttcgtaaggatcgagcctgggattgatgcggcgcatgtttccttcttttccgtcggggtcagtgtatgtaggtgatgttgggattgttggcctgttccttggtgagggtcctgagccatgcgtacgggatgcctccgccggattcgctgatgacgatgctgccgttgtctttgatttcctcgacgatggcgacgtgcccgtagtcggtgcttgcgccgagatagcctttggtgaagctggccacgtcgccgagctgtatgtcgccgccggtcgggtatccgagtttccgggcgcttgacgcccacatccagccgtcacccatgtagccgtccactggtttgccgatctgcagtcggcgggcggccgcccaccatgtgcattggccggtcgcataggtggtgatcctgcccacgggcgtgccggtcgccgccacgtccacattcaacgtgccgggctgcatggccaacggcggcgcgagcttgccgatggttcgtcctgccgtggccgaacagccgcctcccatgtcgatcgccggtctgacgttgtcgaggtaccgtttggtgatgcttgggatatccgggtatttcatgaggttgccttcgccggcgttgtgggcgatgaccagtgccgtcagatcgtcgagcttggcgaatggcatgtccgggtgcgcggccttgagctgtttgacgccttccagacggtttttcaggtacatgccgccgtaatgggcgtggaccatggggtcggtgatgccttcgggtggtgtctggtcggcgccgtcgggatgtacgccgcgccatacgctcctgttcatctgcagcaggccccatgtgccgccgttgctgtcgtcggcgtacgcatccggccggaaacccgattcctgttccatgagcgccgcgatgaaatccgcgcccaacccgctcgaccgggccgcctcgcttacccagggcttcgcctcgtcagggacctcgatcacgccggcctcgcagcctccgccgtctccggcggcgacggtggggatgaaccacagcaacaggctgacgatcatcagcacggccaccgcgcccagcaggatcgggacgccgaccgtggccgacgccgctgcggtgatgccggccttcaccgccatcgccgtccgtgcgaccatccgtatggcctgccgtgcggcctgggtcgaggccttggcggcggatctggccctccggccgcccgatcgcgcggccttgccggaacgacgcgcgcgcctggcatgggccgagaccctcctccccgccgcgacgcgcgccatggtgccgcccgtcgcgctcttcctgcgcgggacgccgttcaggccttcgccgatccggccggcgactgccgtcggctgcggattgttttcttcgctgtcctcctcctgtgccggttgcgattcgagcacggaccatgccatatcgatgccgcgttccgcagcatcgatgggcgtcgtgccgttcggatgcggggcttcggggccaccgttgcggttcatggcccgtgggcgtttcggtccggccggcccgtgggcagaggagatcccgttgatgtgccgaacccgcagtccgggaatccttccgttcggccgtatgagattgcgcgtggcccggaatgagctgggggcgaggggtctcatgcgggtttccgatcctcgaatttcgtggtgtacagccggtagagcaggctgtcggtgtcgatgcgcccgtcgaatggtatgaacgcggtgccgcttttggccatgccctggccgggctgcacgccggtgaagaacgcccgctgctcgtcggacagcttcagcagttcgcacagggcgtcagcatccgtggcggtctggttcagcagcaggaggaagtcgctgttcgcgagcatcagcctcgcgtcctggttggccagcagctcctcgatgttctgcgtgatgccggtggggctcaagccccatttgcgggcgcgcttgtacaggcgcaggaagtattcggccgcgtaccggttcgagaacagcaggtggaactcgtccacccacagccaggtgcgccggccgagacgtcggttcctgacgacccggttccatatctggtccaagacgacgagcatgccgaacgtgcgcagctccgcccccagtccggagacgtcatagacgaggaaccggctggacgtgtccacgtcggtggcatgggagaaggcgttcaggctgccggtcgcgtagatctccaacgcgcgcgccgcgtcacggccccccggctcgcccagagcggcgaggcggtcgtgcagggtggcgagcgtgggcatgcccagttcgggatgctccctcacctcgcggtacatgccgatgaccgtgcggtcgatcaggctgcgctgcatgcggtcgatgccgtcctgtccgccgatcagcacgccgagcatgttcagcacgctcgcgcatttcgaccgtatcgggtcgccttcggaatcgtcttcatattcgatgtccagcgcgttgatgtgcgcgcgcgacgattccccaatctcgactcgttcgccgccgagaccgtcgcacaacggcgtgaactcatgctccgggtcgatgacgatcagatcgtcgtccggccgggtcagatagatctgggtgatctcgttcttcgccgcctggctcttgcccgacccggtcgtgcccaggatgaacccgttgccgttcatgcctttcgtgcggtcgatgaccacgggattgccggtgcgcgcgttcgctccatggaacacgcctcccggctcgaacagctcctgcgacgtgaacggcaccagaatcgccgcgctcgacgtggtcagcgtgcggcgcatcggcggcaggggattgcccaatggcagcacggcgttcaacccctccacctgcatgtaggccaaggtctcggccacgcacgactgcccatcgatcgcggccgtcacgtcacggaccgtctggtccagttgctcacgactgtccgccgacacgtccacgatcatgagggaatccaccagacggtcgccgttatgctccagatcatcgcgcagctcgcccgcctggctcatggattcctgaagatcatgaggcagcatgtcttcgggcagatgctgtttgcggttcttgcgccgctcgtcgatggcctgcatgtccatctcggcgatcgtccggttcacgagcttcagcccctcggccttgccccgcggggacagatggatgccgactgtgatatccgccttgatgtccgtgatggacgacaccagctggtcgctcaggtaatccgggaaatcccgcaccagaagacactggtgccatacttccgtggtgcccgagctcaaccggagccgccggcggtccgacacgtccacggcgaacggggccacgtaatccttcgtggacatgccatgcgatttcaggaagccgtcctcgtcgaacatgaaccgcgtgccgcgacgcagcatcccgtgcagcacctccagccgggaccggcggtccaggcgcacgccgacgcagccgcccaccgaccgcagttgcgccgtggcacgcagcacggcgcggttcagcagcgtgaccgcacgttccccgtcccgctcgcgcagcgtcagcgtcagatacttgtccgtcaccgcgccctgcgaacggccggcgagacgccggcgcacattgcggttgaagtccccgcgcaacccatccagcatgtcgccccgtaggggcatggcgatgctgcgcgtcacctcctcgggatccagcatgcgtgtggcgaccgtgatctggacacccatgttctcgccgaccgagttcaggaaacgtccccaccggtccacgacgtccagctgctggtcctgggtcgcgacctgatagttgatgtcgctgatccgcagcgacacgctccaccggtcgccgcccagatacgcgatcccgttggacagcatcgaatcatagccaagcagctccttcgacgaacgaggtatgcgacgattcccggagcgccggtttccggcctttccatgtcgcttgtcgttgcctttgaccgctttgctgccgttgatgtcagacatgacgacgtgccttccttcctccgattcgtctacgggtcttctccttcaacgacggtttgccggggaatctcgcgggaacatggggttcgagcggatacaccttcgggccgaaacgttggcgcagcatgtatcccagataccgttccggcttcagtcccttcggacgccaccagccccacagcgcgaacggcagacacaccacgaacagcagatacgagcctaggtccgtcagccccaacgaccagaacaacgccgcctccccgccgcccaggacgagcatgcacgcggcggccgccagttgacgccagcccagcccccacatcaccttcgcctcgacattggcgatctccttatacacgcgcatctgcaacatgaaagaatcctttccgattggccccggttccgatgcggctattcgccgcctgctatggcgcggctgacacgctggctcaccgcgatcacgaagaacagcaggatgcccgccatcatgagattgccgaaattgcccgtcacccacgacaccatgcccttgtccgcggaatccgggatcctcacggcatcgaccacgatccgctgatagaacaccagacagacgaacacgcacaccgcattcaccgacgtacgcgcatacgacttgaagaaacccacgccgatcggcttggtatcctcatgcaccagaaacgcgaacggcaacgactgaaacgccgtcaacgcatacaactcgatgaaccgcacatacagcaccaccgtgaacaccaccgacgccaactgggacaacaaccacgggatcaccagcagaaagaacaacgccgcctgccccatcacacctgcatcacggatctggtcgcgcatcagatcgcccaactggccaccctcgcccgccacctcaaaggacatctgcgaggacacgccctgcataaggaactgcgtgacccggttgaacatgccgatgaacagaccggcgttccgcacggcgatgaacaccaacgcgatcctgaacatggttcccgccacgatcttcacgcccagatcacggtccgcctcgatacgagtcgagttgcgcgccagctccaacgtgaacatgaccgcgagcaccaccgacgtcaaaggcttgaccgccacctcatgcacgctcaccgccaactggtaaagggcgggattccacgtctccggcgcctgggacaacaatccggccgtgaccgaaccggcaccgccgccgccgatcatgttgagcatcgccacgatgaagtcctccacaacacgcccccgaaccgactcaacccaacgcgaccgcgttgaagacctgcgcggccgcgatgatcatgcccccgcccacgatctgccacaaccccgactgcgtctgcggcccgttatgatccttcaaaccaccaccgaacgtgaccgcaccccacaccagccacaggccaccaccgatcgtggcgaacctgacgaacaactgaagcacctgattcaacaaatccacgacagacctcctctgacgacgatcaaggagcccgacaggcaacggcctccgttgacacccatcgtcagggaaaaccggtatgataacggcggacaaccatatctgccactgcagagacagcggacagaatgtcatctaaagatgacaatcgagcgggaaacaggaaccgctcaacttgagagctgcaatactgaaaatgtatgtttgcggaaatcgcttctttctatactatatcccgcgtcgaaacgggtggtcctatctatcgtcatttcctaatgaacactaaggactaactatgaaaacccttaaagcaacactctctgcattcttgagtttgtcattttttattgcggctccgggaatcgcattcgccgccgacgcccctccgcgtcctgatatccctaccgattctcgctatgcgaaagtgtatcaggaggatcaggaaacgattgctgaaatcaatcgcaacctaccgcatcttcttgctgaaggtcaagaagctgcacaacacgatgcaaaagccggagaaccagttccacttgctaacagtcttggaacatatggagacatcctagtaagcactcttatagattctggcagtatcgcttttgtcgggcacgccgcaatagtctcttcctcaaatgtgacgacaattgagtcttacgagaagatttttagccctaccaagataggaggcgttcaaagatatcatcaatgattggggttataagagaggagcttttcttgtaaggccttacggagcatcttctattcagttctccaatgcggccgcatatgcagctagacaggttgggaaaccctacagttgggatttcttcaataaatatagaactgatcaattttattgcagccaactggtgtggagggcatggctcagcgtcgggattgacactgaaacaggctccatccccaatggtgtcgtagcgccagcggatcttgtcaattcctcaaacacctatgtggtgaagagagtgtaagtgcataatattttccccatcctcgttttgcatgagggtggggatgactcacgatgaggtaataaaatgagaaatagaagacgcatcgtggcgatggcaatgagtattctcttggtgacactattggctacgtatttgttattgtgctttctacctgtcagctcgcatgagaaatccgacctatctgcagcttataaaattgtatattcggacatgttttcgtcaaataaaggtggaatactcacgattgatgagcaaggcagcattattcatgacgagcctctgggggacttgcagaatgcggctgaatattcatacaaagacggtatttttattgcgggagggcgtcgccataacactcatttgattattgggaaaaatagtaaatccaaactcattcatcttctttcggatcccaattactccggagttatgtcgattgaacctcataacggtggggtttctgcagtaatgaatggaaatgattctcctgaagatgattcatatctcaatctattagtcattgaagattccaacggcaaagtgttggagaagcgtatactgaaaatatataccgaggatcaagtctctacagatgagaatatgttcatcgtcggtcacgaacttacgctgagttccaatcgatatcagggtaaaataatcagatatgacttctcgacggggggtattaccgagaaggtaacagacgataatttactttataatcaactggtcttatggaataaacaacttctagttgttggtactgatcttaatgggttaccagagcagatagatatgtttgacgccagtaccttagagagggtggcaagcatacgattggagtcagactttcattctctcatttctgtaaagggatggccgtggattattggttccacacaagcatgtcccatttctgataattcatatgatattgaccgcgccaaatgtcttgatattccaactataaaagacacccaggatgtcactcaggctatttcctcccaaaacaaagctttcattctcatcagggataaaaccatatcagaggagaatgggattaaagccattgggaacatcttggcaatagataccaaaacaggagataccgtcctcgcgcctgttcatattccttccaacagaagtactgacagtattctcttcttgccgtatccccttcggtgaacagtatgcgtatgacaagaactgtgcttataaaatgatgtgactctgtgtctaaaaaagttgcatagcgaatatgtcttcgtggagcgtccaccattatgcatcatctcctgtctgggacatgtttgatttgccggttgtgagtaattttctacgccgtcaataccgcgagcatgtcttctcgggtctctctgcagtaagactctttactgcagtttgcggagagggtgtcatggccacgctcaatgagatctcagaacgggtcggagtgttgcagaatacggtgtcgagtttgttggacaacccgttggtctccgccatgaagaaaacgcggcggcgtgtgctgtgcacatgcgggtggataggatatcacaacatgttccatctttcgattgaggtattggatgctcgcccttccgcagaagaactgcaaaacacatattttgctaatctgtggaaaactactttataaaagtcacttaaatgcaattagattcattcctcgaacggaattctgggatacagtaacgttgtagaacgtttcttgcgtgcgtcacggatgaacggtaattcgaacggtttgtttttattaaagaagatgttaatcattcaacaggtataaaagtggggctgcactcgtgaacgagtgcagccccacaaatttccgccggggagagaagaaggaagagaaccggcggggttccggccggattggcatccggccggaagaatcatcgcggcggagaacggtccctgccgcttcggtcagaccacggattgcccgccgggaaccgaatccgcggtttcgacggcatccgcgtcggcatcctcggcatcgacgggttgcgtcgtgccggagtggcggccggcggcgttgttcccgcgcctgaacctgcgggcggcgaccagtcccacgccggcggcgagcagggtgattgccgctgcgatcacgccctggatggcggtgccggtgtgggcgagcccggtccggtaaccgttccagtcatcggtgttgctgaccacctcggtgtcggggcagacgagcatgccgtcgatcgtgaccgcgttatcgggcgtggacgtctcgtccttgccgtcgaacggatccgggtcggagacgacgcattcgaccagcggggtgccggtgaccgtgacacggtcggtgtgatggtcggtcacgcccttgaggacgcccctgacctcgatgctctcgccgggcttgaggatatgggtgtcccagtcggcggggtattcgaggtcggtgacttggccgtcgccggcgaccagttggtccttgaggttcaggtccttggttcggtaccatgcgccctgcttggtgtcggggtcggtggtgctggtgttggtgatggtgaacacgatgcgcgtgtcgccctgcatggccaatgcgtccttgacctggtcgcggtcgccggtcggccagccggaggcctcgtcccatttctcgatcttcaggctcggggtcatgtcgggcgtgtgcgtctcgacctggttggacgggcggctggtgccgttgagtgtttcgtcgaaccggttggcgatgtgttcgccggtcttgacgcgcttgcactggatgaacgcggtccatgcctgctcgttttcgtcgttgccgctgacgaggtcgagcatgcgttgggtcgccgtgacggtgaccacgcccttgtcatcctgggcgagggtgaacagttcgccgccgtacataccggcgtcgaagccgctgccggcgatcttcacgcccctgcgggcgatcaccttgccctgttcggtcaggtcgcgcatggcgtacacggcccattggccggtgtactgatcatgttcggtgtcgagcgggtcggtgatgctccagtcggtgaccttctggtaggcgcggtgcgcgggcagcacggagctgtcgagacggtagaggaacagactgttgaggtacacgctgtgcttgtcgatggattcgccgtccaccttcacgaccacgtccttggaggggttgacgggtttgagggggttggcgacttcgttggtgtccttgcgggtgtcgttgacgacctgcgtggctttgttcttcacgatatgtccgtcggtgaccttgatgacggtcatcggcaggctcacctcgtagctcgtacccagcatcgactggtcgatggccggctccttcaacgggtcgtgggttttcttttcggcgtattccttgaggttcctgggctgggggtcgcccttgatgatctcgccggtggccggcactttcgtgtccgcggtcctggcgtacacgtaggcgacgccgtcgatcgccgcgatgttgaacttcgcggtcacgtccttgccggtagcggtgtcggtgacctcgatgtgcttggcgtcgagggagaggtattcgtcgtcccagtcgtcggtcatgccgagtctccagaccttgtaggcctggttggtctgcttggcgtcgatggtcacgcggtagtagattcggtcgcccagcagcgcggtcttgccgtcgatgctgatggacgggtcggcctgggtgtccttcttcacgggagtgaagtcgggcggctcgttccataccttgttgctcggggtgatcatgttgttcagggtcagggcccactggttgccgattttggtgtccgtgggcgcgtccttggcgaccgtgccctcgaagcggacgatgatgcgcgggttcgccccgttgcgccagttggtcttcacgtacccgtcggagaacacgaggcgcaccgcgtgctgcgcgtcgttccactgggtctcatactcggtcttcgggatgaacctgccggtggacaggtcggtgacctccagggtctgcttgtccacttcaagatgctcgtcgtaggtgtcggtgaccgccacctcgccgaccgggtacgcgagattgccgggcaggtggggctgggtctccagacggtattccacgcgctggcccgggtagacgaccttgccgtccacggacgcctggtcgcctccctgcgaggattcgccgaccacgtccttgacgacgggcggtatgtagccgcagatcttcggctcgttcgtggggatggtgtgcgtgttgacgctctgggatcccttgttcgtcagcgccttgccgtccggcgcggtgcagaacgacagttcgtcgctcgactgcttgccgaagtcgtcgcgcacctggcccgtgcccttgccgttggcgtaggccgccttgcccgggatgagcagcgtgacctgcttcgcggtcttcagccccttcaatccctcgcggtaggtctggcctgcggtggcggtcaccgtggtgccttccatcgtgatcgtccactggtcggtgacgtccctgccgtggttggcgatgtcggtgacgctggactcgcgatcggtgccggcgtcggcctcgtacactctgatcttcgacttgtcgtcggcgtcgaacaggtagtcggctgccgaccagtcgtccgtgagcgtcagggtctccggggcctggatgaggttcttggcgatggtgccgttgactaccgaggcgacccggtccccgtccagaagcgtcatatcgtcggcgccggtccggttggtctccttcgggtcgatgaccgcctcccactggcccttcgcgttcaggcggatccagctcttgtcaggattcggccgccacgtatcgaactgtttctttccggcgtcggcctcgggctcgtggttccactggccccacgcatggtctttgacctgctggaagtcggagggcttcgacacggtcacgtcgaagctgaactcgtagacatggtccatgggcatctcgcccttgtccgccgaacgagcggccgacactgtgttcgacgccttgtcccaagtgatttcgaactcgccggaaacgtcgcgattgtcgtcggtcctgtcgatgagcctgtagttgtccacggagtattcgacgccgttgggttcgatcacgtcgcggaaacgcatctcgtagccgccgcggccggtgccgtatgtgatggtggtgcggttcgtcatccggtcggcgctcacgccgtcctcgatcttcttgaccgggggctcgggcggcaccgagctcaccttccaggattcggccgggtcacggtccgcggtgtccacggccgcctgcatgcggccctgcttgggcacctggatgtcgatccagtacgagccctcggcccagtatttcatgccgaaatccttcggcgaggcgagatcgtcgagctgagtgtccccattgctggagaagctgatcggcttgctcacgctcttcgcgggcaggtaggggccgttctcgtaatggatgatcgcggtgccgttcaacgtctccttgatcgcggaaccgccgttgtcggcgtggatgacgtcgccgaccgggtcggtggagccgacctgcatgtcggtcttctgcttgtggctggtggtcacgttcagcttgtaatcgaccggcggctggttctgcgccagcacaatcacgcggaacgaggcgttcgggttggagttgatcgactcctgcgccagagagtcaacgctgcgtgtgccgagcttgtccttccacgtggtcgaggtcgagtacttctgcccctgatacgtgtagtcgcccttcgcctcggccctccactgcgcctcccaacgattcttcgcattcgaactcacatagctgccattgaacaagccgttcccgagccgggcgtatccgacggccaccatacgacagtccgcgtttccctcacccgtataggagcgccggcactcatcgatcgcgtcgctcaaggtcttgttcatgtccacgtactcgttcgcgccatcagacaggtccgacgacagcgtgacgtttgcgtcgcgcagcgctgacttcatgccatccagcgtggccggccatgaatccttgtagatccaatgcacgtcggcggtctgagaaggaccgccatggtcgcctccgcctccctcgccggaaccgccaccgccgttatcggccaacgcaaccggaaccagacatgtcagcaacgccgcggctgccgtgattgacgccaccgcgccgatacccttcttcccgaacctcatacgaaatcctttcccacatgcaatcacaagcccctctccgggaaagggaggagacggggactccagaacccgcctcctcccgggtccctggaagaaaagcacgcccgcaagcccgacggccggccgccggaccccgaacgcaccatcagcatcaccccgcgtcgggttcctctgcggcggacaaacgttgcctcggtcgaaccacctcatcgtggatcggggctgttgtgtcgctccggttatgatctgattacgaaacgcggtggtatgcacacaggttacgctgtataatagtcatgtatttcaattaaaaattgattattgtgagttttagagaatggcaatgtgatgattcgtttgaaaagacttgttctggatgacatgaggaacatatcgcatggcgtcttggatttcgatgatctgcccaccggcggcagcgtcacgggtatttacgggcagaacgggtcgggcaagaccaccgtcatcgacgccatcgggatactgcgcgcgctgttgtccgggaatatgctgccggataccgccggtgatgtcgtcagcgccagcgccggttcggcgaccgtgacggcgacgttcctcattggagataagcagaagccgagctatcttgagtacagggtgtccatgcgcaaggcgaatccggattcgacgcgggcgcgcgtcgtcgccgaatcggtgcgtatcggcgacgatccctcgcgtttgggccgtgaggtgctggggcatcgtatggaggattccgaggcggacgggttcgtgtcgaccccggtctacgtgtggcgttccatcgaggcggtcagttcggtgaagaccgtggtctcgcgcaccgcggaccgcgcgtacatggaagggcgttcgttcctgttctcccggtgcgccacgctcgacgaccggccggacgccgagttcctgatcgactgggcggtggcccgtgtgcgggagacgaatggcgtgtcctccaggtcgttgacgtatatcaacgagcgtttcggcgagttcgtccgcctgcgcgagacgctgtgcggttacgcgaccaacgacatcttcgtgtccaccacccgtcgtggctcctacgccgcgttcgcgatcatcccgatcatggaggagaacccggaaggccgcaacacggaattcccgttcgacctgctgcagcccaatccactgacccccggccaggcgaagcggctcggacagaccgtggagtccttcgaccgcatcctgcccaccatcgtgcccggcctgcacgtcctgctgaagaccggcaccgcgccttccggcaaggacggcgaggaccgggtcaccgcggaactgttctcgcgccgcggcgacgtcatggtgcccttccgctgcgagagcgagggcatcatacgcatcaccgcgctgctcggctacctcaagcacgcgtacaacgacgagaacgcgctggtcgccgtggacgagttcgactccggcgtgttcgaactgctgctcggcgacatgctggaccagttggcggacgggtgcgcggggcaattggtgttcaccgcccacaacctgcgtgcgttggaggtgttgccgaacagctgcattcgcacgacggtgaccgatcccgacaaccggttcgcgaccatcccccgtaagtcctccacgaacaaccagcgcaaacggtacctgacagccagcgagctcggatggaacggccccgacatctatgattcgcccataccgcgcatgttcggcaacagcctctacgccgccggccaccccgacgaggacgacgacatcgacgacgatctggcagcactcaatgccgccgggacggaggcggaccgtggctaaacgcaagatcgtcctgctggtcgtggagggcacgagcgacgccagcctgctcgtgccggcgttctcggcgttgatcgagaaccgcctgttccaaggtcaggaattccattgcgacgtgctgaccgcgccgaaccaccgcgaggaattccatcggcgcaacgggttctaccccgcggacaaaccctcgcaaacggtgcgcgaactcgttgagtattatctcaaggaccatgatcgcacatggggccagctcggccatgtcatccagatctgcgatctggacggtgcgttcgcgcctgacgacagcgtgcgggagaacccgtcagcggaagaaaccctgtattcgacgaccgacatcgtcaccacgaaccgcgacgctctgatcgcggaccggacgaccaagcgaaacggcgtgggctccctgctcaaactcgacggattcaggaagaagcagggcggtcgcaccgtcttgattccataccgtctgttctatgtcagccgcaacctcgaacacgcgttccgcggcaggaccgacaacctggacgcgcagcacaagcagagcggcgccatcaaactggccgaccgcttcacacgggacccgaacctgttctcgacgactctccaatccctgcgacgcatacacggcaacccggccacttgggaggaatcctggcgatacgccatgcaggacttccactcactcgaacgcggcagcaacctcgccttcgtggaaccatacctggcaggcgaactgcaataggtcatccgtagctggatagcctggagtcgcattagcaatcctaggaccatccggctgcggacacgaattatggttaagaatatggacttagagtatttgtaacataacgcagaggtcgtctataacattgtatttcgcatctatttcagtttcgacaaatgcgggcatgatgtagataatgaggactatatggaacgcggattcgcagtcgataagacattgtcgatgaattgcagatgattacgtacaaggaagtatacaatatgataatacatgaaaaacatatctccgcaccttataaaagtccgctatatcgcaataatgaatatcatatttcggttggtaatcagggaatcgacctagatagtatatataatgacaacaaggttgaaaacgctgaatttttacgatggcttggatatgagtctttctggcttattattggaataatattatcctctatttcggccatagcccgtcattataaggaattatctttaaatgagttggcagaaaaatcttcttgggataagacggaatctatactaaaagctttcccctgttttgcagaagatgcaggcctgtctattatcctcgctttattggcgatagttgcgggtctttccgtgggtatcgcagttgaggatctttcaaaaaatcatatgtttagattcagatctatgggtagaacgctcatacgattcagtaatctttccgtctgctttctcggcctgtcatccgctagtctgattctccggtatgggaaaggacttggtgttcttcttatttttggtttattgttttgtttcactatgctttacggcataggcgatatatctgtgaattatcgtactcgattgaaggaattatccaatagattgcacgaagcggaaaaagagctatgcaatgtcgccaataggaaaagaaagcgctatgtgtttcgcagtgtaggaagatggaataggactcttaatagtatcggattgtcgtttgtgattctggtctatgtttgctcatccgtgcatcagcataagttattgttggccaatttggtgatttcttttacattggttgttttttactggttgtcagtttacgttctaggaagcatcctttatgattcaataaaggtgtttgaaggattgacgaaagaaattcgtccactaaaaatactttatcgtattgcattgtcagttttctcatttaccgcatcaatgtatttgagtatgatttttattcttacgtctcatcaatgcctgttttatgtaagctgtgttttattgtttatcctattgctttatatctgctacttttctttatcgtcaaaaaataggcggttcctgtttattgaaacaagaaccgcaaaactaaagaaaaacgtcagtttaactcggcgacttattggcctaatgcaatctgaggaacaattggtttaattgggttaattttctatatttatcaaagtgattatcgtccgggtcatgtatatttttttaacgttttaatgacgcagatagcgaaagcgccaatgatagcgatggcggcgaggattgccagtcgcgtttcacggcgttccctggccgccatgtcggcctgccggttggccagggcctcggcttcggcggcgacgccgctggcggcgatggccgcgatgtgcgcgctcatctggtcttcgagcgtggaatcctcgctcgtgccatcgaagggcgcttcgtcttcgttgtggttgtcgttcatggttctgctccgttcctgattgttggattgtttgttttcctgattgttggcttgcttgattgcttgcatgtccgattgcctgcatgcaatcaagtttgattgtttgattatctgcatgcgggcttgtctgcttgtcagctttcggcttgtccggcgaggatggacatgcgggcggcgatgagcgcgtgacgtgcgatcgccagatagagctggtggccctcgccgtcgccccagaaccggtcgaaccgttcggtcggcatcatggtggcgggatcgaacccgttccacacgccgccgcagaacaccttcgccgccgcgttcacctcctcgtcggacggcatgcccggatgcccctccgcagcgttcgcagccgcgcgcatctgcgcaccgaacacacgggcctgcaacggcgaaagcgtgtatgccagacccgccgtggaacccgcgggaaatcccgtgctcacgccgagggtgatgacgtgcgcctcctcgccgatgctgatccggtcgccgagcgcggagacctccatcgaatagtccatagtggctcctttccgcagacgcggcgcgtctcatggaatcgtgtctgcaggttgattgcttgaatgcttggtcgttgagttgtttgcttgctggattgcttgattgcttgattgtccgacggattacggctcgtcgtcgccgccgagccggtcgagctcgcgctcgatagcggcgcgcaggagctgctgcatgggcaggtcgtgcgcggcggccgtggtcttgagccgggtcttgagcgacacgggtatgcgcaatgaaagcatgaccaacggttcgcccgcggtcttggaggtcttgttctgttggcgcagcacgtcatcgaatggtaccggtcgtgccagcggctgataattgccctgcatggtctcctgctttccggcgatctgctggagttcggtgacgaggtcgcggtatttgcccagctggtgcgggttggtgccgagcgaacgcttgtaggactgggccttcggcacgatcgtgtcgaaccggggcgtgtccatggcgttgagggcgtccatggtgtcgtggaacgccttcgtgctgcgttcggccttgaccagcagcagcgcggcgggcgtactcatcctggccatgtcgagggtgctccatgcctgctggagatccatgggcgagtccgatgccggcacgatcacgaagtcggccgccttgatggccatgtccagggtcggcccctgcggcggcgcgtcgatgatcgcccattcgtccggatccgatcccgcggcgagctggcggagcgtggcctggttggcgggcagcacgtcgaacgtcagcgggcccgcggtctgttcggcggcggaagcccacaggctcgcgctggactgcggatccgcgtcgtacacgacggctctgcctcccctggacacgatgaccgaggcgatgtagatgctggacgtggtcttcgcgaccccacccttggcgttggctatggcgatgcgcattcgttcttctcctttgcgattgcctgtaaccatgcaagcctgattgtctgcttgcctggttgtttggattactgcttgtttgattgtctgattgtccgacgtggtcatgtggggcgtgatggttggcccgtccggcgtgcgcgaagacgccgttgctggcgttcggcgctggcctcgccggtggcctcgtcgaacacgttcaggtgggagcggatccagtccgtgagcagccgccagcgctgtggccacggcaggctgcggtcccggcaggggacgccgtcggcttcggccatgcgcgcgatcctgcgccggtcggtgcacaccttgcctccgtacacgccccattcgagtccgccgctggcggcgtaggccaggcattcggcgcgtaccgggcactgttcgcacacggccttggcgaccgaatggaacgccttcgcgtcgtcgggccggtgctcgaactccaacgaccacaggtagtcggaccacggctgcgggaagtcgcggcattcgccggccttcttccattcttcgagacgattcccgtccccgctcatgaccgtaccgcctcagccggtgcggcggttttggtcctgctccgccctgcgacgtcgtgggtggcgtggttgcgtttgtcgtacgcgcataccgggcacgcctcctgcggaacggcgccctcgatgtgctcctggcatagcgaggtgcgcagcagcgccgccccgtagatcggcacgcggcttgcggacgatgagctgaccggtatcgcccggttgggatccttgacgaccggcagcggagtgtcgggtgcccgtttgcccgtcgggtcgggatgggtgagcatctccagccgcagctgcacgtagttcgcggcgaacctggcaccgctggcgagccggggcagccagtagcggttgcggtacgcccagtccatcgtcgcgacgacctcgccgtacggtcggtcgatcagcagcgagtgaacggccttgcggtcggccatggtcgccggcacgtcgaacctctggtccacggcgagcatacgtcggcggatgccgtcgagcacgcgcacctcctggtcggcgcgttccgtgaccggttcgggcagcttgcccgggtcgggcacccacagcgggttcctgcaaccccttggaggcaatgccttgccccaatcggtcgtcggagcggtttcgggattcgggccggcagccggctgtgcgctggcttgttcgtcgttgaggggagcatccccgaaggggatgaggggagaattgtttatcacttgtctattgggtgactttctgtccaagattccgggacaatttgtccgcggtcccatgcccttcggctcgggtgacgatccgtcgggtgacaaattgtcctcgtctgcttcgggattgttttcgcgatcggccagcgcgtccaggttccggggcctctcctcgatgttctcgacggggcggtcgccatccatgatgacatcccacacgcgcgaacggtgccccttggcgatcggcttgcgggtgcgcgggttgcgcgccgacatctcctgatcgcccggcctgatatagcccttgcgctccagctcctgcaacgaacggatcacggtgcgctcacagcacccgcagttgaacgcgatggtcttcacgctcggccacgcggcggccccatcgtcgtagtaggcgcggcgggccaaatacaccagcacgaacttggtgatgcccttgacgtcgtcgcgctcccatgcccagttctctgctctgctgctcatcgatcgacctccccgtcgtcatgcgacggatccgcttcacggcgttcacgcagcctctcgccgatgtcgtcgctcaaacgggccgcgcggcaaagagcgtacgagagaacgccgccggatacgtacacggcgactgcgaccaaccaccacatggttcggccggtatcagggaaacggtcctcggacgcgcgcctcaacggcgcgagccccgggacggatgggcgagcatggacagcacatgcgccttcgcgatgcgcagatcgacgttcccgccggcccgtgctgtccgccgcgctgcgccgcgcgtacggataggctcgaaatcatatgccggacgagcgccggcgatattggtagaatcggtcatggtgatgaccctccttaggggaatcggaacggcgggcgtctgatcttggcggatatgcgcgcccgcatgctccatggttgttgccgttcaatccccgcgccgggttccagccggttcggggattctcgtttcgggtttccacccgccgtccgtgagataggcgtcgatgccgagcacgtaccccggggacaggtttcggtgaatggccagccagaccaggtcggactgctgccacggtatggagccgttgaccttcccggcgaccgaggatttggatttgcccatctccctcgcgagggcgcggcagctcagacccgccgccaacatgtagcgacgcatcggagaatccattattcctgctttcagtccattcacgatagacaatatatcaaggaacttgcgtcgaagcaaatcgctgttgtaggattatgtccatcgatattagacgactgcaatatggaggaacttgatatgacgaatgtcgaatcatcgcccgagatcaatggactcggcgactacatgcagaaggtgttcatctggaacgtcaacatgcagctgaccggacgtgggatgaaccagcaggccctgtgcgctccgttggggctgaagaagggtgcggtgtccgcgaagatgacgggcaagaccacctggaccattcaggacatcgccgcggtggcggagttcctcaacgtctcgcccctttatcttctggatgcgacgatgtacgagcagatgatgcgcggaatgagcggcgacggaggtgcatctttggtggcagtggccaccgccgggtttcctgtgcgcccgtctgaaggccaagctgacggcctgaaaccgttggaaacaaaaggctccgggccacgatacctcgtggaaaccggagccggtgggtacccccagagagagtcgaactctcgttgtcagattgaaagtctggtgtcctaaccgttagacgatgggggcgaacaactcgaattactttacgggaggttgttcggttatgcaaatcgacggcatttcggcgtgtcgcaatcagttcagggtaacggcctgataggtgaagtcatgaatcacgcggccggcggccaggcccttcttctcgaagttggtgagcacgcggccctcgaatcgctcggattcggtgaagtcggcgtgcggcatatcggcggccatgtcggcattgcccttgcccacgtgctccagcggcaggctgacggttacgctgcccaggttcttccagccatcgaggccgtccatcacctcgtgcacgtgcagggcatagtcctcgatgtcggtggcgatacgccagacgccgtctgtgaccagcgcgcgatgaatgtcgccggccatggccttctgcacgatgcggcgcttgtggtgcttcttcttgggccaagggtcggggaagaaggtccatacctcggccacggtgccggccgcggtcaccttgaacagctcgggcgcattgacctgggccacgcgaatgttggtcagcccctgcttgccggcgagcagcagcgtgtgggccacgccggggtcatagacctctagagcaaggaagttcgtctccgggtgggctgcggctgctgccactacgttttctccctgcccggtgccgatttccacaatgagcggattatcgttgccccatgcggactccacgaacgcgcggtcgagcgtgacgccttcgcgcacgtccagcaggttgccggccgcaatatccaacagatatgtgccggcatagttgtcccatgcgcgctgcaggcgatcgtccaaacgtccggagcggcgtacgaaggagagcaccttgtgcagggggtgcgccggtgcctcggtgtggtctgtgcccatcgcggcgacgggatcgattgctgtggattcgggattggtcatatattcctcggattttccttgtgcgccgcaccgctgttcattcattaggtcgatttggcgttcattaggtaggtggtgtgcgataccaaccaccatatcaagccgtttacccggtgtccgtgcgggccggctccgggccgacctacctaatgaacgccaaatcgacctaatgaatgcagatattgccggacgacaccaccgttttgtgcgattatgttcgtgtgatatactcaaattgtttcaaaaggtaacaaagcggaccaaaagtgaacagccgctgaactccccacggccgacacttgcaacccgcacaaggaaaggtcaactatgacagttctcgtcaccggcggctgcggctacatcggcgctcatgtcgttcacgcactccatcaggccggcgaaaaggtcgttgtcgtcgacgatctgagctacggcaagcccactcgcatcgaaggttcccgcctgtacggcatggatatcgccgccccgggcgccggtgagcgtttggccgaaatcctcgatgccgaaggcgtcgactccgtgatccactttgccgctcgcaagcaggtcggcgaatccgtggagaagccgctgtggtactaccagcagaacatcaacggcatgctcaacgtgctcaccggcatgacccagtccaagaacgccaagaagctcgtcttctcctcttccgccgccacctatggtgtgccgccggtcgatgtggtgcctgaggacgtcgtcccgatgctgccgatcaacccctacggccagaccaagctgttcggcgagtggatggcacgcgcctgcgagcagccgttcggcatccgcttctgcgcgctgcgctacttcaacgtggccggctgcggtccggtggagcttgaggatccggccatcctgaacctcatcccgatgctgttcaatcgcctcaagcagggcaaggctcccgccatcttcggcgacgactacccgactccggacggcacctgcgtgcgcgactacatccacgtctccgacttggccgacgcccacatcgccgccctcaagtacctcgaccgtgacgagcgcaagtacgacgccttcaacgtcggcaccggcgaaggcacctccgtgcgccagatcgtcgacgaagtcaagaaggtcaccggtctgccgttcaccgaggctgtcatggcccgccgcgccggcgacccgccgcacctgatcggctccccgaagcgcatcaacgaggagatgggctggcatgccaagtacgacgtggaagacatcgtcaagtccgcgtgggatgcctggcaggccaaccccgaacaccacatcgacgtcgacacctggaagcaggctgactgagattgacggtcactttgcggtggatgccgcgaagcgtttccgtccataagggcgtggccggggttccggtcgcgcccttcgtcgttttgtggatgtttgtgacagacgtgttcgcgtgctggtgatagcaaaaaccttgaaattatgcggaacacgccgaagtttgcatgactggcgaatttcagtaatatatacatctgttgcctcacgcaagtgagaacaatggccccgtagctcagttggttagagcgccgccctgtcacggcggaggtcaccggttcaagtccggccggggtcgctggaatggttatgaagcccggattatccgggtttttgactgttcatggctctgtagctcagttggtagagcgagcgactgaaaatcgctaggtcaacggatcgacgccgttcggagccaccataatgaagccccgccttgtgcggggcttttgcatatccgtcgcgtacctactccggcgggggttataggccaaaatggcgggctggccggtcaatgcaaaggctcgcgttcgccaacaactgtcttcctcgccgcaactacgcacgccaacagcaccaatgcgaacatcgatccgaacagcaacccggtcttaagactgtcgccattggcagaggccaccagtcccactacggcagggccgccggcgcatccgaggtcgccggccacggctagtagcgcgaacatcagcgtaccgccaccgggcatggcgtctgcagccatcgagaacgttccgggccacataatacccactgaaaaaccggtgagcgcacaggcaagcagacccagtaccggtgccgtggttagggctgcggtcagatacatggccacgcacagtacggaactgctggcaatgaatgccgtgagattcagtcgatgccccagcactccgtaaatcgtgcgggacaggcccatcatcagggcgaatgcggcaggtcccgccaagtcgccaatcaccttggtcacgcccagaccggactcggcgaacgcgctggcccactggctcatgccctgttcggccgcgcccgcgcacagcatcataaggaacatcaggtagaacaccggcttcttcgacaagtcggcgaaccgcatggtcgccgtgccttccggcacaatgcgcggcatgggagcgccagcgaacatcgcgatgccgatggcaggcacaatcgcccacaagcaagcgagaaccggccatgagccggtgccgaacgcaaacagaaacagcgtggagatggccacggtgccgagctggccccagcagtagaaggagtgcagcaggctcatcgccttggccttgtgttcgctcgggcaggcctcgacgatgggggagaccatgacctcgatgagtccgccgccgagcgcgtagaggaaaatcgccgccagaatcgcgagatacgggtccggcacgcgggtggggagcaagcccaacgccagcagtccggcaagggcggccaggtgggcggcgataatgcacggcttgtatccgatgcggtccacgaacttgccggccagcacgtccacgaccagttgggtgacgaagttgacggtgatgagggcggaaagccgcgccatgtcgatgccgagtgtcgccgcgaacgtgacgaacagcaacggcatgaagttattgattaccgcctgagtgatgtatcccacgaagcaggcggtgacagtgtggttgtagttcggggctgtggcgctcatagagtcagtattgcagaaaaagcacccgcgaaatgcgcgtgcgaagagaatcgtgtgggacggcagatgaacaatggtaaaaaccgcgtgccgtcccacaaaaaggaatcaggcctgccaccattggcgcagggggtaccacttgccgtccgggtgggccacgcgatccggcttgacggccaagaactggtgaatctggatgccgtcgagctcgaagttcagagcgcaggcggccatgtacataccccataccttggcgcgttcaaagccgacctgcttgaccgcgtcgtcccaatgctcggagaggttctggttccagtgatgcagggtgagcgcgtagtgctggcgcaggttctcctgatgcaccacgttgaagccggcgtcatggatgcacgattcgatgaagccgggcgcgccgagatcaccgtccgggaagatgtaacggtcgaggaattcgtcggtaccgggcttgccgtggggcttgtcgtggctgatggtgatctggtggttcagcagtcggcccatcggcttcagaaggcggaacatctcttcgaagtagctctggtagttcttgacgcctacgtgctccatcatgccgatcgagcagataccgtcgaagtcgtgctcaggcacctcgcggtagtcctgcacacgcacttcggccagatcctgcagcccttcacgggcgatccattcgttggcgtacgcggcctgttccttggaaagggtgacgccgagcgccttgatgccgcgacgggcggcggtgatgaccatcgaaccccagccgcagccgatgtccagtaagcgctggccgggctgcaagtccagtttgtcgagaatcaggcgcagtttgttggcctgtgcgtcttcaagactcatgtgctcgttgtcgaataccgcgcaggtgtacgtcatggaggggccgaggaagtcggcgtagaactcgttggacatgtcgtagtggaagctgacggtttccgaatcggccttttcggtgtgcggcatcaggccacgcttgatacgggcgaacttgctcgggccctcggtggcgggcaccggcggcttcttgaagccatggctcaggatgccggcagatacgcgggcaattgatgtgggagtgagtgggcgaacgtatttggacagcgacaccagcttgcgcatcgccggatacgggtcggcgtagtcaatgccgtccacgtcgaaatcgcccagaatgtatgagcgcacgatgccgatttcattcgggtgcgcgagtagctggtacatgcagttcggcgtggcgattttgaccttcaaatccgcgtctgccgggccgaaatgcgagccgtcgaaagcgtcgatacgaacgggagtggcggggtcgagaaacagggacgccatctcgccgaccgtcatagccttgccatttgccattatctacctcattctcttatgatgatcaccccaactgtcgaggtatcttagtcctcttcaggagactgaaaccgttgaatacaccatctggtgaaccagttcgcgttcggctgatgaagcacgaatggaattaggcatctcgcatattgattgcgctacgcgcgaagtaagcggatgagagacgagtttctcggagagcgtcagatgactccggaaaatggtcttatcgttgagatttcgggcgatggaactggtttggtcaatggacaataattcgacaagtgcggaattccgccatttcttgccattattttcagtgttgttctttcagcgtgtttcccggattcaacttgtaagtgcaacggctggt

SEQ ID NO: 888 - DNA, 35510 bp, Unknown
  gut microbiota DNA sequence
cgactccatcattccgtccgtgggctccaagtacgaccttggcatctcctccttcaccgtgaccaaagagcgcatgcaggccgtcgacttcgtcacctccttcaaggccggctccacctacgtggtgcagaagggcaacccgaacaaggtcgactcctcgaacctgtgcggcgtgaaggtggccgtgcagaccggcaccacgcaggaagaggaagtcaacaaggccaacgagcagtgcaaggcggacggcaaggatgccatcgacatccagtcctccaagctgcagaccgatgtgaccaccgccgtggcttccggcaaggcctccatcttctacgccgattccacggtgtccgcctacgccatcaagcagaccggcgacaccttggagacgctcggtgaagacgccggcggggtgcccgaggccgtggccatcaagaagggcgataccaagaccgccgaagccgtgcagaaggccatccagaagctgatggacgacggcacctacaagaagatcctcgacatgtggggcgtctcttccggcgccgtcgacaaggccgagatcaacccgtccgtcgagtagtttcggttactatgaagactcccgttgccctgcggcgggagtctttttgtatatgtatgcactgtagtgtataaatatgcttaaccgttgatcgttgccgttgaagcggcgtaagagagaagaagaaacgattatgcagtccaccaaactgaagtccattatggccattgcactgagctcggccatgctgttcgccaccgccgcttgcggcacctccgacaaggccgatgccggtacggattccgccaagggctccgatgccgccaccatcaccagctacgatgtcagctccgtggagaaggatgacaccatcgccacactgctgcctgaatccgtgaccaaggacggcaagctcaccatcggcaccaacccctcctacgccccggccgaattcctcgacgccgacggcaagacccagatcggctacgacatggatcttgcccgcgccatgggcaacatcttcggtctcgataccgaaatcgtctcctccaacttcgatacgatcattccggccatcggctccaagtacgatctgggcatcgccgccttcaccatcaccaaggagcgcatggaatccgtcgacttcgtctcctacttcaccgcaggcatgggctatgcagtggccgcaggcaaccccaagaacgtcgatgagaacgacctgtgcggtctgaacgttgccgtcgagaccggcaccgtcgaggaagaggccatcaacaagaccgccaagcagtgcaaggcggacggcaagaaagacatcaccatccagtcctccaagcagcagaccgacgccaccaccgctgtggtgaccggcaaggccgacgtcttcttcgccgattccccggttgtcggctacgccatcgcccagaccgatggtcagctggaacagctcggcaaggacttcgatgaagtgccgaacgccatcgccatcaagaagggcgattcccagaccgccgaagccgtgcagaaggccatgcaaaagctcatggacgacggcacctacaccaagatcctccagcactggggcgtcgaatccggcgcactggacaaggccgaaatcaacccggccgtcgaatagccgacaagctgtcgcgaaaattcgaatggggcgcactgtttgtaacacagtcgccccattcgtacactaaggttcaacgctagttgcaacttgcagttcaggctgcccaacacgtccaaggaaccaaattatggcgaagaaagaagtcgacggtgagggagtgaacatccccaaccgcatcaaggcgctgccggtcaagcgccccggcccgattgtggccgcagtgatcgtggtgctgctcgccgcgatgctcattcaaggcttgattaccaatccgcgactggattggcccaccgtctggaagtacctgttcaacgagaacgtgcttgaaggcattcgctataccttggagctcaccgtgatctccatggtcgtggcgatcatcctgtcggtgattctcgccatcatgcgcaaatccatcaatccggtgctgcgcggcgtcagctggttcttcatctggttcttccgcggcacgcctgtgtacacgcagctcattttctggggtctgttcgccgtgctgattcccaagattagcctcggcattccgttcacctcggtggagttctggagcatcgactccaacgtggtggtcaccgcattcaacgccgcatggattggtttggctctgaacgaggccgcctacctgtccgaaatcgtgcgtgccggccttgaagccgtggaccccggccagaccgaggcggccaaggcattgggcatgaaccgcacgctcatcatgcgccgcatcgtgctgccgcaggctatgcgcatcatcatcccgcccaccggcaacgagaccatcggcatgctgaagaccacctcgctggtcaccgccgtgccgttcaccctcgaactgcagttcgccaccaacgccatcgccaaccgtatctacaagccgattccgctgcttctcgtggcctgcttctggtacctgctgatcacctccattctgatggttgtgcagtcccgccttgaggcgcacttcggcaagggcttcaacgcccgcccggtgggcaccaagggcaagcagccgccatacgatccgccgtaccccggcaagtctgacggcgagccgaaggacgatgtgaacaaaatcaatcagaccaccttcgctgggctgaatgcgtaaggcgggagcgagaattatgactacgaacgacatcaccaactccgctccggtcgtgcgcaaggcggttgacggttccgtgattcctgctgtcaaggccgtgcaggtgcacaaggcgtttgggccgctgcatgtgctcaagggcatcgatctaaccgttatgcccggcactgtgaccgtgattctggggccctccggttccggcaagtccacgttcctgcgtctgatcaaccagctggaaaccctgaccggcggttccatcgaggtggacggcgaactcatcggctacaagcacgtgaccaaaaacggccaggacatgctgcagaccctggacgataaggagatcgccgcacagcgttctcgcctcggcatggtgttccagcgcttcaacctgttcccgcacatgaccgcgctggaaaacgtgatggaagccccgattcacgtgcagcaccagtccaagaaagccgcccgtgacctggccgtggccgagcttcagcgcgtcggtctgggcgatcgcatggactattacccctcccagctgtcaggtggtcagcagcagcgtgtggccattgcccgtgctctggccatgaagccggagatcatgcttttcgatgagccgacctccgcccttgaccccgaactggtgggtgaagtgctcaacgtcatgcgttccttggccaaggaaggcatgaccatggtgtgcgtgacccacgaaatcggcttcgcccgcgaagtcgccgaccagatcgtgttcatggacggcggcgtagtcgtagaaaagggcggccccgacatcatcgaccaccccaccgagcctaggtttaaggacttcttgcagcacgtgctgtaggaaggctcgttgttgcagctccaaaaacgtacgctgatgaattcagcgtacgttttttgcgacgcctaatcgcacccccatctcgtgaagaacgtacgctgagtggtagtcagtgtacggttttcacgaaggggcatgttccaatcctgcaaaggcggcgggttggattcgctttgcgcaataatcgtccgctaggctggtgaaccatgtgtggaatcgttggatacgcgggaaatattgaaacggcatgcggcaagcctttggaggtctgcctgcaaggcctggaacgtctggaataccgaggctatgactcggccggtgtggcgctgaccgcgcccggcatggataaggtggtcgtgcgcaagaaggccggccgtttgaagaacctggtcgaagacatcgagcgtaagccgatgccgcttgccacggtgggcatcggccacacgcgctgggccaccaatggcgagccgagcgacgtgaacgcccacccgcacaccagcatggacggcaaggtggccatcatccataacggcatcatcgaaaacgcctctcagctgcgtctcgacctgcaagccgaaggctaccgattcgcctctgccaccgacactgaggtggccgctaagctgctcggcaagatcgtggacaagattatcgcggacgaaggcaagccagacctgttcaaggctgtgcgccgcatggcccgcatgcttgaaggcgcgttcaccattctggccaccgactgccgccagccggacatcgtggtcggagcccgccatgattcgccgctggtcgtgggccttggcgagggggagaacttcctcggttccgacgtcgccgcattcgtggcctacaccaagcgcgccatggaagtcgaccaggatcaggccgtatgcgtgtccgccgacaaggtcatcgtcaccgatttcgacggcaacgtggtcgaaaacccgaagacctacaccgtggattgggatgcttcggccgccgaaaagggcggctgggattcctttatggacaaggagatccacgaagaccctgccgcagtgcagcgcaccctgcttggccgcttcgatgcgaatggcggcatcacccttgatgaagtgcgtatcgacgaacacgacttcaaggccatcgacaaaatcatcgtcgtggcctgcggcaccgccagctacgccggccaggtagccaagtacgccatcgaacactgggtgcgtatccccgtggaaatcgaactcgcgcacgaattccgttaccgtgacccgattctgaccccgcgtacgctcgtggtggccatttctcagtccggcgaaaccatggatactctgatggccctgcgccacgcgcgcgaacaggggtccaaggtgctggccatctgcaacacgcagggtgcctccattccgcgcgaatccgacgccgtgctctacacacacgccggcccggaagttgccgtggcatccaccaaggcgtttgtggcgcagatcaccgccgcctacctgctgggcctgtatctggcgcaggtcaagggcgcgatgttccgcgatgagattcatcaggtgcttgactccctgaaagacatgccgcgcaagattcagtgggtgctcgacacccagcccaagaccatccaggcggccgccgagcgcatggtgaacgccaactccttcttgttcctcggccgtcacgtgggctacccggtggcgcttgagggtgcactgaagctcaaggagatcgcctacacgttcaccgagggcttcgcggccggcgagctcaagcatggaccgatcgcgctggtggacgagggtgagcccgtggtgttcatcgtgccgccgcagcgcggccgcaatgtgttgcacgccaaggtgatctctggtatcgaggaggtcaaggctcgtggcgcgtacatcatcgccgtggccgagcagggcgacccggatgtggaacggtacgctgacgtggtgttctggcgccccgcctgcccaacgctgatgagcccgctggttgacgtggtgccgctgcagctgttcgccatggacatggcaaagctcaagggctacgacgtggacaagccccgcaacctcgccaagtccgtgaccgttgagtaagccacatcggtatgtgattgacgagcctcatattccgtttgagatggacgtgctgtatgaggacgagcggatcatcgtggtggacaagccgcattttctggccaccatgccgcgcggcatgtggtatcggcagaccgcgctgatccgattgcgtgagcggctgggggagccggacatcacgccagcgcaccgattggaccgcatgaccgccggcgtattggtgttcgtgcgggatccggcctgccgcggcgcgtatcagatgctgttccagaaccggcaggccgtcaaggtctatgaatgcctggcgccctgccggccgatcagccgcccgcgattcggcacgatcatgcaggtcgagccgccacgcccgttcccattgctgcgccgatcgcacatcaccaaggaacacggcacgatggccgcattcgaggaaccgggtttggccaacgccgaaaccctcatcgagcgcggcgacctctgtttccctcccgctgacgggaggtggcgcgaagcgccggagggtggtccccatccggggaatcaccccatctgccgctacacactccacccgcgcaccggcaaaacccaccaattgcgcgtccacatgaattcgctcggcctgcccatcgtgggcgacgacttctacccgcgcatccagacgcgcccctacgacgatttcagccaaccattgcagttggtagcacgcatgctgcgattcaccgatccaataacaggcgagaagcgcgaattcgtttcccgtgtgccgcttaagatctgatttcttatgcattgagagtgttttcgctcatggtgtcaccattcatagagttcggcgggctgcggggttttgcggacatccagcgacaagccaagctcagtcagggcgctgagaatggtggagaattcgggattggggactcgggcgtgttcaaattcgatcagccagcgacgtgacacgcccagccgttgggccatgtcggtctgactaatgccctggcgttgcctatgaatcactggcaggtggatcactggcaggtggatcactggcaggtggatcactggcaggtggatcactggcaggtggatcactggcaggtaccagtggatgccagcgcatgccgctcgtcagctgatgtcgagcacggaaccgcgttcaatcagttccggcgggattacggttttgacgccgaccggtatcttctcgccttcgcattgacggcggaccatggagaaggcggtggcgccaatgtcgtcaaagcgcagcttcatggtcgtcaggttcaagcgcgggaccatatcgaccagcgaatcatcgacgcccacgatgctgacatcctcgggcacacgcttgcccactgactgcaacccgagcattgcgccgtacgccatctggtcgttggcggcgtagatggccgtgcagtcggggtcgtgggccaacgccacgccggcctggtagcctgaatccgcgcaccaatcgccgatatacatgctcggtacgcgtgctcccatttgttccaacgcttctcgccaaccgcgggcgcggctttcggcggcacgcgaggtggacggtccggcaatgtggtagacggtcttgtgtcccttgctcatcaggtaatcgacgatagcggtcgagcagccatactggtcggcgtcaacagtggggcagtggtcggcggcggattcgcagatgagcacgactggaagttctcgcggaggcttgtatccgacgaaatcggagatgcgttcctccagcactacgatgacaccatccaccggctgacgctgcatgtgatcgatggcggcggaaagcgtgcgttccgcaccgtgacgcatggtctggatggtgactgaataatcgtcatcggccgcgttggccacaatagaatcaaggatgcgggcgttgccgaacgtggcggtgttgaacatcaccacgccgatatcctggaagcggccgtgctttagggctcgggccgcataattcggacgatatccaaggcgctccattgcagcttcgacacgctggcgtgtttcgggtttcaccgcatcgctgccattcgccacgcgggacactgtctgtggcgaaacgtcggcggctttcgctacgtcttgcatggacacctgtgttggcctcgacatttcaccctcgcttgactcattaatgtcggtgtttcgtttgcagcgcttatcttaggccgcttacgttaacgataacatcgttgttttcgtgaccattgtagcagagtgactgaggaacccttaattcaacacggtactcaacacgattggacaatgttacagatagtgttatgatgataacgcaaacattttggtcaaccttcgaaggagaggggttggaaatggcttcagccgatatcgcagctgcgcccgtgcattcgggcaaggctcgtgtgaataagcacaaggccgattggcgtggatggaagttcatgtggccttttgcggtggtgttcgtgttcgtgttcatcgtgccgatcgtgtatgccgtctatatttcgttcttcaagaagcagatgatcggcggcaccaagttcgtgggcttcgagaactacgtgcgcctgttgggcgatggccagttctggagcagtgttggtcgtgtggctttgttcacgtgcgtgcaggtgccgatcatgctgtgcctgtcggctttgatggcgttggcgctggattcgatgaagttgcatggcacgaagttcttccgcatctccaccttcctgccctacgcggtgccggctgtggtgtcgactttgatctggggtttcgtgtacggcgcgaagtacggcctggtgggttcgttgaacgatttcctgggcacggacatcgacgtgctcgccccttccgtgttgttggccagcatcgggaacatcgtgacgtgggagttcacgggctacaacatgctcatcttctacagctcgctgtcgaccatcccgcattccctgtatgaggcggcgagcatcgacggcgcgtcggagtggcagatcgtgaagagcatcaagcttcccgaattgcgcggcagcctggctatcacggtgatcttcagcatcatcggctcgttccagttgttcaacgagccgagcattttgcagaacatggttcctggtaatgcgatcacgacgtattacacgccgaacatgtacgcgtacaacctgagcttcagcggcaaccagtcgaattatgcggccgcgttggcgatcgtgatggccgtgatcaccatggccatcgcctacatcgtccagttgaacagcctgaaggagcagatgaagtgacgatgaccgctgttcgtgttgaggaatcgatgatgatcgtgaaggagcgtatgtgatgagtgcagcaacgacttcggccgccggtcgcctgaccgacgccgagctcaaggcccaggagaaggccgccaggaaggcggagaaggcccgccagaagaggatcgccgccgacgaggccgccgaacgcaagcgcagcgcgaaggccgggttcgcgaacgtgaacaacccgaggcgttccacgttgttgaccgtcctgtgcgcggtcttcgccgtgtactgcctgttcccgttcgtgtacctgctgatcaacgcgacgaagacacaggccgacttcacgagcacgttcggcctggggttcggcaagacgttcgctttgttcgacaacatcgcgaccgtgttctcctatcaggacgggatcttcgcgcgctggctgttcaacacgatcctgtacgtggtggtcggcgccggcggcgcgaccctcctggcgatcatgggcggctacgcattggcgaagttccgcttcccgggccgcaacgcggtgttcgtggtcatcatcggcgcgatcagcgtgccgggcatcgctttggcggtcccccagttcctcctgttcgccaaattgggtttgacgaacaccccgtgggccatgattataccgagtttgatcagcccgttcggcctgtacctgatgtggatcttcagcgagcaggccgtgccccaggagctgctggaggccgcccgcgtggacggcgcctccgagttccgcacgttctggcagatcagcctcccgttgttggctccgggcatcgtgacgacggccctgttcacgatcgtggcgacgtggaacaactacttcctgccgttgatcatgctcaaggacgcggactggtacccgctgaccatcggcctgaaccagtggaaggaccaggcgagcacggccggcggccaggcgatccagaacctggtgatcacgggctccctgatcacgatcatccccttggtcatcgcgttcttgtgcctgcagaagtactggcagtccggcctggccgcaggcgccgtcaaggagtgaccgtactttggctcccttctggtggagggagccgagataaaggcataaccactaacagaaggaggcacctatgcagatattcgcattgttgagaattgtgcaggtgcctccttgtgtgtctgtgcaacgtgaggaatttattcccgtagacgcagattatcgataaaattcaataaaggaactgaatcatcatggaacgtaaagagttcaagtggccgcagcctcttgcgggcaacgagccccgcatctggtacggcggcgactacaaccccgaccagtggccggaggaagtctgggacgaagacatcgagcttatgcagcaggccggcgtcaacctcgtctccgtagccatcttctcctgggccaagcttgagcccgaagaaggcgtgtacgacttcgattggctcgatcgcgtcatcgacaagctcggcaaggccggcatcgccgtcgatctcgcctccggcaccgcatccccgccgatgtggatgacccaggcccacccggagatcctctgggtcgactaccgcggcgacgtctgccagcccggtgcccgccagcactggcgcgccaccagcccggtcttccttgactacgcgctcaacctgtgccgcaagatggccgagcactacaaggacaacccctatgtggtctcttggcatgtgagcaacgagtacggctgccacaaccgcttcgactattccgaagacgccgagcgcgccttccagaagtggtgcgagaagaagtacggcaccatcgacgctgtcaacgacgcctggggcaccgccttctgggcgcagcgcatgaacaatttctccgagatcatcccgccgcgcttcatcggcgatggcaacttcatgaatccgggcaaactgcttgactggaagcgcttcagctccgacgccctgctcgacttttacaaggccgagcgcgatgccctgctcgagatcgcccccaagccgcagaccaccaacttcatggtctccgccggcggtaccggcatcgattacgacaagtggggttacgacgtggacttcgtgtccaacgatcactacttcacgcctggcgaagcccacttcgacgagctggcttactcggcctccctgtgcgacggcatcgcccgcaagaatccgtggttcctcatggagcactccagctccgccgtcaattggcgcccaatcaactatcgcgtcgaacccggcgaattggtgcgcgactccctggcccacttggccatgggctccgacgccatctgctacttccagtggcgccagtccaaggccggtgccgagaagtggcactcttcgatggttcctcacgcgggccccgactcccagatcttccgcgatgtgtgcgagctgggtgccgacctcaacaagcttgctgacgagggcctgctgagcaccaagctggtcaagtccaaggtcgccgtcgtcttcgattacgagtcccagtgggctacggaacacaccgccacgcctactcaggaggtgcgccattggaccgagccgctcgcgtggttccgcgcgctggcggacaacggtctgaccgcagacgtggtgccggttcgcggcccttgggacgagtacgaagccgtcgtgctgccgagcctgaccatcctgtccgaagagaccacgcgccgcgtgcgcgagtatgtggcgaacggcggcaagctgttcgtgacctactacaccggtctggtggacgacaaggatcacgtctggctgggtggctaccccggttccatccgtgacgtggtgggtgtgcgcgttgaggaattcgccccgatgggcaacgacttccccggtgccatggaccaccttgacttggacaacggaaccgtggcgcacgatttcgccgacgtgatcacctccgtggccgataccgctcacgtggtcgcctccttcaaggcagataagtggaccggtttcgacggcgctcccgccatcaccgtcaacgacttcggcgacggcaaggccgcatacgtcggtgcccgtctcggccgtgagggtttggccaagagcctgcccgtgctgctggaggaactcggcatcgagacttcggctgaggacgatcgcggtgaagtgctgcgcgtcgagcgtgcggacgaaactggcgagaaccacttcgtgttcctgttcaaccgcacccacgatgttgcggtcgtggacgtggaaggcgaaccgctggtcgcctcgctggcccaggtcaacgagtccgagcacacggccgccatccagcccaacggcgtacttgtcgtcaagctgtaaaaccgcgcatagcgcctaattacccaacggctcccttgctgctcatcgtagcaggggagtcgttttcgtatctccagcaaagtcgggtagggtggtcaccgtgcgaggcaaaaacagagtgacgatggcggacgtggcccatgaggccggtgtttcggtagcctcggtgtctaattttctgaacaaacagccatatatgagcgaggcgatggccgcgcgtattgcggaagccatcgacaggctcggatacaaagtcaactcgtcggccagaaacctgcgttccgggcgtacccggttgctcaagctggttattcccgatctgcggcaggtgtacttctccgaactcgccgaggatattctggccgaggcccggcaacatggctacggcgtcatcgtggaatccaccactaacaatcgtgcccgcgagctggaaagcatcgcatcgatgggcacgcacagcgcggacgggctcatcttaagccctctgatgatgacggttgacgatatcgcggctttggatggcgattacccgctcgtactgttgggtgaacgtttgttcggcgtcaacgcgccgcacgtagtgattcgcaatcgcgaaggggccgccgccgcgacttatcacctgcttgatgccggttgccgccgcatcgccgtagtcggtgccgtgccccaccccgagcacgatttctcgtcgggctccatccgcacccacggatatcgtgaggcgctggccgcgcgcggcatcccctgtgatgacagtctgcttatcgaaacccaaggctgggggagcgccgacggtttggtcgcggtggacaccatgctggagagtggcctgcaattcgatgccgtgttcgctttgaatgacttgctggcgtggggcgtgctgcgtgaactgcgcgaacgcggcgttgccgtgccggatgatgttcgcgttatcggcttcgatgacgtggaggaatcggcctacatggtgccgtctctttccaccgttaaccccggcagggaagccatcgcccgactggccgtcgaatccatcatccaacaggtcgaatccggcagccgtgcccccgcccaaaccatcgaggccccctatagcctctccctgcgcgagtcctcgccggcgttggcctgcgcctgatgaatccgtggttcgaaatatccgaagtgaatgacaaggcccgtcaatcgtatggtgattgacgggccctggtcgtattggacttgactgtacttggtacgggcgtgactctccgtcttttagccgtggaattccacgctgatccaggagatggcgggaagcgttgccgtgcaggtgccggtggcgttcatcgcaatgtcgagcggttgcggcgtgacggcttcgggcgcttcggcggtgttggtgcggtacggatcgtcctcatgcaacagttgcgccttgccgagcgcgagcgtgccgagaccgggcaggccgggcagcccggaaaggtcgatggtgagcgtgtgcggggtgttggcgtcgcggttgacggcaagcagcagaccggtgcgggcctgttcatcccacgtgactaccgcgtcgatggccggcacgtcgtcatatgcctcggtatggatggtgggggagctgatggccggagcgtaggcctggccgcgcgcgtgaagggcggcttcggcgaacgggtagaacgtggtctgccgccatgccgggccgtgttcctcggccatgatgggggcgatgacgttgaccagctgggcgcgcgaggcggaacgcacgcgatcgcagtgcttgagcagggtgatcatcagggaaccttcgaccaccgcgtcggccgcggtgtagatgtcttccagcaaatgcggagacttaggccatggctcgtggtgcaaaccctgcgcggcctccgccttccactggtcttcctgctcgttccacttgtccgaataccatacgccccattcgtcgaaggacagggcgatgtctttggtgccgttgttggcttctcgcgcctgatcggccgcgtccgagacggtggcgatgaacttggtcatgtcttcggaagaggccaggaagtcctgcatggaggcggcggtccgggttttatggccgcggtcgaagtagtaggcatggcaggagacgaagtcgagattctcgtaagccttggtgagcacggtcttctcccacgtgccgaaggtcggcatataggcacccgaggaaccgcaggccacgagttcgagaccggactcggcgagcttcatggcgtgggccaccttatccaccgcgccggcatattcttccgggctcatgtggcccacctgccacgggccgtccatttcgttgccgatgcaccacatcttgatatccatcggctcctcgatgccgttggccacgcgctgatccgcccaagcggtgccgggcgcgccgttgacatactcgagctcgtcgagcgcggctttcagcccccgggtgcccatgttgacggcaagcatgatttcggtgccggctttctggctccagcggtagaagtcgtcgatgcccatctcgttggtttcggtgcaatgccaggccaggtcgcggcgcacggggcgattctcgcgtggaccgatgccgtcttcccagttgtagttggatacgaaattgccgccggggtagcgcacgcaggtgacgcccagctccttgaccaggtcaagcacgtcttggcggaagccgttttcgtcggcggtgggatggctgggctcgtagatgccgccgtagacgcagcggcccagatgttctacgaatgagccgaacagacgcgggggaacgtcggctaccggagtggcgtcggcgttgagggcgatgctggcgtccggcgtggttgcgttgccagttgtggagacgttactggccgtggtgccggcggcggtcggcgccgggctgctttcctgcttgtcgggatgggtggtttcggcggaatactggctgttgtgagtggtcatgagcgggatgcatctccttcggtttgcggttagtcaccatggtgcgacgtgtcgtgtttgcgtaaacataaaacatgtggtaccgtttcttaaaacgatacaaggcttggaacaaaacgccaagtcccgtcgtttcccataacaaggaaggaaagaacgatgaagttcggcaagaagacaattgccctgattggtgctgtggccatgctctcctctgtagctgcctgcggttccacttctgccggggatggcggaagcaccggctcctctgataagaaggtcgagctgaccgtgtggtcctgggattccacactgcctcgtacggtcaagggattcgaggccaagaacccgaacattaaggtgaaggtgaccaacgccggcaccaacaaggacgagtacaacgcactgtccaacgccatcgaggcaggctccggtgctccggacatcgcccagatcgaatactacgcactgcccgaatacgtgattcgcggccacctcgagaacctttccgatctcggtgcctccgatttcaaggacttctacaccccgggcacgtggtcctcggtgaacatcaatgacggcgtctacgccctgccgatggattccggcccgatggcctggttctacaacaagggcgtcttcgacaaggccggcgtcgatccgacccaggtgcgcacgtgggacgacttctacgaggccgccaagaagattcgcgccgtggactcctacatcacctccgattccggtgacgccggcttcttcgactccatgacctggctggccggcgcgaccccgttcgagacctccaaggacggcgggaccgtgaccatcaacctgaccggtgacaagaacgtcaagaccttcaccgacttctggcagaagatgatcgacgaagatctcatcgacaccaagaccgtcggctggaccgacgattggaacaagggtctggatgacggctccatcgcatccctgctgaccggcgcttggatgccgtacaacctgctttccggcgctccgaacggtgacggcaagtggcgcatcgcccagatgccgaccgcagacggctccgagaccaactccgagaacggtggttcctcgctggccatcgtgaagtccgacgacaaggacaaggtcgccgccgcctacaagttcatggaatacgcctgccacgacgccgagggcatcaagacccgtgttgacggcggcgccttcccggccgacaacgacaccctcaagtccgacgacttcctcaacatgacctccctgaccgactccgacggcaaggcccacgagtacttcggcgggcagaagttcaacgaggagctggccaaggccgcagccaatgtgtccaccggctacaagttcctgcccttcgaggtctacgctcgcggcaagttcggcgactacgccggcgatgcctacaccggcaagaccacgctctccgatgccgtggcttcctggcagaaggacctgcaagattacgccaagcagcagggctaccaggtgaagtaacggcaatcacagcagacttcctcctgtggtttctgtagcgggaggttgcgataacaggatcgggcactcttcggagcgcccgattttcttatgccatgggagcagtggcgcgcggattgcgataccaagatggcgtgttgccgaagaatgtgtataataaaagatgttatcgcaaccatagctacaaagtggcgaaacaaagccgttttgtgactactgaaccatagagtgatggttcacgatagcatgacgacgaggagagttgccatgctgttgtggtgacaatcactgcagaccgccgaaaggcgatccaaggaaggagaacagaacgatgaagttcaccgttgctaagaaggccattgcacttaccggtgcggttgccatgctgggttccgttgccgcctgcggttccgacaccgccagtggcaagccggctcaagataaggacgttaccgaaatcaccgtgtgggcttgggagcccacgctgacccaggttgccaaggacttcaccaagaagaccggcatcaaggtcgatctcaagaacgtcggcaccaacaccaaggaatacacccagcttgataacgccatcgaggctggctccggtgctccggacgtcgctcaggttgagtactacgccatcccgcagtacgccatcaagggcaacctgctggacatcaccgacaagacctccggctactccgacttctacacccctggcccgtgggcttccgtgcagttcgccggcaaggtctacggcctgccgatggattccggcccaatggccttcttctacaacaaggaggtcttcgacaaggccggtgttgacgccgagcagatcaagacctgggatcagtactacgacgccgccaagaagattcacgctctgggcgacaactactacatcacctccgacaccggtgacgccggcttcttcgactccatgacctggctggccggtgcaaagccgttccagacctcttccgatggttccgaagtcaccgtcaacctgaccgaggacaagggcgtcaagaccttcaccgacttctggcagaagctgctggacgagggcctgctcgacaccaagaccgctggctggtctgaggactggttcaagggcatggtcgacggcaccatcgcctccctgttcactggcgcttggatgcctgccaacctggccaactccgctgctgacggcgctggcaagtggcgtgtgacccagatgccgaccgctgacggctccaccaccaactccgagaacggtggttcttcgctggctgtgctcgcctccaccaagaaggctgacgctgcttaccagttcatcgagtacgccaaccacggcgacggcgtggccacccgtgtggccggcggtgcattcccggctgacaaggcctccatggagtccgactccttcaagaacaccaccactgtgaagaacgccgatggcgaggacgttgactacttcggtggtcagaagtacaacgaggttctggctcaggctgctgagaacgtgtcctccgactaccagttcctgccctacgaggtcaaggcccgcaccatcttcggcgactaccttggcaagtcctacaccggcgaccagaagctgactgacggtatcgccgcttggcagaaggcactgcaggattacggcaaggatcagggcttcaccgtgaagtaagccttgaaccctcgctgagactgcctagctaatctcacctgatacacaaagccccgtgacgaatcccgtcacggggcttttaccgttttaagccccgcctagtacactcgtcaccatgcgagtgatcggacagcgaatcaaaagaatggcaaccatagcagtgactgccatcctttccgtatccttggcctcgtgcgggcagtccaccaccgataaccgcacggaaatcagcgtatggagctgggaaccgagcatgggcgaggtcatccgccgtttcgaaaaagccaatccggacatccgcgtgaaatggaccaacatctccggctatggcaatctcaacaccgccattcaggacggttacggcacgccggacgtggctcaaatcgaatactatgcactgttgcagtacgcggtctccggccaattgcttgatctgaccgacaaaatcggctcggattattccaacttctttaccctcggcacatggtcgtccgtgcagctcgccggccgtacctacgggctgcccatggattcgggcccgatgggcttcttctacaacgaagacgtgttccgccaagccggcgtggacgccaccaagatcaagacttgggatgactactatgaggctgccaaaaagctcaaggagattggcgtgtacatcgccgccgactcgggcgatggcagcttttacgatgccatggtctggctcgccggcggccagccgttccacacgtcggccgacggcaaaaccgtgaccatcgatttggatgaggacgccggcacccaacggttcaccgaattctggcagaaaatgatcgatgaggggcttgttgacaccacctccgccacatggtccgaccgatggaagcgccgtgtgggcaccggtaccatcgcctccgtgttctctggggcctggatgccgtcgctgctgctgtccaatgtgccgggcgcggccggtctgtggcgcgtggctcccatgcccacctatggtgggcagcctgccaacgccgaaaatggcggctcggcgctgaccgtgttgcaactgacccgtaagccggatgcggcctatcgtttcgtggactttgtggcgcatgacgcccaaggcattagcgcgcgtgtagacggcggtgccttcccggccgattacgccaccctgaattccgctgattttctggataaaaccacgattaccaatgaccgtggcattgaaatcccgtatttcggcgggcagaagttcaaccgggtactgtcggaggccgccgaggatgtgtcggtcggataccagtatctgccattcgaagtgtatgcgcgcagtgacttcaaatcgacggtgggccaggcatacgagtggtccggcagtttccacgcctatcagcagcgacaggaagccattgagatgggtatgaaggacaaggaaggcaacccgctcgaaccattggagaagcccggcaagaaagtcagtctctccgaaggcctggcccaatggcagaaagacctccgagaatacggcctcaatcagggctttacgattaagtagggattcggggttgggtcggaatcgaccgcgctatacgcggccgattcctgcatactacgtcacttcacattgcgcgagtagatgtgcgccatgcccttgaaaatcaaatccgggtcatacacgtcaatcagctcggtgtcattctcaaacactcgaccgaggccaccggtggtgatcaccttgaaatcctcgcctccgagctctctgcggaactgacgaatcgtgcgctccacaccgcccaagaacgtgtaatacaaaccggcctgcatgcaggtcttggtgttggtgcccagaatcgtatccggtcgcgtaatttccacttccggcagctgggccgtatctccccacagagcggccgcaccggcacggatgccggtggtgatgacgccggaatcgaccacgcccttgtcgctcacgtgcgtgaacgtggtggcggtgccgaaatcagccaccagcactgggccgccatactcgtaataggcaccggcgcagtcggccagaatatccgcacccagcgatttcggatcgtcaacgcgcacgttcataccggtcttgatgcccggtcccaccaccatcggatcaatgtcgaggaatttgacgatggacgaacggaaggagtgcatcactttcggcaccaccgaacagatgatcacatcgtccacatcggatggctgaaaaccgctcattctcaggaattcagtcagaaacagcccatactcatcagacgtatggttggctttggtggtgatgcggtaggtgccggcgatggcatcgccatccaaaaagcccagcacgatgttcgtattgccgatatcaacggcgaccagcatgataaccctccagattcaagatggatttcatgcgcaattctacagtcccatggctatgatggcctgcggtggtcgacccagcgtggcggccaaccgtagaacacaacatatacagaggaagaaccatgtctcaagacaatggtgcgcacgtcgaagacggcgcaaccacagatgcgagccttgcctcgcgcgcaaagaatccgaaaaaaagcggcccgaagtggtggctgatctcactgattgccgtcatcgtggcagtggcggtcgtcatcggcgtcacgctcgctttcggcggtaagaaagatgacaagtcggcttcgtccagcaaccaatatgccgacaccgtgaccatcggcctcaaactggcccccaccaatctggacatccgcaacaccgccggctccgcgcttgaccagatcctgatcggcaacgtatacgaaggcatcgtggcacgtgactccaagaaccaggtcgctcccgccatcgcctccagctgggagacgtccaaggacggcctgacctacaccttccacctcaataagaacatgaccttcttcaatggcgacaaacttgacgccgaggacgtggcctggtccatcaacgagctgatcgctaagggctaccacgacgccgacgcgctcgccgccgtcagcaaggtggaggccaaggacgccgacaccgcggtgatcacgctcaagacgccgaactccaacctgttgtggaccctgaccggtcgcgcagggctcgtgttcgacaaggacgccaagtatgacctgaagacgcaggccgtcggctccggcccctacaccgttgccaagttcgtggaaaacagctcgatcacgctgaaggccaatgagaagtactggggcaagaacaaggccaagacgcccaccgtggtcgtcaagtatctggccgacgacaacgccgcggtcaatgcgctgaagtccggtgacgtgcaggtgctcgccccgattaccgagaacctcgccgaaccgttcaagtccgattccgccaagtacacggtcaaagccggcaacggcaccgacaagttcgtgctcggcttcaacaacgcttccggttccaaactggctgacaagcgcattcgccaggccatccgttacgccatcaaccacaaggagctcatcgcctctcgcggcggtgcggacaaggcgctcggcggcccgatcccgtctctcgaccccggctacgaggatctgacgaatctgtacccgtatgatcagaacaaggccaagtcgctcatggctgaagccggctattccaccgacaagccgcttcaacttacgctgacctacgccaacatctacggcaccgagctcggagaccagctgcgctcccagctcaagcccctcggcatcgacctgaaggtgaatgtggtggagttctccacgtggctgcaggatgtgtacaccaaccacaccttcgatatttcgctggtggaccacaacgaaagccacgacttcgcatcgtggaccgatccgacatactatttcggttacgacaacaagaatgtgaccaagctgtacaacgagggtgttgccgccacctccgacaaggagcgcgatgccaagttcgccgcggccgccaagcttgtctccgaggatgcgccggccgactggctgttcaactaccgcatcaccaccgccacggccaagggcgttgaaggattccccttcgacctcaaccagaccgttctgcccctctacaacgtgacctacacgaagtagttcgttacagcaatgagctccctcagtgagggggctcattgttaatccaagtaaagtaggcattatgcgattcgtgttgaaacggctggcgttattcgtggtggcgttgttcggcctgtccgtggtggttttcgcagcattgcgcattctgcctggcgatgtggcctccgtgatggccggcgtcaactcgccgcctgagcgtgtgacccagctacgcgaacaactcggtctgaatcggccattgattgcacaatacttcgattggatgagtgcgctggcccgtggtgacttcggcacttcaatcctgactggtcgctccgtaacctccttggtaggcgcacgtgcgtccatcacctttcccctgattattcttggcctgctcatcgccttggccatcggcttgccgctgggctgtgcggcggtactggcccgcagcgcaacggtgcgtgcggtgtttcatgtactggctattgtcggcggtgccgtacctgcgttgtggggcggtctgctgctgattctgttgttcgggcgcggcgtaggattgcttgacgtgtttccctcgcaagggttcccgctggatggctggggcgcacccggttcggcgatatcagcgttggtattgccggctgtatcggtcggcatcatcgtgggagcatcgcttatgcgatacacgcgcgcggccttaggggatttagccagttccggctacatcgatatggcacgctcgtgtggcatgacgcgcactcaggcggtgttgcgtgtgggattgcggttggcaaccccgcagctggtgtctgttatcgggctgaccttcgcttcgatggtcactggcgtgatggtcatcgaaaacctgtttgcgttaccgggcatcggcaacggtcttgtgaccgacgtgggcaaccgcgacctgattgccgtgcaaagcgagctgttcctgctggccgcgttctttttgactgtcggcctcgtggtcgatttgctccaccgcgtgctcgacccgcgtctgaaaaccgctaccgccattacggaggtgaccgcatgagcaatgttcgtcgtgcgacgactggtggtcgacgggctgccttcgtcatcgtcctgcactccatgtggcgtcgtgccgagggcaaattcgcacttatcgtgctcgctctgtggttgctcattgccatcgtttccctgttctggaccccgcaatcgctgtgggccactgatggctaccatgtatgggccaagccgtccgccgagcactggctcggcactgacggcaccggcgcggacgtgttcagctggctgctggccggctcacataccaatcttgtgatcgtgctgctgaccgtagtggcatctatggcttgggggctgctgctcatcgcggccatggtggcacgcaatgcggcgctcgccagttcttcggtagtggtagttgatgcgttgatttccgttcccaccgtgttgattgcgttgattctggctgtgccgttgggagcgtcaatcgcggtgattgtgatcgcctgcggcttcggatatgggttgaatctggctcgtgtggctcgccccgcagcgttgctggcgtcccgctcgtcatatgtggaatcggccttggccaatggtgccagcgggtggcgtgtgctcataagccatgttatgccgaatattctgccggtattggctgtgcaactgtcattgtcggcgggcacggcggtgttggctgagtcggggctcacttatctcggtatcggtgtgccgtccggtgtgccgagctgggggcattctctggccacttcggtcaaactcatcaacgtgttcccattaaccgtggtgtgggccggcctgatcgtcacggttgtggttgtggcgctgaatatttttggtgatgtgctgcgcgatgccatcgatccggtcaccaaccccgcattacgtgaaataggaggcgaacgatgagcgtcgatgttcgcgggctgaaaatcacgattggcggcaaaccaatcgtctctgatgcggatatgaccattgccgacggtgaacgagtcggcttgatcggttcttcaggctccggaaaatctatgattgccaaggcgatgctggggttgctgcccctgaccgctgtgactaatgggtcgattgatatgggcggcacggaaattatcggagcttccgaacgtgcgcttgccgatctgcgcggccggtatgtgggtgcggtgttccagaatccggctgcctcgctgaacccggtgatgaccgtggcgcagcagatcgccttgccattgcggttgcactatgatctgaccaaggtcgaacgagccgaccgagtgaatgccttgttgagcaaggtcgggctggatctcgatatggccggcaaatacccgcacgaactgtccggcggccaacagcagcgcgtgggcatcgccacggcgctgatcacctcaccgcgattcatcatcgcggacgaacccaccaccgcactcgactccatcacgcaacgccagatcgtggacctgctgacctcgctggtggacgacgccggtgcctccatgctgttcatcacccacgatttctccgtactcgcgcgtgccaccacccgctgctacgtgctggacgccggccgcatcgtcgaatccggacccaccgccgacctgctcgccgcgccgaccacaccacaagcccagcgcctggtcgccgccgcccaaaccctcaccctccacacccccaaggaggattcgcatgagtaacagcagtgtgccgctcctctccgcccactccatcaccaaatccttcggcccgcgcaccgcacgccaccaagtcctcttcgacgtctccgccgacgtccacgccggcgaatgtctggccgtgatcggcggctccggatccggcaaatccacgctgacccgcattatgctgggcttggaatccgcggactccggcagcgtggaatacgagagccaatccattgtcggcggccgaaaatcgccgggattcgcggccctgcgccgcgaatcgggactggtgttccaggacccgttctcctcgctcgacccacgttggcgagtcgccaaatcagtggctgaaccgctgagtctgcaacggcgtgacctgaacaacaccgatatcgacgagcgagtggccgcggctctgaccatggcaggccttgaaccggcagacttcctgaaccggtacccaatcgacctgtccggcggccaggcgcagcgcgtggtcatcgcccgcgctatcatcaacgagcccaaagtgatcctcgccgatgagccgatgagcgccatcgacgtggccgcgcgcattcagatcctcgacaccttcgccgccatccgcgcggcccggccgagcaccgccatcatcatggtctcccacgatctcggcgtggtacagcacatcgccgaccgcatcctcgtgctccatgacgggcgtctcgaagagacgggttccaccgctgaagtgctcggcaacccccaatccgattacacccgtcagctcatcgaggcagcctcgttatagacctttttggctcccctctctgaggggagccggccgccggcgacacgcgcttgtcgcgggttgtgctatggtgtgagacatgcagattatctcatgttgttgtcgctaaccgacgcccctgggcgagcggtcagtgacgcataacttgagatagagcattcgaatcgcggcaaatctgtcgcatgaattttcatgaaatcgatggcacgagcgtaaccgtgtaacgcgcgagtcgtggttaacatgaaaaaccgattcactttccggcttcaccgtacagtgagcggggatactcgatttcaaactaaagccacagtccattcgtctgggaacgtcggttcacgaacgcaacgcagcaaaaccccacaaccccagcaacgaaggacttcacatgaccatccacaacagcctcgcagaactcatcggcaacaccccgctcgtcaagctcaaccacattccgcaggcggccggcgtcaaagccaccatcgccgtcaaagtcgaatacttcaaccccggtggatcttccaaggaccgcattgccgaacgcatcatcgacgccgccgaacagtccggccaactgaagcccggcggcgtgatcgtcgaacccacctccggcaacaccggcgtcggcctggccctggtcgcccagcagcgcggctaccgcacgattttcaccctgccggacaaggtttccgaatccaagcgcgcggtgctgcgcgcctacggtgccgaagtcatcgtcacaccgaccgacgccggcccggacgacccgcgctcctactaccaggtcgccgaacgactggccaacacgattcccggcggcttccgcccgaaccagtacgacaacccgaacggcccgctgagccactactacaccaccggccccgagatctgggaggctacggaccacaaggtcacgcacttcgtggccggcattggcaccggcggcaccatctccggcaccggcaagtacctcaaggaagcctccaacggcgcggtcaaggtcatcggctccgacccggaaggctccatctactccgcttcctcacgcgacgaagtccaccagtacgacatcgagggcgtgggggaggacttctaccccaaggctttcgaccggaacatcaccgacgacatcgtgcgcgtatccgacgccgaagcctttgaaatgacccgccgtctggccggcgaggaggcgttgctggtcggcggctcgtccggcatggccgtggccagcgccatcaagtacgcgcttgccaatgatttggacgagaaccagattgtggtggtgctcgcccctgattccggccgcagttatctggagaagatcttcaatgacgactggatgcgtgccaacggctacggcgacatcgtggaacgcaccagcaagccctccctcgccgagcagtaccttaacggaactccctctgatgagggagctgcggatggactccataactagctatcaaaagaatcaataccaacatccgcactaactaaccgcacctgttttaccttcgaatacggaacaatcccgaaaggaacccaatatcatgtccgctgaatacaacgccaagttcgccaacaccgacatcgccactcgcgccatccacgccggccaggagcccgacccgaccaccggtgcggtcgtcacgccggtcttcgccacctccactttcaagcaggatggcgtgttgggcctcaggggaggccacgactactctcgctccatcaaccccactcgcaccagcttcgacgagcagctcgccgccgtggaaggcggcaagtacgcgctgagcttctcctcgggcttggccgccatcgacgtgctgctgcgctccaccatcaagcccggcgacaacatcctgctcggcaacgatgtgtacggtggcacctaccgcctgctctccaaggtgttcgtgccgtggggtgtgggcctcgacgtggtggacatcaccgatctgaaagccgtggaaaccgcattggcctccaagcactaccagtatgtgtgggtcgagaccccgtccaacccgctgctcaacatcaccgacatcgcggccaccgccgaagttgcccacaagtacggcaccaaggtcgcggtcgacaacaccttcgcctcgcccgcccttcagcacccgctggccgatggcgccgatgtggtggtctactccaccaccaagtacatcggcggccactccgacgtggtcggcggtgccgtggtggtcaacgacgaggagacccgtgagaaggtcgccttcctgcagaacgccgccggcgcagtgccctccccgttcgactcctggctggacatccgcggcctgaagaccctggatctgcgcgtcaagcgccacagtgccaacgccctgaaggtggccgaatggctcgaatcccagccctctgatgtgattgagcgcgtctggtacccgggcctcgagtcccacccgggtcatgaaatcgccgcccgccagatgcacggcggcttcggcggcatcgtctccgtgcagctcgcggccggtgccgaggcggccaagcacttcgtggaccacacgcagatcttcacactggccgaatcgctcggcggtgtggaaagcctcatcgaggtgcccgccgccatgacccacgcctccgtggccggcaccaccctgcaggtgcccgccaatctggtgcgtatttcggtcggtatcgagaacgccgacgaccttatcgccgatctcaagcaggcgttggatcgtatctgaccgtactgacggtactggtggcaccgtattgacggtgccaccacgcttatcggcggactcgctatcgattggtacctacaaaaaaatccccggcccacaagggtcggggattttccgttatcgattaaacatggatcgaatcagctggcgttgccgccctgccatccggtggcatccgcaccagccgggcgcaacgcctgaccggaagtcggtgtggtgccatcaacgaccacacgagtgccgatggtggcaaagtcgtacatccacttggcgtcggccacctgcatgttgatgcagccgtgcgagcctgggataccctgctgcacatagatggggtgctcgccccacatgtatgcaggaacaccgtgcagggcctcgccgccgttatagtaggaaatccacggcgtgcctggctggttgtagccttcgccaaccatggtctgcgattcgtacttgagatacacgtagaacgtgccggtatcggacagcatggaaccatcggcggtgggcttgccagaagcgatgttgaacttcttgaccaccgtggtgccctgatatgcagtggcagtctggttcgtcagatcaacatgaacccacttatcgccatttgccgtatcgaagttatgaggcacctcgacctgcttgacatcatatgggctgtctttcacagccacagtggaatcagtggactggttctgctcgatggcggtagccagacgttcgggggcgtccccggcgccagtcacttcaataccatccacgccgagtgtcttatcggcaccaatttccacgccgccttcgtctttcggcgtgatgtagacctcgcgtgtcaccttgggaacagtcagttctttggttacgctgtcactggtgacgtacttggtgatggcatcgcggtcgactaccagactcatggtgccttccgccttattcaccgtgggcttgaggaatgaggcaatggtatcggccgggatggtgacgctcttgttcacgccgttgtctacggtcagtttgaggccaagcctggcattggcgtcaaactgtgtttgctgtgcgctcgcgtcatcaatcggattctttgcggtctgtagcttgaccggcaccgtcgcattttcgcccggggtcgcgacggcctccttgactgcagcattgacaacattggtatccgggcccttgccgtcctgacccgcggtgtagtcgaactgtttggtgctcttgttgtagacaacggtggcaatctgcgctcggtcggcctcatcgaccaggccggcggtgacgaattgttcggcagtctctttgtccgtggtggcggtcagagcgatatgcggctgatcgaaaatattgagcttggccacgtcgccggtcttcgcgttcaacagcgcatccacggttttatccgtgtcgacggtgacgccaaggtccttcagcgaggctttgacgctgttgccttcggcggtgaacgtcaccgtggtgttattcagccgctgcttcacagtattcgcaagttcttcgcgggtctggcccatgacagagacattgcccaaatgaacaccgggcgcagccttgtcttggaagtaccaacgtccgacgaagaaataggctattaatgcggcaagcaacactgcaaatatggttatgatggcaatccgtgcggccttgccatgtgatttagcggtggtagatgccataacatgttcacccacataggctgtattatcggcatggttattggtgccattgtcactttgctgtggtgtggcggtacctgaatccgcggctgcgaacagcccatcggtggccacaggctgcagcaccgccgtctcctgatcgtcaggagaggagaaggaaaatgtatcgttggccatcaaaatgccccgtcttagttctctcaaagcggcatatcgtgcgatatgccgggaataacgttccttgacgcataataatacggaagggctacgtacatcgttgcgaggtattccgttatacgctgaaatccagccgcggtcggcctacactggtcgtttatgacagcacatcaggcggcgctggaggcgctcacacgatacttcggctatgactcgtttaggcccggacagcaaggaattgtcgaggctttgcttgccggacgcgatgtcttgggcgtgatgcccaccggcgcaggcaagtccgtgtgctaccagattcccgccgcgctcagcccgggtatgactttggtcatatctcccttgatttccctgatgcgcgaccaggtcgatgcgctgaacgacctcggtctgccggccgcgttcatcaataccactcaaactcccgacgagcaggcgatggtgttcgcccaagccgccgccgggcagatcaaactgctgtacgtggccccggaacgcttggaaaccgggcgattccgcgactttgccgcccgtacgccgatctcgctgatcgccgtggacgaagcccactgcgtctcccagtggggtcaggacttccgctcgtcgtacttaggtatcggcgatttcatcgccgggctgccgcagcgtccaccggtgggtgcgttcaccgccaccgccaccgaacgggtgcgccgggacatcgtgggactgctgggattgcggaatccggccgtcaccgttaccggattcgaccggccgaacctgtattttgatgtggtcaaactggaaaccaaatacaaggccgcatgggtggcgcggtatgtggccgaccatccggacgaatccggcatcgtctactgcgccacccgcaagaccaccgaagcgctcaccgacacgctgaaccagatggggcatccggccgttgcctaccatggcggcatgtcgccggacgcgcgtgaggcggcccagcgcgacttcatcaccgacaaggtgccggtggtcgtggccaccaacgctttcggcatgggcatcgataagtccaacgtgcgttacgtcatccaccacaatctgcccgaatccattgaggcctactatcaggaggccggccgcgcgggccgtgacggcgagcccagccgatgcacgctgctgtggaatgagtcagacatcgtcacccggcgtcggttgctggataacgattatgagaacgaacgattgactcccgaagagcaggaaatcgttcgccagtccaagcgccggctgctggacggtatggtcggctactgccgcaccaccgactgcctgcaccggtatatgacccggtatttcggtcaggaattgtcgccgaatgctggttccacggcgggtgaagacattgcggcggactcttcgcagtccggcaaatgcggtgcctgctcgaactgcgaaagcacgttcgagaccatcgacgtgacccgcgtggcgcaggcgatcagccgttgcgtgcatgacgtggggcagcgcgtcggttccggcaagatcgtcaagatcctgcgcggttcgcgggcacaggatctggcatggctgaacccggagcggatgcccaccttcggcatgctcaaggacgtgaacgaggctcgcgtgcgcgacgtgttgagccagatggccacggacgggtacctgtcaatcgccgaagggcgtatgccaatcgtcatgttcggtgcgcgggcggccgaaaccgccgctcccgacttccactatgagatcaaacgggtggaacgcaagtcggaggcggccggttccggtcggagcgggggagtggctgatactgccgattccgccaatgttcccggcgatgcgctgggctcgtatatcccggacgatgacgaggaatcgctgttccagaagctacgcgaactgcgacgcaccatcgcccaggaaatcggcaagccgccgtacatcgtgttctccgacaagaccttgcgcgacatggcccgcatcaagccggttaccaacgcgcaatttctggcggtcaacggcgtcggtcaacacaagctcgacctctacggccagcgcttcatgcaagccatcgcctcgttcaatgccgggagtgcgtcataacaatctcctatagcgaactgcggagtatttgcgggcgttcttgggctggctcgactacgatgactgttcgatgcttcatgaccgaacactcggcaagtagaaaggcaacagcatggcagaagaaacggccgaaaagcccgtcgtcgaatcattccagcttgatcacaccaaggtcaaggcgccgtacgtgcgttacatcgacaccgaaacgggccctcacggcgacgtgatctccaactatgatctgcgcctgacccagccgaacaagcaggccatccccaccggcggcctgcacaccatcgaacacaccatcgccgtgctgctgcgcgaacgtatcccgggctacatcgactgctcgccgttcggctgccgcaccggcttccacctgctgacctggggcacccaccccaccgaggaagtggccaaggccctgaaggaatcgttggagttcatcgcgtacaaggccacgtgggatgacgtgcccgccaccaccgagaagagctgcggcaactatcgcgaccacagcctgttcaccgccaaggaatgggccaagcagatccttgaggaaggcatcagctccgacccgttcgagcgcaaggtcgtctgatcgcaagccaatcggcatggaagaaccccgcccccgcataccacgcggacggggtttctttgtgcctatgtttgtgcctatggcatggtaggtttgccgtcagttaatcgttggccgctgcacatcggtagcttggcatgttggagaggtggaagtgactcagtcgaacgctgcaaacaaggcgacaggccgccgtttccgccacgccaccatgcgcgatctgccgcagatgcagaaaatctacgcacgcgcacgcgcgttgatggccgccaacggcaaccccacccagtggggcaacgaatttccgcgtgaatcgatgattgaggacgacatcgccaaccagcgtacgatgctgctggtcgacacctgcaatggccacgaacgcattctggcccagttcgccctgtgcccgggcgaggatccgacctacgccaaaatcgacggcgcctggctggacaacgacgcctatgtgaccatccaccgcatcgccgcatccggtctggtgcgccacgcggcccgcgactgtatcaggtgggccctgaagcactacggcaacgtgcgcgccgacacccaccccaataacaaggccatgcagcacgtgctcgaaagctccggcttcgcccgttgcggcctgatccagctgctcgaccggccggtcgacaccaccagaatcgcctatcagcgccacgagtggtgagtgtggctgccggctgatgtgctcgtttctgcaccgtcatcggtttctgacggtagaatcagtgtgtgagaagaacacgttgggtcgggggcgtcgtgacggtgcttgcggctgtcatgctgtcgtcgtgcggcggcgtccagtcgaatcccgggtaacacaccgttgccaatccattcaccgcgcaggtgaatggagaagacatggcgatgcctgtcggccgatggagccccatcggccgacaggcatcgaggaagtcaccgtggccggcggaacgcgcggtcgccgattggggcgaatggcttgtgtggttcgctttggtaccagtaggcgaccgtggccacgtcgtcctgtcgttcgaagttgccggcttcctcggtgccgatctgctgccactcgacgcgcaggtctcgctcgaagtagatcgggtcggggatgtgccaacggtataggccgcgggtcacgggggtggcagtgtcccagtaggcgctttcgcgtccggcgaggttctgcgagtagaacgggaagccgaggtatgggccggtgaaggtgcgctcgtgcatgcggccgtgttcgtcgaattcggcgaagctccaggcgccgccgaagtagtcctcggcgccggtgctgcaccaggtggggtatttgccgtcgccgtcgatgtagaacttgaattcgccttcgccccaccagcggctttcgagcgcggtgagcgccaggtaggtgccgacgtaggtgccgtgtccttcgacgccatcgagcaccacgtagtcgtgggcgagttcggtgacgcgttggcggcgccactgcgcgtggaagcgcatcgtgtcggccggcagctggtcgtattcggtgtagtcgatttggtagaagaacgcgggcacgtcctcgttgtggtcgttgcgcagcacgatgcgcgcgtgttcgaacggcatggcgaagtagcagttgaagccccggttcgggttgaccatgacgggaattgagttgatggtgcaggactgggcgtgtccgcagcagaagaagtcgccgatcgggcattgcaccgagggggagtcctcgccgtcccagtagaattccaggatcaggttgcgtagcacgtcggggccggtgggggaggtgcggtcggttaccgtcatccagatgtgacggatcacgccggggccctcgacgtccatcaaagtcaccgattccccggacctcaccgtgctgatgcaggggcttcccttgcgggaggggcccaacgcgctggccgccatggccgcgcggcccttgccgccgtccgggttttcggcgttgatgcagcgggtgcggccgggtgccctcatggccacggcatccaaggcgctttgtccgagccccggcgcggggttcactgtggtgaat

SEQ ID NO: 889 - DNA, 83814 bp, Unknown
  gut microbiota DNA sequence
tattactgcttaggctataacctcgctttcacagttgctcgcgattgcgacggtaggcgattgcggcgccggcaccggccagcagcaatccggccacagcaatcgtgacgacattggcacccgtgttggagacgacattgccatcacccttggcagcgggacgcttcaccagagcggcaattgccttctcgagagcctcacgagctgcgtcgacctgcttctgcgtggcgttgctgttgtcggagacctcacgggccttcttcagcgcggcgcgcagagcgttggcggagtcgtcggtgtagagacccaggttgatggcggcggccttgttgatggtcgcgttcagagcagccttgtccaccacgcccggttccggattcggcttcggctcggtggcagcttccagcttggagatggcgtcctgaagagcgctcagtgcggtatccacatcctgctgggtggcgttcttgttgtcgagcacctgctgtgcagccttcagtgcctcggcgaaagcttcccacgagttggtcgtgtaatcggccttctcgagcttgcttgccttgttcactgcagtctgcaggtcggtcttgttcacctcaaccgggcctgggccaggctcctcaccggtcttctcgagaccagcgatagcggattcgaggttcgtcagcgccagagccacatcgtaagcggtggccttatcgttatccgccacggcctgtgcagcttcgcgggccttgaccagagcagtccagctttcagccgtgtagtcggattccttaagaccgttagccttggcgatggtgtcgttgaggtcggtcttgtccggagcgacagtctcttcctcaacctcgcggtccgtggtcaaacgcagttcggcagcggatgcgaacttgttggcctgggagtcgctctggcctgcggaagacaggacggtcaagcgtacggcggtcacattctcgacggcgtcgaagctggccttctgccacatggtggtggtggagaactcagcatcggtgacgacatccttggtggtgccatccgccagagtgagcgtgatcttgtagcccttgatcttgccgttggcgttcatacctccggagcgcggcaggtagcgcaggccgttgatggtggtcggtttgttgaggttgaactgataccatgcggtgccgttgccgactgcgttcttgctccagctggtgtgccagtgggtgctgtcgttgccatcctgtgccagatcggccgggccttcgctcggcaggcctgcggtaggctcttcgctgcccgtggccacggtgtagccacccagctcatcggagccgtcagctgccacgtcgtacttgtcgctgctctcgttgccgggagcggtcttcatgtactcgtcgagggccacgagaatgtcgtatgccttggtgaagtcctcagcggttgcgccattcttgttgatgagcacgcgagccttgaccaaggtgtcctgatactgctgccatgcggcatcggagagctcagcacgcttggaatcgtacttgccgcggatttccttgaccttgtcctgcgcttcggccttggtgcgggtctgggactcgatgcgctcgatcttcaggttgtcgagcacgaagtccttgtatccgccgaagtcctgtgcattgccggtggaaccctgcagatcaggtgcggttgcggtcgagtaaataccgaaccaggaatcgccgttgacgccaccggtcagctcgaactcggccttgccggtctcacccagagccttcttcaggttggtcagcttcacgctgccggcagagtattcaccctggcccacagcgatggcgtagatgtcatcggaaccggactggtagtcgaagctcaccttgtacttggcacccgcctcgaacttcacgttctgcgggatcgtctggtagaccagcgtgcccttctgggtcaggccgttaaccttcacagaccaagtgccatcgagcacatcgtccatcttcttgacatcccaaccggcctgcgtgaacggagcatgcagctcggagaggtggatgcggttgtcctcaacgccttcggaaccggagaccacgaacggccagatgccctgggcgttgttttcgaatccgttggtgagggacttcagcgtgccgtccttctcataggtgatgccggagtactggttctccacgatgcgcacatcgtcgaagtaggtgtgtgctccgtcggtgctcttgtgagacagggttaccgtggcatcgccgttctcaggcgcggtgaagaacacgtacatgttctggaagtagctggagccattttccgtattgctgttcgtgttgtggccgtatgccttgatgtagttcttggcgatggacttgccggtggagttggtggccagcaccttgccgccgctggttacggtgacggatgcatcgccggtggagcggttgtcgacgccaacatacagcgcgtacttctggccagccttgagatcggtcagacgctgggagacatcgaccttgccggtcaggcgcagcatggcgttgttgtcgccttcaacttcggccttgccggttccggcgacggtccagttgtcggtgagggtgttggagccgccgttgaagccggcgtctaccacatgcatgccttcgctccagttgacctggatctgcttggcttcgcccttgtacaccacgtacggggtttcggcatcagcggtaagcgtcaccttgccgccggagacggcaacggtctgctcgttggtcttgccctgatcggtgagctggtacacctttacgctggagaggttcttccagctgtccggcagcgtccaggtggtggtgccgcccttggtgttccagtggtagagcttctgctcggaatccttgaccagcttgccggtgaaggaatcccacatccacggcagcaggtaggactcgtcgccagtggcgctgccatcgcctgcggagaccacaccggatgcgaccttcacgccgttgaaggtgatggtgcgctggcggtaggctgcgctagaggtgtcgttggaaccacgggagactactacaacgttgccgttggaatccttcagggtaatctgctcgttgccgttgttcgtgttcgggtcggacacggcagcggcattgccattgtcggcggtcagcagcgggttgttgacccagcgggtcaccttgaagtgctggatgaacttagtggacacatcatgggtgtacaggttcttgatgtaggcggcatagtcgttgcggccctgccagccttcgaagtccttcatgttgtagccgccgagcagcggggcgttggcagcgccgccgtattgcgggtagtcgccaacccagctgtccttctggtggttgcgcaggaagcgcatcacttcggagttctcgcccttggaggtgtagccgccgtaggtcagatcagctgcccagtgctggaaggtggagtcgtactcgttgccggaaccccattcggtggtcatacgccagccgttgtcgttgatcatcttgctcatcttgcgggtttcccaagaatcttccgaaccggaagaagtcaggttgccccacacatcgaggtagatgaagtccatgttgtcgccgacttccttgctgaggtcagcgaaacggcttacacgagaaccggatgccagatcgtagataccgtcgatgccgacaccctgatcaagccagttccagccatacctcaggccgcctgcagagttgcggcgcaccatgtcctcgctgaaggccttggcttccggatacatttcggaggcgttgacgtgcacaccgaagcgagcgccatacttggagccctcttccatcatggtgttcatgtcgtcggcgccgccgagacgctggccgatatcgccgtagtccgggtggccggagtcgtggccttcattgccgtagcccttgagcagcacggactggccgaggccgtcggtgttcaaggccaccttcttgacgttgtcaagcgtggtgaggaacgggttctgcgcctgggagccgaagttcatggcgatacgccatgccaccagttcgggaacttcctcggacttgtacgggttgttcatgatgtcgcggtaggcgattgcgccatcctgccagttgacggcaccgtcttcgttctcgtcgccggcgatggccacggccatctgcggcagagcggtttcggccacggtgtacttcttgcccttggaatcggtgaccgtgcggtggtagtaccacggagcgctggccaggcccagggaggtggcgtcaccagtctgctgggtggtggcgtagacacgcgtgttctggctgccgccgcgcacaggagccgccacataggtgccatcgtgctcggagttgctccacaggccggcactcaggccagcaccggagatgaagccgtaggtgtagtcgctatcggtgacgttagtatcttcggtcactgcgaagttggtatcgccaggcttctgcgtgttggaagacatacgagcaccagtgaattgggcattttcctggctggaacgcacggaaacgagactctggttcgggaaggacagcgtctggatggcgttctcctccacaccgttgccctcaggaatgccttcggacaggttgttcttgatcttggtgacgttgaggtgcagctggttggccttgaccgtgatctgaacggtgatcaccgcgtcaatcttcttggcctcatccttgaccttcagcgtgtaggtggcctcggtgtcggaaaccttcttgaaggtcacgtcgtcatcgcccagttcgatgttggtgccgttgatttcaacggtgcgcacatccttggactggccgtacatcaccttgccgtcggtcatcgtgtactgcagcacagaggggaagttcttcttaatctgaacttccatcttcttggtcttcagcgtttcggaggcgacctgaacggttttgttcagggtgatgggatcgatggcaagatccgcgccggagaccgtcacctgctgggagacgtcctcatagccttccttggcaatcgaaagcgtgtgttcgccttcttcaatgtcggcgaaggagaaggtgccatctgcaccggtcttcaccttggtcttatccaaacgcactgttgcgccttcaatggcagcgcctccagcgtccacaaccttgccggaaaccgcgtgcttggcggcttcgacaacctccgggaagtccttgatgtacacgtcggtgacctggttcagccccttccaggagccggccttgatggcaagcttgttggagaggttcgtcattgcggagtaatcgacatcgaatgccttctggccatccacggtcagtgtggcgaccttggcgtcggtccaggagacctgaatgtcgtgctcttcgttggcgctcggagcggcgatgcgattgccgccgtaccaaccgccgttgccaccaccggtataggtctgccagaaccagccgtccgaatcgtagccgatgaacaggccgctgcccgggtcggtgtagcccaggtagaagccgaagcggttggcggagccttcctgcggggatttgatggtggcgtggaaggagccggccttggagaagtcgtaatctgtgccccatacggctactgccggccagttgttgctggagctggggttcgctgccgcattaccgttagaggcagcggacttgaggtgcagccaaccgtttgccatctccaggatttcgccgccctgagcgatgttggaatcaatagtccagccttcaaccgcatcggcttgtgcggaaggagtctcggaagcagttgcagaatcagaagtatcgttgatttgctgaatctgacttgccaaagtctgcaagtcagcatcagacaggggcactgcgaacgcagtacctcccccgctgcccatgcaggttaaggctaacgctgttgccagcgcagccgatatagtcttcttctttttcattaactatattttccttaatctcttcttcgaggtgaagcagatgccttcttcattgaagaatacgcattcgcaattacgataagacactttacaagaagctattcttaatagcaatctcagcaaatacggagaatcgccacatatttgacattgaattacaacgtgagtgaaatcacaaaacccaataaacgactacgttgttaaccttcacatctatattcgcatcatcgcgacacgcgcagggaaaaactgcgcaaaaaaagtaagacgaatttacctgcattcgacgcaatcaatgcagcagcattacagcagcaagccgattgagcaaaatagcaaaagccgccttgcgcaaccgcaagacggctttgacgacaatggtgaggctgtgctcgcttacttcttggaagcgttcacggcatccacagccttctgcagcgattgagtataagccttgtaccaatcagcctgctcgttgagcttcgcagtagcggacttgaagccggcagtgtcgtcagctacgcagccttcgtataccggcagttccacgctcagttccttgttgagggcgtccagcgtggaggcatcctttacatccttcttggtgagcgcagcagcttcggaagcatcgccattgaccaagttgttgtagtcattagtggcgttgcgcacattttcggaagcggcggcgcaagcggcgactgcattgttgtactgagcatcggagtaggcgcggaagccgaacacaccggccacgacgataatggccacgaccaccacggcgataatggcgacggccgccttagacatgtgcttcttctgagcgccttcattgcttgcattgttggcgttgtttgccggtacagcctgctgcccagcggacatacttcgatctccttcgttctcgtactttcatacacacgtatgcgctcttagcgctcttatgcgcactcatatgcagggaagtcgcttttcaagcggctacttccctgaaaacaaaaaaccctcgcattccgcgagggtcattggctgggatgcctggactcgaaccaagaatggctgaaccagaatcagctgtgttgccaattacaccacatcccaatttggcttggcgtagcaactccaaggagttgttcgtcgtacccccaaccggatttgaaccggtgttggcgccgtgagagggcgtagtcctagaccgctagacgatgggggcatattcagtttttcaaccggctgctcggtgaaccgcgcaacgagtgataaatatacgcaagtattcacccttacgcaacttacggcgtgtcgcgcggaatttcaacgatttcaagtgctacgctgccactactgatgaatttgcatgaactctactgacggattatcagtaagcactactgatgaattaccatctaatgcactgatgaaattgcagatgaggcaatgatctttgccttgcacattcatagccggcaaatcagccttcaagaaccaaatgaggcgcttatgttcccttgcgacagcgagcgcgtcgcgatgcttgtaatgcaatgtcacgtcaaagaccgccgcccggttacctatcaaccgtttcatggacgcatgaaggcgaaaccacctacaaggcacgtttcgtgacctcactgcacaaaccagccatgttcaacctcgtacatattctcactggcatgcggcgcagcggtaagactttccagctgttccagctcatcactgaatacaagaaaaggtgggcatctgcacatgcagacgcccaccttgagtgtccttacagctcagccgagcacggaaggaaccttagctcacaggtgctcgcgcaggcccttcaggcgagcgagggaaaccggcttgccgacgatctccatggactcgaacagcggcgggctcacgcgacgaccagacatggccacacgcaccggaccgaaagcgaggcgcggcttgtagccgccctcctcaaccagagccttgttcagggtctcatgcaggttgtcggtcttccagtcagcctcatccacagcctcgagtgcggcgatggccttgtccagcacctcgccggcagaatccttcagctgcttcttggcgtcgtcagccggctccaagtagccctcggtggagagcagggagccgaccatgccggcaacctcacccagcaggcgcacgcgcggctgaaccagcggagcggcggcggtcagcacctcacgctcacggtcggtcagggcatcccagttgtcggcggaaaccacaccgtcgcggtgcaggtacggcaccgagcggcgcaggaagtcctcgggctcaagcatacggatgtgctcggcgttgatggagatggccttgtcgatgtcgaagcgggccgggttggccttgacgtcgcgcacgtcgaacttctcggtcatctcgtccatggagaacacgtcgcggtccggtgcaatggaccagccgagcagggccaggtagttgagcaggccctcgcggatgaagccattgtcgcggtggttgaacaggttggactctgggtcgcgcttggagagcttcttgttgccctggcccatcacgtacggcatgtggccgaacagcggcatctccttggcgatgccgagttccataaggtaacggtaaagcacgatctggcgcggggtggagctcaggaggtcctcgccgcgcagcacgacgttgacttccatcatcgcgtcgtcgaccgggttggtcagcgtgtacagtgggtcgccgttcgggcgcacgatcacgtagtccggcacggagccggccttgaactcgatggtgccacgaatcagatcgtcaaaggcgatgtcttcatcaggcatcttgatacgtagcgcaggcttgcggccctcggcgcggaaggcggccttctgttcatcggtcaggttgcggtcgtagccatcgtagccgaactcggccggacggccggcggcaaggttgcgctccttgatttcctcaggagtggagaaggactcgtaggcgtagccggcttcgagcagcttggcggcaacatccttgtagatggcggtacgctcggactggcggtacgggccgtgagggccacccacatcgatgccctcgtcccagtcgatacccagccaacgcagggattcgaggatctggttgtagctttcttcggagtcgcgcacggcgtcggtgtcttcgatacggaagatcagcgtgccgccggtggcgcgagcttccgcccagttgaacagggcggtacgaatcatgccgacatgcggggttccggtcggcgacgggcagaagcgaacacgaacgttcttgggcagctcgggtttggtgttttcagcatcagtcataatcccctattgtgccgcgcgcgccggacgcggcgaacgatgccctcgctcttttgcttcgctactggcgttttagaccgacatcatcccaaaacagccattttccaacgaaatctcttttgcctgccatttgcttttcttttgcttttaaaatcaaaagaaaagaaaacagcaaacgagaatcagcaggccaggcccacgaacagcagatcccagtcttgagattcgtcttcgtgcgattcgcgctgctcaacggcggcatccgtgtattcgtggttcatggcattccctacatctctgtatgttgctttatgcgtagcgccaaaagcttcgtctgctttccagttccgcccccgcaactgtgcgcaatattcatgcaacaggttacacaaccgatcgataacgttcaccctcaactgatatcgatttgataaccatcgattctttccagtgcattcaccacaactttggacattatttggcgcaattgttgagttttccactcatgcaatggaagaatatgatgtgacacataggtcttatgaaaggggaatcaatgtctgatcccaacaatgtgcctttgcctcagcagcctgaggccaacggtacgcccacacctaatcccgtaccgcagtatggcgcaccggccccggcgcagccctcacagccggcgcagcccgcttacggccagccggcatacggtcagcctgctccgaccgcgaactcttatggccaggccgtaccaacctacggtcagcccgcgcccgacgccaacacctacggtcaatccgcaccggcgtacggcacaccggcccccgatggcaatccttacggcccggttccgccgtcttacggccaatacgccgcgcccactgccactgtgccgctggataagccttactacggatgctccttccaagaagccttcctgcgcttctggaagaagtacacggtgttcaagggccgcgcgtcccgcagtgaattctggtggtgggtgctggccgctttcggcatcaatatagtgctggacatcctcaacaccgccacagatgaaaagcttggcttcctcgccaccatttggggtctggtgaccctaatccccaccctggcactttccgtccgccgtctgcatgacacgaacaagcctggctggtgggctgccattttctatatcgcgatggttatcggccttatcatcatgattatcggcggtggtgcggcactgtacggcgggttcaggagccttggcagttatgactatggttatggcagcatggccgccggcggtcttggcgcggcggtcattggtgcgttgattacgctggccggctgcgttgtctatatcgtgttcatggctcttcccagcaagccggagggcgcacgttttgacgatggcgcagcggcaacccccatgcctcagggtgcttacggcgcaccatacagcacgcctgcacccccgaatttcgccgctccgaacgcgcccgcacccggcttcaaccagccggccccggcttacggccagccggccatgccaacccccgactatggccagccggctgcacccgcacctgattacggtcaggtgccggccccgcagtacggccaaccggaggccccggccccacagtacggccaggttccgccgatgcctcaaaacgccggcgacgaatccgcaacaccttctgagcacacggctcccgccggcgacaatgcccagaaaccctggcaaggccagtaaccgatatcggggaacttccgttgaagaagttccccgcaaccaatgatgaagccctactcaacgcgagtagggcttcatcattctcggcactgtattatcggcactgtattcagccaactaccccaacggcatcacggcaatggactgcgaaagcatatacgattcacccggactaagggcaacgatacggtctcggcacgccgctgcctccacggccacaaagccacgccattcacccgtcttggcatgggcaatggcgttgccgccctgctctccgggattccacaccaccgtctgcggcgagccggtcttgccgatgcgaatcacacgacccagcacatggtcctgcaattccagtgcagcatcggaataatacacacggtccaccggctgatcgccgaacatcaccgatggctgttcttgtagttttggcgggaatccggcttccgtggcatccagatatgttgcaccccgcaaaccgaccagccgcgcgccgagcacatcgccgacatgcagatacgagtgcagcgccgcctcatacgacatcggctcacctcccgtgttggtaacggtcagcgtcatcgtcagcgtatcgctggcacacacctcgtatgcggcatggaaacgcacgttgggttcatcctcgatccatggcacttcgccagtcgtcagtcgttcggaatccagcacataccgcacacgggcaccggtaaacgcctcttcgtccagcgcccactggcgcaatcgtgcgaacccatgaatcggtcgcttcgcagtctgcccgccatgcacaaaccccggcccgaaccaggggaagcacaccggcactcccccgccaaccggctgaccagcttcgaaatgccatgtgcggggcgtccagattacatccggctgccccgccggggcccagcgcagcagatgcgccccgtaatcgctgattaccgcgctaccgccgtcattggtgagcgtgcgcagattgacgccattgcccataagtgtttcttcttccgttgcgtaagcgatgttcttcaccacatagacgatttccttggcacggaggaatcgcgagcaggggtaagagaaccgatcaggcgggctaagcggccttgattctcacaactccacggtttctttgccagggtcatctttaatgtgcgcaaacttggcggccaaggcctccttgttgcgcttttcgtcttcttccttggctttcttcttggcttcgtccgggttccagagcacatcgtcgcggtgcttggtccattcggcaccggccagcagggcgatgtattcggcggtggcggtcagcgtgtccgcgccagcggccttagcgcgcgtatcaatcagctcaagaatctgctgatcggtcaggcatatgcgcggaatcgagcactgctcgcgcagctcgttgacgtacagcagaatcggcagcaccttgaccgcctgagctgcggcgtcgccatcgtgttcgccgtcaccggtcaccacgctcagcagcgcatcgcacacggcgagcgcagtggcaaaacgggtggccacatcagcgggctcgctggacgtagacagacggccctgcgcggcgtcgtcttcaatctgggcttccacggcggcaatcgtctcacggacctgagccgcaacatcggtgtcccaacgaacgtccaacgcttcggcggcgtcaaagatcagctgtacatcgccggattcggagtagtcggccatcgtgtcgtaggcatcgttggcggccagcagcgtatcgacgatgttctgtggacggccgggaatctcatcggcgccttcatagacgaattcggcatcgggcaccgtgacgtcttcaccggtcagcacgcgggcgaatgcgcgcgtgacgcgaacctgcagattctccgcgtacttggcgtcattgtccatctgcatggcttcggtcaacggccacaggctgatcagcgccgagccggcttcggcggcctcagttaccgtcggcaatgccgtgacctgtgcgattgcctcacgattgagttcaatggtcatctatgctcctttgcgtccaccactcgattgtagtgcgtctcttggctcccctcagtcacctacggtgacagctcagcagcaattgtggacgggccacgcccgcgcctcaatagctcgcctatcggctcgtcttcgcctacaaacagtccactggactgtttgcttcgcggctcagcctcagagaggggaaccaatgtcctaacaccagtgtgccgttacttgacgttggccgctgggtcgacatacgtgattgacatcacacggccggtttcgttgtcgtacgtcaccgaggtcacggaggcgagcgccgtgtgccgcaggaacatccagtgctcggggtggccggtctccagataatggcgataactgaaaatcggcgattcgtggctgaccaccacaatctgctcgccggggtgctgggccaccttctcgcgggcgaagtcgtccatacgcgccgcgatgtgctgataggactcgccccagctcggcttgtacaggttggtgacgagcttccagttgccgttcttccacagcgcgccctcgccatggccgatgcgcttgccacggaactcgttgccggcctcaatcacccgttcatcagtagtgagcgtgagcggagcctcgccacgagcctcgcgcacggggttcagcgcatcgagaatcgcgccggcggtctcgcgcgtacggtcgagcggcgaggagtagacggctgcaatcgtattggtttggggattcttggccaagtacgtggcggtggcttgagccatgcgacggccaaggtcggaaagatggaagtcgggcagtcgctcatagagcagatggtcggggttatataccttgccatgccggacgaaatggatggtagtagcgctcatgagtcgcctttctgcttcccgccctgaagggcataagaacgttgtcttaatatccccaatctaccgcgtgtcgcggagtggacacccgtagagtatccatgacgcaaatatgcggatgggggaaaatccgacgcaaactttgcgcgaccatggacaacacatcattcgatgagggcttcgccggcaatgccacaccagcgggggacatccaatcgggagcggaaaggagcgtagtgctgttatgtccaataactcgtccaactcgaactcgggcgccattctggccggcatcaaggaagcaggccacaaagtttttggtgggtatgcggaactactgcgcattccgcataccgcccgttattccatcggctcggtcatcgcctgcatgccattcccgatggtcggcatgaccatcaccatttccgtacagcattattacggcaactattcgctggccggcatgctcaccgccattcaggcgattgcgctggccgtggccacgccgctgctaggcaagctgaccgacaagttcggccagaggcaggtctcgattccgacgattatcgtttggattgtggccgccatcgcgctggtgacggcgattaccaaccgcgcgccggaatgggtgctgtactgtctgacgccgttcctggccgccattccgccgtggggcgcgatgagccgcgcgcgctggaccaagattcttaagggtgaccgggagcgcacgaaccgcgcgctgtcactatgcggcgtgctcgacgaatgcatgtgggtgatcggcaatccgctggcctccacgctggccgtgatctccggtctgctggcattctcgttcaccggcatgtgcgtggtgatcggtgcgctgatgttcctgaccgagctgaccactgagccaccgtcgcagaccgcgctggcgcgtgccgagggcatctcccgcaaggaataccgtgagcgcgaggccgccaaggctgaggcgctgaaggcggaaaccgccgccgaggagacccgccgccgtcttgagcgtgaaggcgtgaccgatgaggccacgattaacgcagccattaagcaggcggtcgccgatgcgcgttcgggcaagaaggcgtccatttggggtccgggtctgattgcggtgtgcgtcacctggttcggtttgggcgcattccagtcggccacgggcatctcgattattgcgttcgccaccgaagcgaatatgaagcagtacacgggctttgtgtttgcctgcttctccttcagctcgctgatgggcgcattggtgtacggcgcgaagaactggtcgattgccctgtggaagcgcttctacttctgcctggccgtggtgaacatcggcatcagtacgttcctgttcgccaagcatctgtgggtgatcatgatcatctacttgattattggcgtatgccaggccccgacgtggatcaacggcaaccagctcatgttgcatctggtgccgccctctcgcttgaccgagggcatggcgtggatgggtgcgatgaattctatcggctcctccgccggttcggcgattgccggccagttcatcgaccgcatgggctcgcatggcggcttcatggtggtgaccactttggcactggtctcgctggcgattgcgctgattggcttcaagcagatcaagggctccaccgagcagccgaccttgactgaagtgagtgtgtgagacaaaaagtaagccccctctgacgagggggcttaatacgtcaaaccgctacttcggccagcctttgggcgtgtgttccagggaccagatgccgagcttgtgggagaagctgttctgccacttggcttcaagctcctcggcattcaatcgattttcagcggacttcagacggttcatcgcattggtgtgcgtatcgtcgagcagccacttgcgaatcaagaagttccagatcattaccacggcagtggccaccagcttgccgatattggtgcgcaacagatattcggcatgctgcgatacataggcatcgtggttcatgccataagtggaaatccagataatcgcgtcattcatgaacagaccgactacagcgcccgccacgaagataaggatctccatccagcgcgccatgtcatcacgatgcttgaatacgaatttcatgctcgccagatagttgaaaatcagcgagatgatgaaagagatggtggcagccagcacgttgtgcatgtggaatatgccaaccaataggttgaggataccccagtcgataacaaaggcgatgacgcccacaatgccgaacttcatcagttgttcaatcagttttctcacaagggtattcaacactattgggctgactgcggaacatatattggctggaaaggccaataatctccccaattggccttgccccggtccgttctgcaagcagcttcctacatccgcatgccatgttcaacagcagccgctgaggctagactggaagcgaaccgaatcaaggaggaattatgcccgttattcacactcatgtgtccgtgtccaccacccctgagcagcgcgaggcactgaaggccgcctatggcaaggcgattaccgccgtgccgggcaagtccgagggctggctgatgtgcccgttcgaagacaatatgccgatttacttcggcggtagcgatgaccagcccgccgcctatgtggaggtcaacgtgttcggccgctccgtgccgggctctgcttgggaaaagctgaccgagagcattatggccgcgctgaactccacgctcggcattcccgaggaccgcacctacatccgttacaccgccaccaccgactggggctggaatggtagcaacttctagttgccaccattcccctcgcagcatagctgctcgcatcgcctacggaaagcccaccgggctttccgtttaacggctcagggtagcaaattctggctcccctcagtcagcttcgctggcagctcccctcaaagagggaagctcagatgtagaaagcccgccggcggcgggctttctacgtttcaaggggctgatttccaacattcagaagctctactagcgtttcaaggggcttttaaaacaagaaacccggagtataaacattgcaatttcaatggtcatactccgggtttcgcaatcgaagagcccctcgaaacgcagatagacctccggaaaaccggaaatccgcccctcgaaagcgagttacctcaccttgtgcctgtcatcacacgatcttgggcatgggggtggtgaggctggtggtcaggttgacgtggaccagaccggcaccggcatgcacctcgaccttcttcagggtcacggtgcgctcttcttcgggggcacggtcgttgtcggtcatggtcgccggggacttgaccgccacgaacgccagatcgtccagcgagatgcctgcgctctggcacagttccatggcctcggacacggactcggtgaagcccggcttgtaaatcacgcgctcggccggtacgccgtaggcgttctcggccacccacttggcgttctcggtcagggccatgcccttgtgcgagtgcggttcggccggcatggagccgttctgcaacgcgtcgacgaaaccgtcaagctgcggggccagcgcctcgccgccgtcgcggaacaggttgccgatgatcggcgtgcggaagcccagctcgtcggcggtggccttcagggacggaacctgatcgtcctcgccttcccacaggttgatgagcgggaaggtcggaatgtccaggttctccaggcgctgcacgtggaacgggtagcgccaggccagctcgggatcgtcgcgccaggtggaggcacgggtcaccacgatggcggcggacggccactgcgcgccgtattcgcggcaggcgatgtccagccacttctgggcgccggcgtcggtgccgtagccggcctcgacgatgaccacgtcatgcagggcgcaggccatttccacggagaccaacgtcggaatgccgatggacacgttggcgaacgggccaccgtgcacgtagaccggtgatccgttcacggtttcggtcttggccggcttgaccgcgtcggccagaatgccagtgatacgccacaggtccacgaattcgccgaaggtcacggccttgccgttcttggtgccggcgatcatcttggacacgcgctcggaaatctcgtccatcgagcgggagagcaccacaatctgcatgagctcgcaggtcggcgtgagcacgaccttctccggcacgttgcccttgccgtagtccacggcggtggagcgcagggagcggctcggaacctcggagacacgcggcacgagaatcgtgtcgagcttgccgtcatcgatggccttctcggcgaaggagacgagcaggttctgggccgcctcgatggcgcccatttcgccgcacagaccccagtcgatgagctcggggtgggtcagggaagccttgccgccgccggaggcaccgcccttggaaccggctgcggtgatgcccatgctcggctgacgcagcacggcggtcgcatcaatgccgcgcttgttcagggcgtcgatcagggcgatggtcgtggtggtcttgccttctccgcgcgatgccttgagcggcgtatcggcggtgacgagcaccaccttgccgtgcttgcgcggggcgtcagggttctcggccaggtacttcatgtagccgaatgcgtcgatcttctggaccagaccgtactggctggtgaagtcttcgatggtggtcatataaagcctttctgtgtttgtgtggtggggcggggtggtggggcggcagtcgccgcctcttcgcctaaaaacagcccactgggctgttttcttaacggctcagcccctcagggaggggagctcaatacggactaaaagtcggacatgtggaagccgttcttcatttccatgctgcgagtgtacagcacggagtcaagcagcttttcggtttcctccttgagctggtcggccatggtctggttggcggcggcgagaatctcgcgcacctcggggttacgcagcgcggcgatggtctcgtccggggtcatcggctgcacatcgccatccacgttgtcggcctcaaattcctcttcagcggcggactgcgcggcttcctcggcggccgtcaagcccagacgggcgatctgctcgtcggtggcggcgaccaagcggtggcccatcgcacctgtcttctcctggtagcgctcaacggcgttggacgtggagcggaaggcgccatcgcacagggcggcgatgatgcggttggcccagtagaagttctcggacgtcacgcgggtggtggtgtcctcaaggtaggcgggcgtggtgtccacgttcgggaagaacggtaccagcgtgttgaacgggttggagccgtatgccatccactggatggcgcgggaggcctgcgggcggtacgggcggatctgcatcaccgcgagctggctctggcggttgatgccgatcgtgcggtacatgtggcgggtgcgctcatcgcccagctggccgtacggatcgaacggggtgccctggtagtgggagctcagcacgtacttgatatcctcgatggtcaccttgcgctcaggctgacgggcccacgggatgtcgtcggaggtgggcttgtggtcggcgtccgggccgtcccacacctcgtcgtacgggttgaggaagcgctgcatgtaccaggcgcgcggggtgttgtacacgtggtcggagtcggagtgggagccgaaggcatcgcgcgggttgaacggggtagtgttctccaccgcgaggtccaaatggttggtttcgatgaattcggcaaggtcttcggaacacatgtgcgcttcctggtcacccagagcgtcctcaaggtcgaattcgtcgataccgagctggttcggcatggtcacgtaggcctcgtccggcacgcgcttggcaatccagtgatggccgcccacagtttccagccaccagatttcgttggagtcggagaaggcgacgccattcatctcgtaggtgccgaattcctcaagcagcgcgccgaggcgctggacgccctcgcgtgcggtcttgacatacggcagcacgatggtcaagaagtcctcttcgccgatgccgccgggcacctcgggctcatcgcccttggccggcgtgtattccacgaacgggtcggcgccgagcacgcgctcgttggtggtcagggtttcggtggcgctcatcgccacgttcgcctcgttgacgccggcctcgccccaaataccttccttgaggtccgcgttcggcacggcggtgtactgcagcgggtcgtccggcagggtgatggttaggtgggagatcaccgacttgtattcgcgcggctgttcctccggcttcacgacgatgaagcgcttcgggttgaactcgccgttcgcggaatcctcgttgcgggcgatgatggtcgagccgtcatagctcgcgtctttacctaccagaatcgtggtgcaggccatagtgtgatggtgtcctttctttgttgtggtcacgctcccactggcgggagctggacgacgaagtcggactgaaggtggttttgtactgacccacccccagtcagtgatgctgacagcccccgcctgcgggggctcatgtggctcacgccttgccggtcaggaagatgccgtcggtgtcgggcacttcaccgctgttgcgcagcgcgtgcaacagctcgttgagccagaagccctgattcaagccgggcaacggcttcttggtggcccacacctgcaggtagtactcatgatccttgtccggcggctgcggaccgttgtaccgcatgatcaccgccgggtcagtgctgcggcccaagaacttggaggccgaggagttgcacccctgcacggtctcgggaatcatggccggcagctgacgggagaagtccggcgggatggccaacgcatgcgaatcattgaagtcgtacatcagcgcatcaatcggcagattggccacggaccagtgaatccactcgaagccgcagaccggaatcgaatccgggtccacgaactcccagtgcaggtagcgggcctcgggatccacatcatcgatgtagaacgggaaggagaccacaggcacgccaccattgaaatattcaggggccgcagccttggcgaaatcgtccgggatgacggtgaaatcggcggaaatcttcatacgtcccagtatcgctcatatgtgtgacgtactgggagctgtgcgttacggggtctctcccccagtctcgctgcgctcgacagcccccactcatcagagggggctagttgcgtcgggttatgagatcagggcgcagaagagggactcgaataccagtagcgggttgccgttgccggctaggcgcttgcgggcgtgggccacttcgtccagacgggtcacggcaccggcccggttcaatcgcaccgacaattcggtgatcgacgagcggttctccaggttgatgaggcccaccgaatcctccgcattgttctgcagcaccgccacatctcggtagatggaggcgatggagttcagcgcacgatccaatacgtcgcgcgtacggcgggtgaccaaacgcttcacatcgtctttcttggcaatctggttgaatgcgccacgcagtttcggcgggatgcggtcgctcggtgccagtccgttgatgcggcggaattctgcttcctgaccggcggtgatgcggttcgcgtctgcctcggcctgggccttggcattgtcgataagattgccggccaacaacactgcatccgaggcacgggccagattcagcacaccgaccacaagttcatcgcggtcggacataacccgttcgtcggtggcgtacaacttggcgatgccgatatggccttcggcgagtcgggccgcacgctgcgccacttttggctcgacattggtggtggaggtcaggaatccggccaccgcctgggtggagggcacggcgaggttcacgatgcgtgtgcgcgagcggatggtgggcagcacgtcctgagcgctgggcgcgcacagtagccagatgcaatgctcggccggctcctcaatctctttcaagagcacgttggtggtgcgctcaagcatgcgatccacgtcttcgatgatgatgatgcgccacggtgcggtggcgggcatctgctcggaggtagtgatgatctcacgcacctgatcgataccaatagtcaccttgttcgtggtcagcaccgtgacatccggatgcgtgccggcaagcacctgctgggtgacgcgcgtgggctcagcgctcatgccgtgatccgggctttccagcgccgccgcaaacgcacgagccatgttggaacggcccgatccgggaggtccacagatcagccacgactgggtgatctggctcgggtcgccctgcgcgatacgactgagcatgtcgattaccggcttttggccgactagtgaatcccatacgctcatgcgagctccttgatgtcggattcgatggcagcccataccgcttcaatgctctggctcgcatcgataacgcggaaacgattcggctcggcggcggccaagtccaagaaggcctggcgggtgcgggactggaagtcatcaccggccgattccatacggtcttccgcgtgttcgaggcgatggtgggacagggctgggtccatatccagcaaatacgtgcggtcgggcagcaggttgttggtggcccacatgcttaaggatcgaatctcttctggcgtgagttcgcggccaccggcctgataggccaaggaagagtctaaatagcggtcggtgatcaccacttcaccgcgctccaatgccgggcggatggtttcggcaacgtgctgggctcggtctgcagcgaatagcagcgcctcggcgcgcggtgcgatgtcgacggcgcccccatccacaccgtgcaacagcagttggcgaatggccttgcctaacgcagtgcctcccggctcacgggtaacgaccacggtacgcccctgagcctcaagatacgcatgcagccgctcgacttgcgtggtcttgcccacgccatcgacaccttcaaacgaaacaaacagaccgctcatgctattgaccttagcgttaggcgcagagttgcgcccaacaggcagttaaaccagctctacctccgtttcaaggggctgatttggtcttttctgaaggtctacttccgtttcgaggggctgttgcccaagtagacaacgttccaaaacggcggaatgacgttggcgcggagccgttcatactcgtggttcagcagatgaccagccccttgaagcggaagtagatattctcaaaacgagaaatcagccccttgaaacgcaagtagagcaataattccgctcagccacgcttgggaattacggcggggcgctcgtagtcctcgttggcggtcagccagtcgacgtcctttttcacagtggcgggggtggaaccgagtttttcggcgatgcgctggttggaccagcccttgttcgccaacttcttgacttcggcacggcgttcggcgcgcttggcctcctgcgccgaaaccgcagccgaggtaccgcccttcttgcccttgccggcaacggccttggcgccaccagcacgcccagcaccgcgacggccacgggtggagggaccagccgcacgcttttcggcgagcagtcggaaggcgtcatcaggggtgatggattcaggcgtgtactgacgcggcaccgtacggttggtctcgccatcggtgatgtacgcgccgaaacggccgtccttgatggtcacgttcttgccggtgttcgggtccttgcccaaatcacgcagcggcggcttggcggcaccacggccacgcccgcggccgtacttgggctgcgagaacagttctttggccttgtcgatatcgaccgtgaagatctcgtcttccgaggccagcgagcgggtctccgacttgccgtcggcacccgtcttggtcaggtaggggccgtagcgaccgttgttggcggccaccgtgcattcggatacctcgccggtttcggcgttggtttcctcgtatgtgcccacttcgcgcggcaggctcagcagctttagcgcgtcttccagcgacagcgattcagggctcatcgtcttgaacaacgaggccatcttcgggcgcgacgcggcggcggccgcggccttcttcgaacccttcttggccgcagaagcaccagcagtatcgccagcagcgccagccgaagcctcagccggcggcaccaacgccacatacgggccgaaacgcccattgcgcacctcgacggtaccgccggataccggatcaacgcccagctcgcgcggtccaccggagtggttgtcgatcaaatcgcgggccacggccaccgtcagctcatccggcgcgatggtgtccggcagagacgcgcgcttcgggttgccttcggcgtccagatgctccatgtcttccagatacgggccgtaacggccgacgcgcacgtgcaggccgtcgccgatgtcgatggtgttgatggcgcgcgcgtcgatctcgccgagctgcgcgacctgctgttgcaggccttcgtgcgcctcgtcggcgttgcgggcggcgccctcgccggaaccgaagtagaagtgggtgagccagtcgcggccggattcctcgccgtgggcgatgcggtcaaggccgttttccatctcggcggtgaactggtagtcgaccagcttggggaagttcgtctcgagcaacttggtcacggagaaggcgagccagctggggatcagcgcacggccacgctcgtatacgtaaccgcgatccatgattgtggagataatgctcgcgtaagtggacgggcgaccgatctccttggcttccagcgtcttgaccagcgtggcctcggtgtagcgggccggcggctgggtttcatggccgtccggttcgatgtcgcttgcctcgacctgctggccgacgctcatcggcggcagggaggtgttggattcggaggcgtcacccctgacggccttggcgtccgtcttgccggcggcagcagcctggtccgagccagccccagcgccgggagcggcggccttgggcttgcgcccctcccccgtggccttcataaagccggggaattcgatgacggtgccggacgcctggaacacggcctcgccctcggtggggccggccggcgcagacaggcgcacggtggcggtggaaccggtggcgtcagccatctggcaggcaagcgtgcgctgccagatcagcgtgtataggcgcagctggtcgccgggaagtttggaagccagctcgtccgggtcgtggaagcgcgagcccgccgggcgaatacactcgtgggcttcctgcgcgccagcggttttggtggcgtactgcttgggctcggcggagaggaacttgtcgccgaaatggtaggagacggcgttgcgggcggcggtgatgccctcctgcgacagcgtcaccgaatcggttcgcatataggtgatgtagccgttctcgtacaggctttgggccgcgcgcatcacggcgcgagcacccatgccgaggcgattgccggcggtctgctgcagggtcgaggtggtgaacggcggctgcgggcggcggcggtacggcttggtttccatcgacatcacagtgaaatcggcggtcttcagcgccgaagccacggcggtggcaccagcctcatcaagctggcgaacgttcgccgcgaacccgtccggggtcagctggccgtcggcaccgaaatccttggagccggcgagtcgcttgccgccgagcgcgatcatgcgggcggagaattcggcacgctcccccagcgcgtcaggcgcggacagcgtggcgacgatatcccagtacggtgcgcgcttgaacgccatgcgttcgcgctcgcgttccacgatcaggcgggtggccacggactgcacgcggccggcggacaggcctgggcccaccttgcgccacagcaccggcgacagctcatagccgtacagacggtcgaggatgcggcgggtctcctgtgcgtcgaccatattgccatccacatcgcgcgtgttgttcagggaggcgttgatggcgttcttggtgatctcgtggaacaccatgcgcttgaccggcacctcgggtttcaaggtctgcaccaagtgccacgcgatggcctcgccctcgcgatcctcatcagtcgccagatagagttcatcggcgttcttcagggccgatttgagttcgctgaccgtacgcttcttgtcgccgtcgacaatgtaatacggcttgaacccgtcgttgacgtccacgccgaacttgccgaacttggccttgtctgccgcgggcacctggctgggctgcgcgaggtctcggatatggccgaccgacgccatgacggtgtaccccttgcccaggtagtcaccgatcttgtgggccttggtcggagactccacaatcaccagtttggtagccatacccactccttatgtattgcgcgaaacacacgacgtttctggcgtcataatactcatgaatcatgtccaactgccaaattccgccgttgtgccgggcaaattcggccgttcgcaccccatgttttaccgtttgggcggtgccggcggagcgccgatcagacccagccggcttaagggcgctgcagtgatctgacgcagggccagcaacagtccgaatgcgagcatggccacacccgcaatgcccacaacagcgctgacattcgccccctgaaccgcccagctggcgctgacattgagccccggcaccacctgccagatcacataaccgctgtaggcgagcaacagcaggcccccggtaatcagcacgctgccgacgatttgcacgctcactgaggagacgcggcgacccggctcgtccatgccggacttgcgcgtaactgccagagcgagcagggccaatcccgccaccagcaggatggacatcgccacatccgaagggcgatgccattgtccgtatatcacggagacaccgacggtcaccgcccaaaccacgccgatgacgcccgccaaagctcgaaccgcacgaggcacggtaagcagcagaatcaccgcacaggctgcggccagcatcgtgtgaccggaaggcgcggaattagcggcaggcgattcagtgttgatgatgaacggacgcggcaacagacccttgatacgggtgacggccaagcagaccacggcgaacacggcgatttgcccggccaaccaccagcggcgtcgaatcagcgccgtaataatgccgattgcggcaattgtgcagctgacagcgataaccagccaggattgtgcgacggcgttcatcacgccggtggcccaggacggtacatcgttgtgcaggtttttccagaccagttcgtcgtacgattgtccgttttcggtaaacacgcacccccaccacacgccgaagccgatagcgatcaggagcagaccgaataccacgcacagtacgcggctggagattcgcgggcgcacggtaagcgggtcaagccgggccaagccgcggtcgatatcagatgccccatccgcatcgtccatgtccagcggcctgaaatcccgtaaggagcctgatgtggatgccgatgcatctgaaccggagaccgggccgagcgcagccaatgggtcaacaacgttcgacgacgagtcaggctgtgctgcgcctgagccgaccagattgaccgccgcatgcgggtcgcgaattctaggggtctgtgcgtcattcatacgttcgactgtacggccgcgccccggacaggggaccacgctagtgccagctcacagccaaatccgcacataaagaaaacctccacgcacccgtcagaggccacttacccttgctgcattcctgccctgggggagttgggtgacatagcgccgcgtggaggctggggataagtctatggagacgtatggaccagcgcagcgacacgaaacgtgcgcgccgggtcgcacgacaggccaaccagcgcattcaggcaatattcatgcagcatcaagaagcgtgcccaattgtaagaattccggaaaaataccggcataaacgcgtgtggctacgctcacgtcaaacgattgttcaaggccaacagttacggtggacaccatggcttcttatactcgtcgtgcacattcgggaggcaatggccccgctctgaggcaaccgcgcaccgcgcaaagcagagccggccactccgcacaggagggcccctatacgccccaggagagccgttcccgccacgcaagccacaaggcttccaatagccatcgagccccgaacaggaagaaaaagaacacaggaaaaggcaagcaccgtgtactgaaatgggtgctgggcatcttcttctccctgattggactgggcttgctggccggtatcgcagtattcgcatacctgtacaccaccactgaggtcccgcaacccgagaagttcgcgttggccgagaaaaccaccgtgtattacgcggacggcaccaccgcgatcggctcctacgcggagcagaatcgtgaaatcatctcttgcgaggggctgccggactacatcggcaacgcgattgtggcgtccgaaaaccgtacgttctacacggataaaggccttgatctgaagggcatcgcccgcgcattcattaataatgtgaccaagggcacgcgccaaggtggttccaccatcactcagcagtatgccgagcggtattacatgggcgaaaccacatcctatgtgggcaaggcgcgcgaggccatcatggccatcaaaatcgcgcagaccgaatccaaggacgaggtgctgtgcaattacatgaacaccatctatctgggccgcaactcctacggtatccaggcagcggccaaggcatacttcaataaggacgccaaggatctgacgctgtctgaggcggcgatgatcgccggcattattccgtcaccgtccacgtgggatccggccgataacgccgatatggccaaatcgcgcttcaagcgtgtgctgaacatcatgcaggaggatggttacatcactgccaagcagcacactgatgccaagttcccgcagaccgccgcggtggcgcagcagaacgaatacgcggggccgaacggttatctgctggatatggtgcgccgcgagctggtgcagtccaaggcctttaccaaagaggatttggatactggcggatacaagatcatcaccaccatcgacaagagcaagcaggatcttatgcagtccatcggcgacacccgtctggacgacatgcctgaatccctgcaaatcggcggcatagcgctggacccgaagaccggtgaagtattgtccgtatacgccggttcagattatctgtccaagcagctcaacaatgccgatcaggccgtattcgaaccgggttcgactatgaagccgttcgctttgctgggggccgcgcaatccggcgtcagcttcgatacgttgttcaacggcaattcccaccagcacttcaccggcttggatcaagaggtgaacaacgctctggagaacaactggggcaacatcaatctgtatcaggccaccgccaactcggtgaacacggtgttcatgaacgtcaatgagcatctgacgccgaagcgcacggccgcaatcgcccatgaagcgggcattcagggcgatatcgatgaaaactccatgtacaacgtgctgggcatcaacgccctgaccgtgtgggatttggcgcaaggccattcgaccatcgccaacaatggcgtgaagaacaccttgcacatggtgtccaaagtgcttgattccaacaataaggacatgtacaacgcgcccagcaacggcaccaaggtgttcgatgccaacgactgcgctttggtacagaaggccatgcagggcaccaccacgtacggtacggcggccggcacatccagcatgttgggccggcccgtcgccggcaagtccggtaccgccaacgacgaaatggcttcgtcgttcgtggggtacacccccagcatgatgaatgtgtgggctatctggaatccggacgataagggcaatccgcaagtggtgccagccttctccggatacggcgtctcttccactggataccccgcccacctgttccaggagttcatggctcaggccttgcaaggcaccgaggcggagcagttcccgaccgctaaagacaacggcaagatcggcggctccgacggcacttggggcttgggcaagggacagagcaacggcctgtccaacaacaccaacaagcagtccaccgaagacgcgcagaagcaggctgagcaggacgcacagcagaaggcggccgaagaggaagccaagaagcaacagcaggctcaggagttcgcccagcagtgcctcgccaatccgagctattccaccgagtgcccgaattatcccggcaccactaccggcggagatggcaacgccggcaacaataccggcggtgacaacgggaacaataccggcaacgataatggtaattccggaggcaccggcgggaacaccggcaccaacggcgtcactcagtagtaagtaaaacacagacaacaaggctccctctgatgcaatcagagggagccttgtttttgttctgttagcgctcagcgcttgcgctgggaacggttgatggcggagataatcgacttcagggcgctagtggtaatcgacgaatcgatgccgacgccccacacgatctgcgcgtcatcggcctcgccgacctggcattccacgtacgaggcggccatggcgtcggtgccgacggacatggtgtgctccgcgtaatccataatcgaggcgtcaacgccaaagttggaaatggcgttgaggaaagcggcgatcggaccgttgccgatgccggagacctcgcgctccacgggcgcatcgaccccgacgttcacgccgcggtcgagcagacgagccttgagcacggtgtcggagccatcctcaccggagctgacggccaccttgagcagcttcaagcggccccacggcacgagcgaggcgtcatgagtatcgcccacaaccacaccggcggcggtcatgccggactgttcgaccggcaggtactcgtccttgaacagacgccagatatcctcgtccttgacttccttcttggtcgtgtcagcgtagttctgcacgatcttgtcgaattcgatctgcagacgcttgggcaggtcaagattgtggttggtcttgagcaggtaggccatgccgcccttgccggactgcgagttgacgcgaatgatggcttcgtacgtacggccgatgtccttcgggtcgatcggcaggtacggcacaagccacacgaagctgtcgagatcggcgccagcacgctcggcggccacctgacgagcctcgagacccttcttgatggcgtcctgatgcgagccggagaacgcagtgaacacgaagttgccggcgtacgggtgacgctcggaaatcttgatctggttgcagtactcaaccgtcttgcgaatctcgggcacgttggacaggtcaagctgcgggtcgatgccttgggtgagccagttgaggcccagcgtgaccaagtcgacgttgccggtacgctcgccgttgcccagcaggcagccttccacgcggtcggcgccggccagcacggccagctcggtggcggccacgcccatgccttcgtcgttgtgcgggtggagggagagcaccacggagtcacggtcgtcgaggtgggtggagacgtactccacttcgtcggcgaacacgttcggcgtggtcatttccacggtggcgggcaggttgatgatcatcgggtgctcgggagtcggcttgataacaccgatcacggcgttgcacacctcgacggcgtactccggctcggtgccggtgaaggattccggcgagtactcgtagtacaggtcgatgcccttggcctcgttctcgaggtccttgcacagttcggcggcgtcggtggcgagcttcttgatctcctccttgttcttgcggaacacgacctcgcgctgcaacacagacacggagttgtagaagtgcacgatggcgcgcttggcacccttgagcgcctcgtaagtgcggcggatgaggtgctcgcggcactgggtgagtaccacgatggtcacgtcgtccggaatcagctcacgctcgatgagcatacggatgaagtcgaaatcggtctcggaagcggacgggaagcccacctcgatctccttgaatcccatggagacgagcaggttccagaaacgcagcttgcgctcggaatccatcgggttgacgagggcctgattgccgtcgcgaagatcgacggagcaccagcgcggcgcgcgctgcagtcgcttgcccggccacgtacgctccgggtaatcaaacgggatctgcttgtcgtaggcggcgtacttgttgtacggcatacgactcggcttctgcggatcgccaatgaatcgcgccggaggcagcagcgggtcgttgttccccccattggacgctgcggctaccgctgcgagatcaaaaacggatgattgatcctgacccattgttcctcctttactgtgtgaaccattcatacaatcgcttattggatattcgtttacgcattggtaacatgcataacttcctctatcctagcgacggcccattccaacatcccgttcatctcacaatacgccagcacacttagcgttccgacgcagcactactacttacagctatgcgtgggggcgcatgggcgacgtcctcgcgttcttcgactgggagcacagcgcgaacgggcccaccgaggccatcaacggaaggctcgagaccctcaggggcgtagccctgggattccgcaaacctcgacaactacatcaccagaagcctgctgcacgccggcggcttcagacacgccatccaaacccacctctgacacatgcccctacacgccaaaatcggaagagcccgataacctgctatacgacgaggatgccacctattccgcattcaggccgtatcagcagaattgatgtattgaccggttttatggtcgtcaccgcttcttcaccaacgagcggatgacggccataaaaccgaggctcatggcaccggccagcactgcgaatacctgcgggcggcgcaattcgttacgcatgctgatggcaccggtcacgcagtggtcctcgaaccagacgcgcacctcgttgctggagtatcggcccaccagatcaccccaggtgagcatgcgggtcacgtagccggccgggttgctttcatggaattcaaacaggcggatgcctcgatagcgcgacttggggccatagcattcgaatccgcaggtggttgcgtagcccaaatcaatgccatgcgcgtggcccacgaaggcgttcttgtgatcgtgaccacagaacagcgcgaagtagccgcctgcctcacgcaaggcgtccacttcaccgacgttctcgtctgcacagccaatcgcctcacccagccgcgatcccggccggcagatctcatggttgagcacgtagcaatgaccggcgtgggtacgtgcgccttccaccgcgttcggcgtccatgcgggaacctctttgaggcaatcgtagaattcctgcggcggaatgtgctggaaggcgatggcaggcaccggcttaccgtcgccgttgcgttcgccaagttcggactgtacggctcccagccaatcgatcgcctcggggcttggcgtgccatacccatcggaatcagccaaatcaagaccacgcggattgaccacataggccgggtattgggcgtcgttctcttcgggcttgccggcgtaatcgccggaattcaccatcatgacggacatagctacgcgcccggatccgtcggaagcctcaatgggcagggcaaaagtgcctggctcaaggctgtcgaccgggttcaggcagccggggaattcgcggtagatgccgtcctgctcgtcggccaggatgccgcactggaaatcgtgattgccgtaggtggcggcgaacggcacttccgcttcgatgaccgggccaaggaagccggcaaacgtgcggcggactttgtcacgggtctcgtccatgagctcgtccaaagtcgtcggcacatcctgtggatcggatgttgtggagtagaccagcgtggacgtggtggacgcggtggacgcggtttgttggacgtcgggattgctgccgtcagacttcatggccagcagacgattgttcacgcggtttctggcccgccgcttgattccgcgcagcttggcctcgacttcggtgaccgcacgcacgcgagcgcccggttcctcgccacggcggcgcaggaaagtgtcgatgtaggcaggatcgtaaccgcgaatctggtcgccggtgaacaccaccagatccgggtcggctttgcgaatggcctcacggataaggcggatggtatcggggagtacgttggggccgtcttggatgtcggccatctgcagcacgcggaagctgccgtcttcgcggaatcgcaggttcgtcatgcctcaccagtctagggacgtaatgctgtttcgcacagcatacgcgccggtccttcacgttccccgccgctccgcacggcagctgaatcactacgagaaatcgtagaacgtgtatcccttatccgctccgctcgtcacgttgagcaatgctttgccgttcagcgtatcgacgtcgtttcctatgagatagccgtctcccgtggctcccatatccgagtcgtggtaggagccggagaaggtgccatccttattgactttcattacggttccccatgcgccgacaacgggcggtcgccatccaccttgccgaccttgtcttttgaggagaatcgctttaacggaacagactcaccccgcgacgggccgtgcaatacgcgttgcccagccaagtatggcgggaattgggccagacggctcccagtcgcggtgcgttctggctcatccagatgctcggcacgcgtccgtctgcggagcgtgagccgagcagattgaagccgttcttttccagcagccactccgggtgctgggtggcgatggccaagccttcctcgagggtgagcggcaggcgctcatcggagtcaataagtttgcgggccacatccggctcgcgattgacatagcacgtgccggtgtgcggattgacgaccagatagaacgggccttccggcggcatgaagccgtcttgaggcaggaagctggcgatgtcacgcggcggcatggtggtgaagcctgccatgcgattgatggaggttcgtgcaatcagcgactcaggcgaaaccagttcacgcgtgggcaccagcaggatgttcgatcccaaatcggaatgctcgagcgccccgatcagaggtcgggccagcgagcggaatgcggcggcggaaatatccgccacatccgggtagccgagagccacgatacggtcgagctgtttttgggcctctactgatgcgatagacatggctaccagtgtagaacatcgccttcgcttcattgggcagccaccatctgggaagaccactgccgttgttccgcgtgtttcgtacaattgcattgttttacggccacccgcatgacggccgtccgacgtaagtaatccatcgaaacccagaggtcatagaggtcatcatgtccgaaaaattgaaggtcggcatccttggtgccaccggtatggtcggtcagcgttttatcacgctgcttgagaatcacccgtggttcgaggtggtcacgcttgccgcttccgcgcacagcgccggcaagacgtatgccgaggctgtcggcgaccgttggaagatggaaaccccgatgcccgaatatgtcaagaacatggtggtcgtcgatggcgacgatgccgagtccgtggcctctggcgttgatttcatgttctctgcggtaaacatgccgaaggaccagattcgcgccattgaagagcgttatgccaagaccgagaccccggtggtctccaacaacagcgcccaccgctggaccccggacgtgccgatggtggtgccggagatcaacccggagcacttcgaggtgatcgagcaccagcgcaagcgcctgggcaccactcgtggttttatcgccgtcaagccgaactgctcgattcaggcctacacgccggcgctggccgcgtggaaggaattcgagccgcgcgaggtggttgtgagcacctaccaggcgatttccggcgcgggcaagaccttcaaggactggcccgagatggtgggcaacatcatcccgttcatctccggtgaggaagcaaagtctgagaaggaaccgctcaaggtgttcggccatgtggacgccgccaagggcgagatcgtgccgttcgacggcgacctcaagatcacttcccagtgcatccgcgtgcccgtgctcaacggccacaccgccaccgtgttcctgaacttcggcaagaaggccaccaaggaagagctcatcgaccgtctggtgaactacacgtccaaggcttccgagctggagctgccgcacgcaccgaagcacttcatccagtacctcaccgaggatgaccgcccgcaggtcaagctcgacgtggactacgagggtggcatgggcgtttccatcggccgtctgcgtgaggattccatcttcgattggaagttcgtgggtctggcccacaacaccctgcgtggtgcagccggcggtgcccttgaatgcgccgaaatgctcaaggctctcggctacatcaccaagaagtagttgaaactgagtccgaaactgagaaagccctccgcaaggagggctttcgtcgtatataccgcaaaaacgcggctcagtggctcagcggccagtaccgccgtacaccacggcttcgatttgatcggcatcgagaccgtatgcggtgtgcagcgccttgacggcgtcgttgagctgatcgagcggcacgagcgcggcgatacgaatctcggaggtagaaatcatcagcacgttgatgccctcatcgctcagggcctggaagaacttggcggccagaccggcatgggtcttcatgccaacgcccaccacggccaccttgcctacgttggtgtccacatcgaaggagtggtagcccagcacttcctgcttgtcgagcagtgtgttctgaacctgcttgacggccgattcgggcacggtgaaggagatgtccgcagtgccgacggatgcgccggcctgcacgatcatgtccacgttcacgccggcggtggccagctcggtgaacaccttggcggccatacccggctcgttcggcacgccacgcacggtggccaacgcctcggaacgatcgtgggcaatgccggaaatcaccggtgcctcggggcccaggtcagggaacaggtcgcccatggatttcgcttcttcttcagtcatgtcttgccttgtcttgcttgaaattacttacgattatcgttcgccgtagccgcgctcagtcgaggttcggcagcgtacgcgggtcaatgccgtcgggcaccaccaatgtgccggggcgacgggagaacgaggaacgcacgtgcagcggcatgttgaaacgctgagcgtactccacacagcgcagtgccagcaccttggagccgcaggaggccatctccagaatggactcataatcgatggacggaatgcggcgggcggaaggcacgatacgcgggtcggcggtgaagatgccgtccacgtcagtgtagatctcgcagatatcggcaccgagcgccacggcaagcgccactgcggaggtatccgaaccaccgcggccgagcgtggtggcgtcacccttggcgttgatgccctggaagccggcaacgatggcgatgtctcccaatgagagcgcgttcttcacgcggtccggtctcacggccttgatgtgggccgcgccgtaacgggcgtcggtgaagaagccggcctgctgaccggtgaaggagtgggcacggctgccttcggcgtgaatggccatggccagcaggctcatggaaatacgctcgcctgcggtcatcagcatgtccatctcgcgctcgggcgggttggagtcgatgctcagcgcctgatcgataaggtcatcggtggtgtcgcccatggcggagaccaccacggccaccttgttgcccttcttttccgtctcaacaacgcgcttggccacacgtttgatcgattcggtatcggcgaccgacgaaccgccgtacttctgcacgatgagagccactgctgtcctttgttcttctcttaggggagtttgctcgatattctacgcaaacgcaacgattataaaggttgccgcgttcaccccgcgaccccgcgccgacatgtggacacgggcatggcctacgttgttcagcaaatattcaagttttcaccggcgattctttgaggcggccgcatccatcctttgagattcgagcggttaactatcaattaccggcaaacgaaagcaaaccggcgaggtttccgcagaaccccataactgaataccttcttcttcctctctccttttcaaggcccggtcccgcagcccgggccttttccttttgtgttgggaacgatgcgtcaaacgcacgatacgagttcacggagcaagcgtggccaacggcactaccaataccccatcatcccggcgataagcggcagccgtagcggtcagcaccatcaagaatgacggacggccttcgtgatcttgatcaattctgtcagccaactttttcaaatgggccgccgcaatatcaacctgcttttctccgagcttgacctcaatgagagcccatcgtccatcatgcaggccaatgaccgcatcagattccaatcccgtcttatcccgataatggaacacatctctgccaagcgcatcagcatacacacgcagatcgcgaatacacatggactcaaacagcaagccaaaggtctcgaaatcattaaggagtttctccggggtcgcgtgcagtaccgcacaagctatcgacgggtcgctgaagtgtctggttgggctcgttctcactgcagtcttagaacgtaaacgagggttccaagctggaagatcttcagtcacgcaagctcgcgacaatgcatctaaataatcagagagtgtaccttccgaaggcggttcaccctgcatatccgccgcgatagtggattgcgacgcctgagaagaaatattgcgcgcatacgagcgcataatcagacgcatccaagttttattgcgctttatgccatccatacgattgatgtcagaatcaagtagttcttcgacataatccgcggccatgcgcaaggcaacatttactcgagattcgactactgcttcaggccagccaccgcggcatagcgcaaacgcggtgttttcaatatcgaaatcggagaaacccgaaacatcatggttgccatcgaacaactctcccaacgaaacaacgcccgtcgattcctgcgattcaaataaggacatggtacgcatggttaatcgggcaattcttcccactccggaatgagctggttcctgttgaggagtcgccgatccagttaggatgaatcggccacgaccgcgccctcgatcaatggcgaaacgcaccgcgtcccacaattgcggggccatctgccattcatcaatgagtctcggctcctcacctcgcaggatgagagaaggctttgtatcagccaaggccaacagcgtagcactgcgatccgggtcctgcatgaagacctgactcgccgactgcctttctgccgttgcagtcttgccacaccattttggacctttaatctgaacggcaccagaagactgcaatgcccgagtcagcaacccatcagccactcgaggaaggtactcgccacgttgaatctccgagctctcccctgccatatgtgccctcccgcaaaccgtcgaaacatcaacctataaatcactctattgcggaagttggaccattctaattgtggaagttggaccattttcgttgcggaagttggaccattcctattagggaagttggacactagattacgaactagacttttcctttttgcagcaacagtgccaccaacacaatgggcgtcatcaccgcctatcgccagacccttttccttgacctaaaaagatgagatgcccagacagtgccatcttttctctgagcacactagccaattcggaacgcagcggcgaacccgtgatccgcgcatcctctgcaaccgtgcctttgacgttcggcaatctggtgaatgagcttttgctcaggcgttcttcgcgattcatttctttggtcggaaaacagaatacgcgggaacgcccctcacgcctacgaaaccaacggctcgacgacgaaccgacatccacgaaaacagcaatagcgcctctttttatcggggtaacatattccctctttatgcattcatacccccctatttgaaagctctgccaaatattgccgacgccgcgacttatcatgttgccatactttgcaatcctttgcagccccttgcatctcaacggcttgtccgaagtaagccacatcgctgacggccgtagcaacgttgttcgtatcgcatttttcagacttcttatgcccccctatattgcccccatatggcccccgtcggcatgttgcatgaaaggcttggcacggagtaacgtttcgcagtgtggcgcgtgcggtgttgccatttgcgacagcacctatgccacgcacgactaagacagacccggccgtcttgtataagcaaatcatgagcagatcaaacggaggaacaggcgactatggcattgctgcatcgacgttcgacgagtaagcgtgcctcacagaaaatgcgggaaaacaacgcggtcatgccggatgacacatctgcaaatgacaacgtttcctcagcgcgccccgagcccacagcattcgttccaactccatttgacgaagtcatcgatatcagcgatctcgtggccgagcgccgacgcctgcagcgcaatctgtgggcgatgcgcatcatcaccattgtgctgctgatcgccgcaatcgccgtggcctgcttcccgctagcgttgcaattcgagtccgaccgcaacttggccgccaccacagccaccacggccaaagaagtagctggctggccttacccgcaggcggaagacaagctcacggcggcccgcgcatacaacaagaagctcgctgaatccggccagcctatcttgggtgaagccgtcgatccgttcgccgccgctcaagggggatcccaagccagcggcgaggattccgcctcaaagaaagacaaggaataccagtcactgcttaataccggcaacggcgtgatgggcacaatcaaggtgcccaagcagtccatcaatctgccgttttatcacggcacttccgaggaagcactggcttctggtgccggccatttgtacggcacgtcgctgccagtgggaggtaaatccacccattcggtcattaccgggcaccgcgggttggttgaagcgctgatgttcacccgtttggacgaggtgaaagagggcgacttcttctacatcgaagtcatgggcgaaactttgggctacaaagtggaccgcatttcggtgattttgccggatgacacgtcgaagctcaagatcgtgccgggtgaggatcgcgtcactttgatgacctgtacgccatacggcgtgaacacgcaccgactgcttatctccgggcaccgcgtggcgattccgatgccggcccccgagccgaatgacgtgcttgacgcgcgcaatatcgcccttggtgttggtctaggcatactggcggcaggactgttcatcatctggttggcgcgacggcacaaggccgcgcgcatcatccgccacggcgcattctggccgtggatgagccgcaagggcgagagcgccaatgatacgctggcttaggcctcgcgccgaccggccagtgccctgcccagcgtgatttcgtcggcatactccaagtcggagcccaccggcaggccactggcaagtcgggtgaccttgacacctacgggtcgcaatagctgggtcaagtagctggtggtggcctcgccttcaatattcgggtcgagcgccataatcacttccttgacctcatcgccttctaagcgtttgagcagaccgggaatacgcaggtcggcagggccaacgttggccattgggttgattgcgccgccgagcacatggtataggccgtggtattcgcgcgtgcgctcgatgctcatcacatccttgggctcttcgaccacgcagatcaccgaacggtcgcgtctcgggtcggcgcataccgggcaggggctggattcgcacacgttgccgcaaatatcacagaagcggatcttggccttgacctcttcgatggcctcggccaaatcgcgcgcttcatcttcgggcgcggacagcatgtagaaggcgatacgctgcgcgcccttcggcccgatgccgggcagccgcccgaaagcgtcgatcagtcgctgtattgcgccgtcataagcaagtgccatgggtattcctcgttattcgtcctcattattcatccgagtgcttcttggcaggctggatgttcttggggttcttcggatcatctgccgcgaattgctcgacttttttgacctcgaatagctttttcagatcgtcgagattcatggccgtcgcctcgccgagcgactggtcgctcatcgagtattcgtcatcctcggccgcgacttgcggttgtggtttcggctggggctggctattccacgggtcggcattcggggtcggctgtgcgggttgcggttgattccacgggtcatcgccggcagccggctgcggaaccgattggggctggttccacgggtcattgcccgacatattgcccgacactgtctgaggaaccgaagaagccggagtctggggctgaggctgattccacgggtcgtctcctggctgtggagccgcctgagcatggttcccctgcggctgattccacggatcatcgtgaggagactgctgatatggctggttccacgggtcggcttcggccggttgcgacgccggtgagaccgcggcctgagactgcgtctgattccatggatcgtcgctctcgccggcaactgccgtagcagaagatgcggcggctggctgcccagtggactgtccagtgggtccagcggacgcaacggacgcagtgggtgcaacaggagcagccggagcgacccacggatcaacaccgtcactgatgtccggaaccgcaacatgcttcttgtgatgctcttcaggcgcaggcgtagcaacgggctcgttaggtgcgaacccgtctgcagattgcggcgaagcgttgcttacggccggcttggcccaagggtcatcgtcactccagttcttcgccgccgtggatgcactggattggccggctcgatggctgtcgtccgtatcctcggctcggcctgttgcagtcggcttcggagctttcggctcgctccccatatgaatgcccaggcccgcgcccaaactcgacgcggccaatccagccttggccatggcaatctgctgcttgaccttggccaattgctccgggctcatacgtttgacggattcgactcgctcgccattcgccgcgaccgcagaaggtgcaataaccgcattggcaccgaactcgttgcgcacggcatccatcaccacgaccgccgccttcttaccgctgttatccacggccaaggcgaaagcgtgctggctcagcgacttgtcgaacgtcatcgacaggcaaggcagacccttacggttgggaccgaattttacggtcggcaccttgtctcgtgacacatattcacgaatggtttccggcaaagcggcgacggctgcatcccacttctcgtcgatggaccgattatccgatgccgcaggcgaggtcaccggttgagccgggacggccggcgacgcggcgggagcgccccacccggcaccggcagcagcagttgctacagcaggttgcacagacggagagtccgcaggtcggtcgctgaccgggccgttgcctccaacagattcatgggaagcggtgctctgaggcgcggctgcttgctggttgcgtgcagcaccggagaatccgccatgtgaggctccggcaaacccgcctcgcgatgcgccggcaaaaccactggcacccgtaccggaagcggctggcgtagtcgaagtcgaagaagcagccgcaggcggcataccagaagaagctggcgcgggagcggctgttgcaaagcctgattcactgccggccaacaatcgcgcggccagcagttccaagcgcatacgcggagaaatggctccggtcatggcacccaacgtagtgttgatgatgtctgccattgcggtcagtgcgcccagtcccagcgccttggcttggcggtgcagatcgtccatatcctcggcctcagccgtgtcggacagcacggattccgcacggtccccggccaacgtaagcaccagcagatcacgcacacgagccagtaggtcttcgacgaatcgtctcggatcgaatccgccgaccacgactttctggataacgccgtacagggcttcgccgttgtgatcgattaccgcatccacggcctcgccgatcagtgcctccggcgtgaagccgagcagggctacagcggcatcatgggtgataacgccttcgaccgaaccaaccatcagctggtcaagcacggacagggtatctcgcatggagccgccaccggcgcgcatcgccagtttcagcacaccgggctcgggcttgatgccttccttgtcgcagatcgtctccaggtagggacccatgacttcctgcggcaccagacggaacggatagtggtgggtgcgcgaacggatggtgccgatcaccttgtctggttcggtggtggcgaagatgaacatcacatgttcaggcggctcttcaacgattttaagcagcgcattgaagccctgctgcgtgaccatgtgggcctcatcgagaatgaaaatcttatagcggtcgcgcgcaggggcgaaaccagcgcgttctcgcaattctcgagcatcatccacaccgttgtgcgaggccgcatcgatttcgaccacgtcgatggaacccggaccgccggtggccaggtccttgcagctttcgcattcgccgcaggggtgggaagtcggccctttggcacagttgacgcaacgggccaggatacgcgcggagctggttttgccgcagcctcgcggccctgagaacagataggcatgtgtgagcttgccctcgtccaaggcgcgcatcagcgggaccgtgacttggtcctggccgatgaccccttcgaaggtgtccggacgatagcgacgatacagtgcaagtgccatagctactaacctacctttgccctcagaattaaccgataaaaagtcaagataaaccgggctcatagttgccgaatcggaaaactctttatattccaacgacattcacctgacaacggttaccgcatttttattgttattaaccgctttctttgtattaacatagtgtcaataacggttgtggtcaggaggcacccatgagcgatatcctcgacgagaaacgccccacccgcggcgatgcccggcgcgacgccatcgtgcaagccgcgcgcaaggtgtgtctggaaaaaggcttctccaaaatcaccgtttccgacatcgcaagcgaagtcggtatgacgcgttcgctgttctaccactacttcgaagacaaggaagccgtagctgacgcagtactcgataacgtcatcgacgaaatcctcaccacgttgaagcagtggaaccaagcgcgcgaaacaggcaacgtgaacaaggcattagacgacatcgtgcatgtgctccgctccctgatcgccgacgagagccccttctcaaaccgtatgatccaagacggcaacgccgaactgtatatcaagttcattgaccgcgcggcggaccgtattgccgactacattgcccagaccaccgtacgtgatttcgagcagatgcatggcctgccaatcaccaacgtccatgagacgttcttcacactgattgtggggcttatctcgctgattcgctcgcatccgaacatcagcgaccgaaccatcaaagaggtcatggcgcagacgctgcatatcgaaagctatgtcgtctgaggtctgacggccattggctctggtaccgctctcccgcactcccctcagtccgcttcgcggccagctcgtccgcaattgcggacagcctacggctgactttcttctggttcgactatcgtcgaaccctcgcctacaaacagcccactgggctgtttgctttacggctcagcctaatgaggggagccaatataatcgggtcacgcgaactggccggtcacgggatcgcgaccatctcgggcaatggcgttgagcacttcctgtcgggaatccacctcacgggcggctacggccggcggcactagcacgcgcaacgcgcagtcctcggccactaccctaaatggcaaatgcccgatatattcgccgtccgccatcagcaccggcggctcgtctccttccgttgcccgcgtgacttcgatttcacggatacgtttccagccgaacacctttgaagcaagtagcttgccgttataggcattcgaaatggccaccgcgcattcgccgaagttcggcacgtggtccatccacaccaggtccaacaatccatcggagaagcaggagtacggcgagacctcaatgccgccaccgatatgcctcgaattcgcaatcgtcagcaatggtgtgatgatgtctcgttcatccgtggtcccgtccgccaatgtggctttgatgtggtaaccataacgcttcatatgcgtcagctccaccagcaccgccgcaaagtagcgcatggtgccggtcggcagatgcgaatgattcgcacggtcgttgatgctcgcgtcaagaccacaggacagcatgcccgcatagtaccggtcaatcggatgctcggcggacttgctctcctggtactcgtactcctcgccagtggagggatccacggcatagccgccgtccaaagaggtcacgcgtcccatgtccacatcgatgtgtgatccgcgcacgatagcaccgacgataccttccactgcggtttcgatacggttgaccggcagcttcagtcctcgtgcgaaatcgttgcccgaccccgtggccacgatgcccaacggcttgccactgcagcccacggcgttcgctccaagtgcgatcatgccgtcgccaccgaccactacgagatagtcgtactcgtgcgcgcgttcacgcgcctggttcagggaatcgtcgaaactcgtgccggtgatgtcgatgacgtcgaagttatgggcacggccggcttcctccagcagacccaatacctgcgcgtccaccttagcgccacggcctttatcggaagtggggttgcccaccatggccaccacgcgacggcgctcgttgcgttcactctcgctcatgctctcaccttagccaaaggcccagaagcccgccagagtatcggtgctttacggtccattattgtgataattgtctccttccgtacaactcaccggtccggcccgagccatccgctccacggatgatgccaccaggaccatggtttccaccttgatggttaccaacacgtcttcatcccgcacggagcaggagcccaaaactacaccattcgcttcagccatgttggcggcgagcgcacatggatcaccgatatccgcatgccacagcgcatacgcggcgtcaaaggcgataaggtcggcgagggaacgcgctcggttctggcagatcatgaggttgcccacacttgccgccaccgcgagcgcaatgcccaccaccataaccagcatggctccggccatcgtgcccgatccctcctcataacgcattccctgcaccgcagttcctttctgttgcggccgcccagccagccgaccgttattggcttatcgccgtagcgttgccggtaacccgcgttggagttacatccagcggaccgggcaataccgaacattcgaccgtcacactcgtcgattggccgtcgtggacaatgctgacgtggggctctcccccggcaacgtccgcagctatgctgcgcgcggatgattcgtcaccggtaaccacaaactcgcgtgcagccgctgccgcggcactttgacagtccatggaaacgatgaccacacgtcctattgccaatatcagcccggcgatggcgataatgctgggcaatacgattgcgaattcggcggtggccgatcccgtgcataggtctggcggcagtctggcgagccgccaccggcatgtcatggtcttcatggctgtcacccgactttcagagcctgtttgatgatgttggtcagcaacgtcttgatggcatccgacttcaggatggcgaccagcaccgccgcaaagcctgtagccgcaacgagtacgactgcgtattccgcagtggccgcgccttcttcgggctcagccatgagggtgcggatgcgtgcgtccatgaggcatagccgttctttcgccttggcgttcagcgtggccacacgagccttgctgtgcgcaaagatgccggcctgcccgtcgacgatgacggggataggggtattcattggcgttcctttcggtaaggaggggaagctgcgcagtggcttcgcaccttccccatgcgtgtgtgagtggttggcccccgcgccgggttgacgcggggtgcataccactgtggactatcaacgcttcatgcaccagggaaaacggggtatgtggttctagcttgccgagttatccacaccccgacgtgtcgtccaccaccaatgtggataaccaaacgcagccaagtgcaataccgagcaatacaacaagattcaccctaagcgcactcagttcacgcctatattcacatcatgaaggacgcaatcgccggaatgactcctaccagcacgaatgccggcagaaaacatagccctgtaggcatcagtagctttaccgacagcttcgcggcattccgttcgatggcggcacgctcgtcacggtccagctgttcaatggcggattcgaggcgcacgccaggcatatcgccatgcgtccatgacgattccaaagccgattgcagcaggccaagatctcgttgcgttctgctggtacgttttccggatgaactatcagctggcgcaccctcatgctgaacagccatagcggcatgccacgcatcagcccagggaacccctctggccagggagctcccgacctcgctcatgcgagcgccgcagtcgccgccgacggctttgcccaccatgtcaagcgcccggggaatcgaggagccctgacgcaaggacacctgcgacatacgcaatatgagtatggtccatgacgacccgcaatcatgcgctacggccggttcctcgcccggcaagcggctgtcatgacgagacggagccttatacagccaactagcgatcgccgcacagcctgccgcggcgtgtacccacaccgtactcataatccgctgcctttcaacaatgcccgcatccatgccaagccggcagcataacaacatccccctaataccaagcagaccacaccgcgtggcgatccaagcaagaacgccaatggtctagctcccagaagctcgcccaatgccacagtgacggccggaagcgcgctcagcagccccacagtggctttaggaacggcacatgcttgcgatcgcaggttctgcatcagcctcatctgccggtaagcagtcaataccgcttccagacatggcactgcttggcaaccgagctcatcgctcaaaaccgctgcggcggtgaccccgcgtgcagcttcaagtacctgcgctggtgattcgtcgggcagacgccgctgttcgaacaccgttatgagccgttccacagtaatgcgctgagtggcgaagcgtctgctggattgttcctcgaatgcttcaaccaatgtgccgccacctcgcaatcgcgcgatggcggacgtaatcacctgcgcaacgcccacgcgaggtgagccggcatatcgaggttcgtttatggctgcggaatcgaccgcacgcccgcggtaagccagccgatacagcctcccggacttgttccccggccatatcagcacggcgagcgccaccagaacagcacaccacatcatcacccaccaccactcggcccgggaacgatgccccatcgttcaatgaagtgcccccattcggcggcataccgaggaggatggcagccattccataccgccagcggtgttcctgccagttcaccatgtgctacacgcagttcgccgatctgcgtgatacgccgctgtccgttcactcgctccaaatgcaccaccgcgtcgaaagcgcctgccgccagcatggccaacgcctgtggactgactccggcgagtaatccaagcgaaatcagcctggacggtactcggttcacgccgtccgcatgcacagtggtcatgccaccgtgatgaccagaattgaacgcgcgcaataggtcgacgatttccgcgccacggcattcgcccagcaccacgcggtcggggcgcattcgcaacgtcgctttgaccaagtccgtcagacttatggctccgacgccctccacattcgcctcgcgcgttaccaacgacacatgatcgccacgccccagttctcccagttcacgaacttcctctacggtgacgatgcgctcgttcacatcgcattgcgccagcagcgccttgagcaaggtggtcttgcccacgcctgttccgccggtaatcagcactgtggcatgtttgcgcaccagtcccacgaacatcggcagccaagcagccgggaatacacctaattggctcagatgtcgcaacgatgccatggtcctgtcagggaaccgtatggagattgcggcaccttgtggcaccaatggggcaatcaccgcatgcacgcggatgccgtctggactggcggcgtccgctatcgggcaggcatcatccagtctgcgcccaagctgcgcgcacagttggacggcgtattctcgaactacttgcggcgagcgaaacggcacacgcaatactgtttctcgcatgccgttgccgcggtccgcccaaacgcggccatcacaggtcaccgccagatcggtaacctgcgggtcggatgccacatcattcaatagaccgaagaacacagttctgggcactgcgccgggctcatcagcccgagtgattacggcagccataccgcatcaccggtccttgcaagaagctcccgaaaccgggcgaatggcctgctcgacaagatcggcaagcaagctcacggctttgcggctgcctttggtcaccgatctgatgccgaggccttccagtacgtctccacacagattgacacttggtttgacaggccccaataccgtggcagtcaaatagtcctgcgcctcaccaatacccacgtggcctctcccacgtggagcgccacgtggttccacgccgacgatatgtggcgcttcacagccccatgaatccagtctggaccggtgcgacttggctctggccagccccatcaccgacaattccgcggcaatcacctgcatgccactgcgcagatcgggtacggtctcaatgagtccaccctgaccggcatctacgatgacaacgtcgttcgtttccgccaaggctcgaatggccgcttgaacttcccaccagtcaggctggcgcgcgctccaagggtcatagggaagtactcgcacaccctcccacatcatcagctcatggttcatcgcatcgccctcgatgcggccgaggggtgcgtcgacttggctgaatcgtaaacccggctctcgttccacaccgagcagcaggtcaaggcatccggccacgaaatcagcgtctatgagagcgcagctgtgttcacgtctcgccaatgtccatgcaagcatggaagccatgacactcaaccccacgcctccatgacctgacgtcatcgtcacaatgttatggaagctggtgtctgtagttagggcgagtgccggagcctcgcccgatctctgccgttcgcatgaggccaacggcctgggcggcggagtgtagtagcgatgcgctggaatcggcgcatcgtccgtgggcagcggaatgcccggaggtgctaccgctggcgaggtgatcctacgcgccacgcggggtgaggtattgctattcataagccgattgaaacgtgtccgagttcaatgctcaacacgaatcgaccattgtggttctagcttgccgagttatccacaccccggcatgtcgtccacgacaaatgtggataaccacggtgctgtttcacgcccatctcatgcaaaaggccctgacctcatatgcacggtcagggccttcatttttcacgacgattccttatgcggtaatctacatttcttgatcacttatcgaggttcttgatgccgtcttccatgacgtccagctgagcatcggtcaccttggccggcttcttcttgccgaacttggccttgagcagaccgatgatggtcggggcgagcgagaccagcagaatcagcacgatcaccagctcgaagtggtcctgtactgccggaatgttaccgaagaagtagcccagcagcgtgaacaacgtggaccagcacaggccgccgagcactgagaacggcgtgaaacggctccaacgcataccggaaataccggagatgaacggcatgaacgtacgaatgaacgggaagaaacggcccaggaacacggccagcgggccccacttttcaatcatgccctcggttttggccagtcgctcaggagtcagcgccttcaccttgccggattggataatacggcggccaaagaaatgaccgatgaagtaattgcactggtcgccgataatcggggcgcaccagaccaccggcagcagccagaacagcggcagcgcggccttgccggtcgcagcatccggggctgcgaacacgccggccgcgaacaacagcgaatcaccgggcaggaacgggaagaacaccacgcccgtttcgatgaatacgatgaggaagatgaagccgagggtcggcgccacgcccatggcaatccaaccggcaatcgcggcacgcggatccttcagcagttcgaggatggaattaacgaagcccatgtgtttcctatgagtcctaaatcttgtattgagctgccagcccaatgaaccagacagttatatgcaaaccgtcaaataccctaccagccggcctataacatcaggtcgactggggtttcccacacaaactccgcaatacaaacgaaatttctactcccccaaacgctgccgcacaaaggcgtccagcgcggccgcatcgatgccctcatacgagtcgatggaggcaaactggccaaggccggaagtgtcggtgcgaatccagccagtctgcgcaatcagtgtggcccccgaggcggcgccggagcgcagaccggatgaggaatcttccattaccacgcacttgaccatgtcttcaggcgcgatgccgagtctctcagccgcggccagatatggggcagggctcggcttgtgctcgtacggatcatcgccgcagacgtagccggcaagcaatccatcagcctgcttcatgatgttctcggccatgcggcgaggcgaagtagtgaccagcatggatgggatgtcggcttccttgagcgaatgcagcacgtcttgcacaccaggaatccacggcagacgttcgacctccgccttgaacacataatccttgagctgcttgtcgatttcgggaacgctcaatgtgcagccatgcgcaatcatgacctctgccacgtgtggtaccggagtgccggagcactcccaaccgaggtcctcgttccactcgccgccattgttgtgcgcgatctcaatctcaccgtcatgccagagcggctcagaatcgatgagagtaccgtccaaatcccagaacacggctttgagcagcatagttacctccgtccgcatgcccgcacgccaattggcgcctttactcttgctgcattccattgcaccaaccggatgcgacaaccatagcgcgtcagcacaccgcccctgcgcctcagcgcatggtcagtccaccatcgacgtgcagacattgtccggtaatgaagccggccatgtcggacgccaacaacgcgacccctccggcgatgtcatcgggacgggcaaggcggccaagaggcgtcatggcaatgattcgttcacgaacatcctcggtggtggctgcgctggatgcggttccggccgtcaaacctgcggcaatggcattaacggtaatgccgaagccgcccagctcctgggccagagagcgggtcatgccgaccaagccgcctttggcagtgatatacgaatggtagggcacgatgggcgaatcggccagattgctggagatgttgatgatacgcccggaggtctgggctcgcatcagcggcaccacatgtgagcacatcagatatgcaccatgcaggcatccctcgatctgtgcgctaaactcatcccaatcgcctccagcaaaagtggaacggcgacgcgggtcaaaggagaagcgtccgaaagcattattcactaagatgtccacgccgccgaatgagtcgacagcggtacccactagcttggaagattgcgattcatcgcaaacatccgcctgtacagctatagccgagcctcccagcgagtggatgtcttcaacggtgcgctgcgcgctggcggcgtcatgtacgtaattgatgacgacagcggctccgtgcgatgccaggcatttcgccacagccgctcctatgcccttgccggaaccggtgatgatcgctgttctgccatccagattcaccattggacgccgtgccatatcgctttgctctgtcattacccttgcctttcgccctgctaccagcctctgctgcccgcaacagcacaggcctattccatatccatatcgaacgaatcgctgtacgcgtcgctgccgcgttcgacatccaccgcgcgcaacagatcgatgaggttgaagcccccatcatgatgccagccggatttcgcccgatccatctcaccgagcggacagatgcgattcacaccgacctcggccaatgtatctgcaagaccaaacagtctggttgaatccacagcgacaccgcagctctgcagccagccacggcaggaagtcagtcttctggcagcgtccaacaaatctggcaccgccaccacgttgacggtgcggttcaacggcgacatcagcgaagcaacatcctcgtcggcaccgctaccgtcaagttctcgatacagcaccgaccatgccgtgctatggccactggcgaacaccgcggccttcccgcccatcaaggctctcatctcagcgtcggtgcgcgcccgctgaatggccacgttctcggcgtcactcaatacggagcgcggatatttgcgctgctgattctcaagctcgccaccgagcagctgagccacttcacgaggggtgagggctccatcagtctccacgaacacggtctgcggagccaggcagctttgctggtcatatgtggcgatgtcaacagccacacgatgcacggtatcggcataggtatcaggacgcaaagcctctcggccaatgaacgccaacccgacttttgctccgtaacctagacagggcttggacccggcgactttgcccgcaatcaatttggtagtctgcgaagaaccgtaaacaatcacggcatcggccgcatcgatggctgaatcctcgagctgctgcgagccgcccttccatggaaccaccgcaatggcatcagcgaggtcggaattgaccatcgcaatgctgcgagcaaagaacgcaggcatcaccggctcggaaaatgaagatttgccaagaatcgcgcctttgaccagcagggtcatcgccatgctccacacgggaatccccggcacattgctggagaacacctgataggtgagcgctgggcccacatatttagagtatccccccgccttgttcggccggaattcgtcaagcatagacggctgaccgatttcggagtcaaggaaccggagcagttcacgacgcctgaactggcgcatataccgtttgagctcaatccgcaccatgtcaggctcatatccggtgattgcgggaatcagcagttcagcctgacgccgcagctcaaaatccggatcggcccatagttgggccgcgtcggccacgatgtcgagaatatcgttgacactcatcgcggcaagcgtgcggttgcgaacatcggcaagctgcttggcaagggaagtcacctttgggccatccagtcgcggatagcgcaagcgcttcaccccatccgatgtggcgacctcatagatttcgtaatccgaaacatccactcccgagggcaggtggaagacatcaatggcctgactcacggattcatcaacggttggcactgatgacctcgtctaccgcgattgagcacccacgagcctctgctcccttcgccctgccctgcagcaggaatccgtccggggtccgatggccgagatcctcggtcagaataccgatgcatgaattccaattggcaaggtcgtaatgggctatcacaccggtctcaccatccttgacgggagtcagcgtttccggatcgaggaagaccgtacgcacccaggcggggttcgccttgagatagttgctggtgccatccgtataccacgacagaatattttggtcatagatctgcgagctcaactcggtcatgccatacatgttgacgcagtggtggcgcggcacccccagtgtctgttccagctcatcaagcatctggtcttcggtgatgtcgcgcttagtgctcttgaagccgccagtgtcgaacaaccggctatcgggggccagcgcgaacgtcagatcatgctcatgcaggtaatcgagcagatacagataggacgacgagacacccatcagcatcaccggttcaccgtcagacaccgcacggttaaggaaggcgatgatttcatcgaacttgagtccatgctcgtcgaagaacacaccgctgccttcgctgccgcagcactccacggccttggtaaggtagcgcgacagggaggagttctggttcatgtcccatgccggcgaaatcacggcgatgcggatacgctctcgatccggcatgatgaaatgacggaacggcacaatcattgattcatcccacacctcaagatcggggtggaagttgcgcccacgcatcttgccgccatgcgtggttccgctcgtcatgaatacggctttgcactgctcggtcggtatggtcgaaaggtcaaggtgcttgaacccgtccaccggcatcgacggaatctcccgccaatccttgagcgttgcgggggtgacgcgtttagccgcgcagtaacgacggtacggcagatcatacgtgtactgatagatgaacacgtcgcgcgccaacgcaccaaacgcctcttccggggcctgctcacagccataggtatggataaaatccagaatcccgcgcttgatacgacgcgcgtcatccatcacatcagtcattgcatcgctcctgtcaatatccaatatcaaccagcattatcgttcatcgtacgccgcagcgccagtctcatccgccggatcggctgctggaacatccacggacgccggcgcacgatgtttcgccaccaaatccggaagagcgacgaaaagcgcattgagaatgatggcgctgaatacaccgaccatgatgttgttgccaaggaacacgcttgcgccgccggtcaggccggagagcgccttgggcagggcgctgccgagcaacagagacatgccgatgaccgtttgacggcgctcgtcatcagcgaccttgcgcagggcgcgcaggccggtcacgattaggctggccgcagccggcaggaaaatgcctccgacgactgccgagggaatgacggacagcaacgcgcccgcctttggcacgaagcccagaatcagcaacagcacagcggcgatgatcacaggcgtgcgcgtgcgcaacttgccttcgccggtcaggttgagcaggccgacattttgcgggtaggcggtggtggtgaatccaccaatcagcgaggaaatggctgaaccggccgcctcgccggcaagaccgtagcgcacctgcttgcgttcgaggggcgtgccctgaatctcagaagccgcctgatagacgccgagagcttccatgacggcaaccatgtaggcgatgaagaacgggatgaagatcttccagtcaaatgtgaacggaccgtagggcaggaaggtcggcaggcccaaccatcccttggatgccacaggagagaagtccaccatgccaaatgctgcggcgaccacggtgccgacgacgagcgcgatgaggaatgagaacgacttgagcaggcccttgccgagcaacgacaggacaagcacaatcgccgtggtcagaatcgacacggtcaggatgtgcggatcggcgaacgtcttgtcgccgggagccccgcctagaaactcgctcagcgtgaatccagacagcgagacaccgaccataaagatgaccacgcccgaaatcatcggagagaacaggaaccgcatccgctctatcacaccggtcaggcacagcaacaggaacacaagcgaagcgatgagaatggacgaactcgccgcccccagcatgccggccgtacctgccgcgatcatcaacgcgtcaaacgcggctgacggcccctgcaccaccggcaggcgaaccagccgagtggcctgaaccaaagtaaccagaccagagacgatgaagatggcgttaatcatgttcgacgacagggcaataggtaagccgattgctccggccacaaacaccggatcaagccagacgttggaaacaagcacatgctggaaacccagcagtacgttctgggcggtcagctccttgcgtattgacatacgcttcctctctctcaacgcgcatatgggatgccgagccgaacagaggagttcaaccgtcgcattccctacgcgagtgttagctcacaggttcgaagggttcggcacataccgtctcagcctaaagcaccccttacgaatcggttttcgcacgtcaccgtaacaaaccttgacatctccgtcaagaagattcgtgcttttcggcagctgcccgatgtgagataacaaacagttttacgaatggagaaggaatcgaagcaatgcggccagactcaccaaccccacaggaccatggacttggagtcggcgggagtgtagttggagtcgccggtggcgccggcagcgatatcggcggcagtatcgcggccgggcagttcgcgggtttcgcggcggatggcgttgcgccagaggcgggcgcggttggagcgttgtacctccacgatattgccgtcacggcctgcggcgaaaacgctctcctggtcgccggcttgcatgcgtttgacttcgcggcgcagttggcgattctcttcttcgaggaccaaaatgcgcgcgataccggaaaggttgatgccctcatcctggctcaggcgctgagctcggttcaggcgggcaatgtcgcgcaggcagtagcggcgtgcgccgccatcggtgcgctgcggacgaaccaaaccgaggcggtcgtactgacggagagtctgggggtgaatgttggccaactcggcggtctggccgacggtgaagatgggcagttcgatgtcgaagccgacgtcatcggctccgtcgagatcggccctgcccatcacgagcgcggttgcgcacatcgcgtataactgcttcatctggttggctaaccgcgccattgttcacctcctgattacaggctgagatagtcgccggctttttcgtcgaattctttggcggcgtgcttgacggccagacccggcttggcggggaccatgatctgcacacggccgatcagatcgcccggctggttgctgcgctggacgccaagtcccgtgagcttgacttccgcgccggagctggagcctgccggcaccttgaaggtaacgggattgccgtcgatatccttggcctcgaccttgccaccggccacggcctggcccacggtgacgggcaggtccatgacgatatcatggccgcgcatcgagaatgtggcatcgggcttgacggtaacgtgcaggtacaggtcaccggccttgccgccgttgatgcctagcttgcccttgccggccagcttgattttctgtccgtccttgacgcccgcaggcacgtgggccttgaacttcttgccgtccacggacagggacacggtagcgcccttgaccgcctgacgcagggtcaggctgatcttggagttgcggtcctcgccgttttcggggcgcggggcctcctcatagccatagccgccggcattgccgtacggcgattggccgtagccgccatacggctggccgccctgacctgcagcaccgccgaacatcgagaagatgtcgttgatgttgttggggccgccgcccgaagtggagaagcggatgcgcgagccattgccgccggcaccctggccgaacatggaaccaaagatgtcggagaaaccggaagcatcgaagccgccggaaccgccggcgaagcgggcaccgcccatgccgaactgacgaatcgcgtcgtacttctggcgatcttccttcttgctcagcacgtcataggcttcggagatgtccttgaacttctcctcagcttccttggtcttgttgacgtcaggatggtatttgcgggcgagcttgcggtacgccttcttgatgtcgtcgtccgaagcgtccttggagacaccaaggactttgtagaagtctttgctgagccattcgttttcagccattcatgtctcctttctagaaaagtctttatgattggctcccctcagagaggggagccaaggtaaatatcaactcattgcagcgagctggatgtcagttttgcggggaggctactactactcgggcggcgcggattacgcgatcgccgatgcggtagccggcctcgaccacggtgtcaaccgtttccttttcggcatccgcgtccggcttgtgcaggatcgcgtcatgcttggtggggtcgaagtcctcgcccttttcgccgaacttctcgacaccgaacttctcgaaggccttgtcaatcttggtggcgacggccttgaacgagtcgtccatctcgctgtgttcgcgaatgcggtcgatatcgtcgagggcgggcagcagcgcggtcagcacgtcgatgatgccgtgctggcggaagcgctcctgctccttctgcgtgcgattgcggtagttgatgaactccgcacgttcgcgttgcagggcttcgaggtagtctgcggcttccttcttggccttgccgagcggggtgagggtgtctgcggaatcggactggccttcgccagtcttctctccctcagctgcggcaggagccgcgtcggctccttcattggaaggagcctgggcagccgaatcctgcgcagagccggactcggcggaggcgtcagcccctgaagaggcctgagcggcagcctcagcatctgagggatccggcaggtcgttcaggtagtcgtccttgttgaactcggacatcacttgttgtccttgtcgtcatcgtcgtccacgacctcggcctcgacggtgtcgtcgtcggaaccggaggcggagccagcggaagcgccggcaccgtcagcaccagcggcagcaccctcggcaccctgctgggcgtagaggacctggccgatcttctgggcggcggtcatcagctcggtctgagcggtcttgaccttctcggtgtcgtcacccttcagggcttccttcagagcgttgaccttgtcggtgacttccttgacgatgccgtcggagagcttgtccttgttgtcgttgacgagcttctcggtggagtaggcgaaggcctcggcctggttgcgggtctcggcgtcttccttgcgcttcttgtcctcagcctcatgagcttcggcttccttgaccatgcggtcgatctcgtccttcggcaggccggaaccaccggtgatggtcatggactgctccttgccggtgcccttgtccttagcggacacgtgcacgatgccgttggcgtctatgtcgaaggtgacctcgatctgcgggacgccacgcggagccggagcgatgccggtcagctcgaaggtgcccagcggcttgttgtcgcgagcgaactcacgctcaccctggtagacctgaatcagcacggacggctggttgtcttcagcggtggagaagacctcggagcgcttggtcgggatggcggtgttgcgatcgatgagcttggtcatgatgccacccttggtctcgataccgagggacagcggggtcacgtcgataagcaggacgtccttacggtcgcccttgatgacgccggactgcacggcggcaccgacagccacaacctcatccgggttcacggactggttcgcttccttaccaccggtgagctccttgacgagttccttgacggcgggcatacgagtggaaccaccgacgagcaccacgtggtcgatgtcgctcacggagatgccggcgtcgtgcagcacgttgttgaacggcgtgcggcagcgacccagcaggtcggaggtcatttcctcgaagtgcgcacgggtcagagtctcatccaggtgcaccggggtgccgtcaggggtcatggccaggtactgcatggagatgctggtggaggtggaggaggagagctccttcttcgcctgctcagcggcttccttcagacgctgcagcgcgatcttgtccttggacaggtcgacgccgtacttgttcttgacttcggaaaccagccaatcgatgatcttctgatcccagtcgtcaccaccgaggtggttgtcgccgttggtggcctgaacctgaatggtggagaagccgtcgtcatccttgccaatctccagcagggagacatcgaaggtgccgccgccgaggtcgaagaccaggatgcgctcgtcttccttgcccttctcaaggccgtaggccagagcggctgcggtcggctcgttgatgatacgcaggacgttcaggccggcgatcttgccggcgtccttggtggcctgacgctgggcatcgttgaagtatgccgggcaggtgatgacggcgtcggtgacgggctcgccgaggtaggcctcagcatccctcttcagcttcatcaggatctgcgcggaaatctcctgcggggtccacttcttgccgtcgatgtcgacggtccagtcggagcccatgtggcgcttgacggaagaaatagtgcggtcaacgttggtcacggcctgacgcttggccacttcgccgacgaggatctcgccggacttggagaaggccaccacagacggcgtggtgcgcgcgccttcagcgttgacgataacggtgggctcgccaccttcaagagttgcgatgcaggaattcgtggttcccagatcgataccaactgcacgtgccataatgtgtgctccttaattactcgtttgttcttacgttctttgcccaagttccgattggtcgtctcttggaccttccaaacttgagcctacatcactcaacttccatttggcaagttctattcccaatttcaacacaaaaagttgagtatgtttgactcaagttttttgtgggagtgactgacggcgatgacggagtggtgcgtttggagccaaaatccacttatacagaaaactgcaaggggtgactggggcgcgccatcagacttgccatcagacttgccagcggcggcgcgcgattgcggcgcatggggtgtgtcggcgacgttattgtcgctgggggcatcgatgcgctgaataactcagacacagtgtttgtcgccgattttctgcgggaattgtttggcaatatcgccaggtatgccgattcgacgcagcgttacgtggtgctggtttccgccgctcaggaccgcgtcaccattgatgtgacggaccgtccgcgtcaaggtggcacgacgcttgaggggcggcattccgggcttgcgtactatcgggagcgtgtgctgcatgcgcacggggattgggatgtgcgggagaaacgcgggcagtgggtactgcatgcttcagtgccggtcgataacgctggctaatcgacaacaccggctcatcaataacgccggctaattgataccgccaatcactcgataacgccagccagtcaataacgccggtccccggccgcgccggcgtgggtcgcgagcgaggccgccatcgcgaccgcgcagactgcggcggccaccgcgacgcccttgtgctgtttcaccttgtgcatgaaaagttcctttccactgaccgcacgatgagtgcaatcgcgaaggccatcccacgcactgcacccggtatgccacgcccttcggcaaccatgccgaacttatcgccgcataccggggcgcacccggatgttgcagaaaactgcaaccgggctcagctgcgcagcagaatttcttcgagcgcgccgaccaccgcatcgggcatgtcggtgatccagaaatcgttggcgtagcgcggaccacggttcatggtgcgcagggcgccgatcgcgccgatgccgagcttgtggaccgcctgcagcgcgagctccttggtgcggtagagcatctgggcgtgcagcagtaggtccatcgcgtccgattcgaccggattgtcggcgatgcgcagaccgccgggaatctcgatgcgcagactggcagccgagctgatgccggtgacggacacggtcaggctcatggtcgcctcgtcgtacgccaccgtcgcctcgaccggagcctcgccggaccatgcacgcacgccgctggccgcgtcaaccggcgcgacgccgcggaacacgaccgtccagtcgcgcaactcgggtacggcggacgtatcgccggtaaccggcgcgacggtgaaggcgctgggcgacgcatcggccccgccccacgtgaacgctatcgcggtgtcggcgctgggggcgccccacgtgccgcgatcctcgcgcatgacgaacgagccgtcggcaccagggaacaccagcacgcgcagggcctgcgggttggcgatagagttgatcgcttcgccggattccgcgacgtcctgcaacggcacgatcgcgccggccttggcgaacaccggcgtgcggtcgagcgagcgccagacctccagtcggcggccagcggcgtcggatgagacgtatcggcggccgtcgaagaagtcgaaccactccccctgcggcagccaggcgtcggcgcggccgcggcaggcggcggcatcgtccggggagacgatcggcgcgaccacgagctcggtgccgaagcggaactcatccggcacctcgtaggcgtccggcgtatccgggttctgccagtacatcggctcgaccagcggacggccggcttcggcggcacggtagttcatggtgtacaagtacggcatcatcgcgtggcgcagacgcagcgcgtccaccatcgcggcgctcacgtcacggttgaagttccacggctccttgccggagaacggcgagttggacgaatgcagtcggttgatcgggctgaacgcgccgagctggtaccagcgggcctccagctcttcgttgcggtagccgaacatgtggccgccgatgtcgtggctccaccagccatacccgatgttggaagcggtggcggtgaactgcggctggaaggcgagcgattcccaggtcacgatcgtgtctccggagaagccgaccgggtagcggtgggagccggggccggcgtaccgggagaaggtgagcggccagttgccaccgcgccctgagtcgaggtagtgcatgtggttgagcatccacagcgggtcgagacccttctggcgggtcacgccgccctgctgccagtccagccaccagaagtcgacaccttcggcctccatgcggtggtgcatgtcgaaataggcgtccacgaagtccgggttggtgaggtcgaattccacgttctcctcggtggccgggtcgatgccgacgcgcttggcgacttcggggtaggcgtcctcgaacgcgcgcacgccgtcgcgcgggtggacgttcagtgtggtgcgcaggccgcgccggtgcaggtcggcgaggaaggccggcgggtcggggaacagttcgcgattccacgagtagccggtccagccggaaccgtacttcgggtccacgtcgtccacgcgatgccagtccatgtcgatcacggaggtggtgaacgggatgccctcgcgcttgaagcggtccatcagggccagatagccgtcctgcgtgtaccggtagtagcggctccaccagttgcccatggcgaagcgcggcaggagcggcgtggggccggtcaggcgatagaagtcgcgtacggcctcgatgtagcggtggccatagccgaagaagtacaagtccgtttcggcggtggcgcgcggggatacccaggtgccgaacgggttcgccttgccgttcaccgtgtcggtttcgatgatgatgttggcggcggaatcgtcgatgacggcccagccatcgcgcgagatcacgccgttgtcaagctcgatggcgccgtccgcctcgtccagcgtgcgggcggtgcctttgaggttgccgcgctgggcgtcgccgtaatgccaggtgttgaactgggtgtcggccacgcctttgacgaccacgctcaggccttccttgctgaacggctgctggtcgtagacgatggtcagggccgcggtgtcgatgatgacgcggccgtcacgctcggtgacgcggcgttcgactgggctaccgaaatcgcggttcaggacggtctgggtcgggcggttctcgaatacgccggaatcggaccattcgaatcgcacgagcgaatcggtgatgagtccgatgcgccagtgctcgccggacaccacattgtcggcgcgcatggccggcgtggcgtcgaggcggaagtcctgcggatcgggcgaggtcggagacgactgcttgagttgtggtgactgtgccatggttaccccttctgtacggttattcacgatgatacgagtgatgcggccgcggctccccgggactggtgggagactgcggcgcggttcggattcggccgaaaccggccgggtttacttgccagagccggtggcgatgccggcgatgaactgcttctggaacaccaggtagacgatgaccaccgggatgatggtcacggaggtggcggcgaacagtccgccgtaatcggtgccgtactggccggagaacatcttgaggcccaccgacaacagctgcttgtcgtcatcggtgatcatgaggaacggccagaggtagtcctcccagttccacaggaaggtgaagatggcgagcgcggcgatggaattgcggctcatcggcagcaccacctggtggaagatgcgccagtcgctggcgccgtcgaggcggacggcgtgcgggcggagcagggcatcctcggagttgtggacgttgaacagcacgggggcgttcttgttgcccttgagcgagagcggggtcttgacccagtagtcgctccaagccacctgcgagatcttgaaggtgacgttcgggtggatcttctcgtactcgtggagcatggagatcaccgggtcagtgctttcgtcgccccaggaccagtagcccagttcgatgggctggccgtcgttgaccaagtggttggggtcgtaggtgatggtgtcgcccatgacggccaggcccttgtcggcctgggtgtcgacgacgcctgacgaaccgctcgaactgcaaccggttgcaagtgccataatgctcacggttgcagtcagcgcggcgagagatttcttgatcttcattatctcccttacttcctcgcaagctctaagtgaaaacggttcagcatacgggtgtcgaactagttcggcaatccggctttctcagccatgcaaaccgttacatttgcaacctgttacattccaaagctattgagaccatattggtctatattttcggcgtgtcgcaatatcgcaacccattgcactatgactgtcgtaaaacgtactgcaatgatttacaatgaagagaagtttgtcacaccgtcaactttgaaaaaccgggaggggccatgaaagccagcatcgaggacgtcgccaggcaagcaggcgtctccaccgccacggtctcccgcgcgttctcccgccctgacatggtctccgccaaaacgcgcgccaaggtgatggaggccgcccaacaactcgacttctcggtatcccgcatggccggcatcctcaaatcgggccgctcccaccgcgtggcgctgctggtgggcagcagcaagctcgactggttcacctcgcgcatcatcgaaggcctcaacgaagtgctgcgatcggccggctacgatctggtcatccaaccgatcggcgatgcgggcgcgcgcgaggagttcttcgacgaactgccggtgcgcggcaacgcggacgcggtcatcgtctcgtcgttcgccatcaccccggccgaaatcaggcgactcaacaccacgcggatcccgctcatcggcatcaacacggcctcgcaggggttcaccgcctccgtgggcatcgacgacaaggccggcatccggctgatcgtgcgccatctgaccacgctcggccaccgcaacctgttgtatttgtacgagacgttcgatgccacgatgggcttcagctcgcacaaccgcgtcaccggattcctggaggcgtgcagcgaactggacggcgtgaccggccagacgatggacatgcaggccggcgacgatccggtcgacgccgccctcaccgcgctgctcgcgcgcgacgacgccccgactgccctgtgcttccatcaggattcgctggcgattccgctgttcttccgcctgcgccaatgcggcatggcgattccgaccgacctgtccgtcaccggattcgacaacagcacgttctcgggcgaggtggggctgaccaccgtgcgccagaagccgtacgacatggccgtcgccgccgcgcgcaaggccctggaccttatcgaggggcgcaccctggaccagccgcacgagatcttccccgtgcaactgctggtacgcgactccaccgccgcgccgcgggtgcgcggctgagcggggccgaatcagtcgttattcgggccgctgttgtcggactgggctttgccgttcctgcgagctatcgccatgaacgtgacgccgacgatgacgggcaggaggatggcggcgagcgttgcggcgcggcggatggcatcggacgttgcctttccggacttggcgtcgcctgacttggcggacgctgcggaatcggcggacttggcggcggtgtcatcgcccttatgcggtgtttcgccggtgaaccaggcgggatcggacggatcgtatttccgggtgccggcccagtttgcgggcgtcgcgccggcgtatagggcgacggccgagcccttggccacggtggcggtgaaggtgccggccacggcgttgcggaagccgatcatgccgcggatggcggtccagcgttgcgcgcagtgccaggtgccggcggtttcgatgccgtcggtcggacaggtcatgtccggcacggaggtgcgggtggcgccgggagcgccgtcgtcgacgccggcgtagtagtagccggagaagatgtgcggctggccgtaatcgtaggcgagcatgaaggcgttggcgagcaggtagctggtgccgtcacgggtggtgagcgaggagccgttgcgctcggtgtcccagttggtcacccatacggccgccttatcggaatccacccaggtcggtccgccgatggcgtccaggccatccgaacgaatcgatgcaggccggcttcgacatggacctctacctcgactggcgccgggacggccacccgaacggctacaacctgttgctgcgcaataccgacacgcctatggagcacgaaggcgattccagttatttcaacgccgattcaggtgcctcaatcgcctcattcctcacggaatacctgccggacgagctctcttccgacgccgacgtgctgctcagtcttggtgaaccggccgtgagcggcgggcagctgacgctctccccgcaatcgttcgtcgtgtttggttaaacccgttcgacctcacctccgccggcgaggctgtcggcaaagtcgactggggatagtcaacgggccatcacgacaaacaccaacacctctagcctcgtccaactcaccgaatgtattgcaatcgttgtcaatatgagttacggtagaggcagaacagctcgaacattggtctgtcaggttgccggaacctcaacgcagagcggccctcgaacagcaatgcaaacgactagcagtacccgatttgcaagcaaggagtcatcatgaccgacgcatacggcaacgacgcagcaaccagcaccggcaccatcgcagacaccaccaacaacgccgcttccggtgccccgcagcgcgcggaaagcacggaacgactcgcccgcccgctcatcaagctcgccaaagcctgcggacttgccacctcattcatcgaccagctcggcacctacaccgaaatcagcgacgcggccttggtcgccgtactcaaggccctcgacgtggacgcatccagcgacgaggccatcgtacgctccacgacccaacttgaggtggaaaacagcaaacgtttgctcccctccaccatcgtcgccaccaccggcaaaccgaccggcatcaccctgaactgctcgtcggacgcggacatcaccgcctccatcgaactggaggacggcaccgcgtttggccactttgccctgctgccgaacctcaattccggcaagccggacttgaccatcgcacccgacctgccgatgggttaccacacgctgaccgtcacggttgacgggcgcgagggcaaggcggccatcatcgccgcccccgcgcgcattcccgtgccggaggcggtcgccgagcaccagcggtggggctggatgacgcagatgtattccgtgcggtcccgcgaatcgtggggcatcggcgattacggcgatctgaagcgtcttttggcagatgccgccgagaagtccaaggccgacttcatgctcatcaatccgattcacgccggcgcgccgattccgccgcttgagccatcgccgtatctaccggaatcgcgccgattcctcaacgtgacgtacatccggccgcaggatatccccgaatatgccacactgccggccgacgtgcgcgcgcaggtggatgcgctgcatgattcggtggccgcgcgcaacgacgaatcgaccccgatggacatcaacgcggcgtgggaggccaagcgcccggcgctgcgcctgatcttcgaagcgggccgcaacaacaagcgcgagctcgaattcgagcatttcaagaccaccgccggcccggacctcgattccttcgccacatggtgcctgtgcttcgaggtatggggcgcgccgtggggcgagaaccgttggttcttcgagaagaccatcgacgacccggccgtgcgccagctcgtcgaggagcaccacgacctgttcgagttcaaccgctggctgcagtggatcgctgccgagcaggtgaacgccgcgcagcaggaggcgctggaccacggcatgacgctggggctgatgcaggacatggccgtgggcgtgcacgggctcggcgcggatgcctgggccaatccggaacgcttcgcctcaggtggcgtcacggtcggctgcccgccggacttctataaccagcagggccaggattggggccagccaccgttcaacccgcgctacctggaggccaccggctaccaggtgtaccgcgagatggtgcattcgatgtacgagcacgcgggcgcggtgcgcatcgaccatgtgctgggcttgttccgcctgtggtggattccgcaggggctcggtgcccgcaacggcgcatacgtgacgtacaaccacgaggcgatgttgggagtactggccatcgaggccacgcgcgccggaggcatggtggttggcgaggatctgggcaccgtaccggattacgtgcgccgcattctggccgatcacggcgtgctcggcactgacgtggaatggttcaaccgcgtggacgattcgccgaacgccggcgacccgtaccgcgcacccaaggactatcgcaaacaggcattggcctcggtgaccacgcacgatctgccacccaccgccggctacctgaacttcgcacacgtcaagctgcgcgaggagctgcatctcctgagcgagccggtggaggcattcgccgcctcggcgatggccgagcgcacggccatgatgaaccgtctggtggagaacggctatatctcgcagaccgtggcggatgatgtggaaggccatgtgcaggaaatcgtggaagcgatgcacgccatgctcaccgatacgccgtcgctgctgctgcaggcagcgctggtggacggcgtgggcgaatgccgctcccagaatcagccgggcacttccagagagtattcgaactggcgcgtgccgctggcggacagctcaggccacgtggtacataccgacgaggtcttcgacctgccacgcgtgcagtccctagccgccgtgatgcgccgagagaagcggtgatcgattccggcaatgggaaattggtctaaatcggcccctcgtaatcgagatagccgaagacgatgacttgttatgggcatgttatcgttgtcatgacaatgattgttcgcgacggcgaaggagcgacggctatgaccaaggcaagcattcaagcggtggcccgcgaggccggcgtttccgtatccacggtgtcccgaaccttcgccaagccggatctagtgcttccagagactcgagaccgagtgatgaccgcggccgaaaagctcgactactccgtctctcgctcggccgccgcactgaagtccggccagtcgttccgcattgcgctgctggccagcgagaccatcaccacctggttcaatgcaaacatcttcgccggccttgactcggcgctgcgcccctccggctacgacactgtgccctaccccatgcgcaacgccgccgagcgccatgacttctttgcggatttgcccgtgcgacgcaatgcggatgcggtgattgtcagctccttcgacattgagccggctgaagtggagcgactgaagcatatgcacgtgccgattgtcggcatcaacattccctccaccgatgggttcgacgcaggcgtgagcattgacgattacgccgccacacgttcggccatcgagcacctgattgcactcggccaccgacatatcgcattcgtcggcagcgcaccgaccgaaaccaatatgcgctacagtgccgaggctcgcctgcagggcgtcatcgacgctactgccgcccatccggggatcgaactaacgcctctgagcattcaacgcggtcttggcgaaagcaacgcggcattgaacgccgcactgaacgcctcccccagcatcaccgccttctgttttgaggatgatgaaatggccgcacccgtgctgtatcgcctgcgtcaatacgggcggcgggtacctcaggacatctccatcatcggcttcgacgattccaccctgtccgccgccgtgggactgaccacactgcatcaggacccgttcgcaatgggcgtggccgccgggcacatggtattggatgccattgcgggcaagtcaatcgaaccggcattcgtacggccggacactccgctaatactgcgcgaaaccaccgcgccgcctgccgcaacagcagcgtccgcgcaggcgtgactacgttaccaccgcaaaacgccgataaatcgacttttgcatgcgtaattcacatgatatcgttgtcatcatcaatacaacggttgggccttcacacagcagttcgagcacaaccggaacaacccaaccacaacgcacccggaacaggaaggaatcggcatgaccgccaacaacctcaatgacgactggtggaagcaggccgtcgtctaccagatctacccgcgcagcttcaaggacgtcaacggcgacggactcggcgacatcgccggcgtcaccgagaagatggattacctgaagaacctcggcgtcgacgcgatctggctctccccgttctacccctcggatctggcggacggcggctacgacgtgatcgactaccgcaacgtcgacccgcgcctaggcaccatggacgacttcgacgcgatggccgaggccgcgcacgaggccggcatcaaagtgatcgtggacatcgtgcccaaccacaccgccgacaagcacgtgttcttccaagaggccctcgccgccgagcccggctccccggcgcgcgaccgctacatcttccgcgacggccgcggcgagcacggcgaactgccgcccaacgactggcaatccttcttcggcggcccggcctgggcgcgcgtggccgacggccagtggtatctgcacctgttcgataaggcgcagccggacgtcaactggaagaatccggacatccacgaggagttcaagaagaccctacgtttctggtccgaccacggcaccgacggcttccgcatcgacgtggcgcacggcctggccaaggatctcgaatccaagccgttggaagagctcggccgcgaatacagcgtggtcggcgtgctgaatcatgacttcagccacccgctgttcgaccgtcgtgaggtgcacgacatctaccgcgagtggcgcaaggtgttcaacgaatacaacccgccgcgctttgccgtggccgaggcgtgggtggtgcctgagcaccagcacctgtacgcttcgatggacgagctgggccagtccttcaacttcgacttcgcgcaggccaactggtatgccgacgagttccgcaaggccatcgccgcgggtcttaaggcggcggccgaaaccggcggctccaccaccacgtgggtcatgaacaatcacgacgtgccgcgcagcccctcccgctacggtctgccgcaggtcaagggcgcgccctaccaccagctgccgcacgactggctgctgcgcaacggcaccacatatcccgaagaccgcgagctcggcacccgccgtgcccgtgccgccgcgctgatggagctcggcctgcccggtgccgcatacatctatcagggcgaggaactgggcctgtttgaggtggccgatattccgtgggatcacttggaggatccgaccgccttccacaccacccgcaacacgatggacaagggccgcgacggctgccgcgtgccgctgccgtggaccgccgccgatgagccggccttggccgatttcagccgtccggctccggccgatgacggtaccggcgaaaaccatgtgccgctgtgcgcagccggccagttcggcacgggcgcttccttcggcttctcgccggctacgcgcgctgagggcgtgacgccggccgccgacccgcacctgccgcaaccgctgtggttcaaggattacgcggtggacgtggagcaagccgacccggactcgatgctcgcgctgtatcgcgccgcactggcgattcgccaggagtcgctgaccgccacgcgcgacaccacggccgagcaggtggacatgggcgacgatgtggtggcgtacacccgcgcggcggttggcgggcgggtgttcacctcaatcaccaacttcggcaatgccccggtcgcgctgcccgatggctccgtggtgctggcgtccggcccgctgacccccgaaggccagctccccaccgacacttctgcgtgggttatcaagtagatcccttggaataagcgaaaggccgccgttccgaatgaatcggagcggcggccttttggtatgcactggggaccaccctcaggcgcttacgcgccagcgtactgcaacacggacagcctgaaggctgcgattgccggctcgctgttcgtgcgcacctcacccgaggggagccaaggaagaatcactgaacctgggcgcgggcgatcttgccggtgaaggagttggcctcgtcggcatccttgacgccatccttgttccaggagaacatggcgcgcagcttcgggccgacggtctcgatgcgctcgttggagtacttctcctgcagttccttgaagtgcggggcgccggcatcctgatcgtcgatgaactccttggcgaaggagccgtcctggatgcgctgcaggtggtattccatgcgcttgcggcagtcctcgttgatgacggtgttgacgtagtcgccgtactgggcggtgtcggagcaggaccaacgagccttgttcaggccgccctcgttcatcagatcgacgagcatcttgagctcgtggcagacctcgaagtaggcgatttccggctggtagccggcgtcggtcaggacttcgaagcccatctcgacgagcttgttcacgccacccatgagcacgttctgctcgccgaagagatcggtctcggtctcttccttgaaggtggtcttgatggcaccggcgcgcagggcaccgagggccttggcgtaggccagggtcagagcccaaccgtcgccacgcggatcctgctcgacggccacgacgaccggcacgccacggccagcggcgtactcacgacgaacgatgtggcccgggcccttcggggcaaccatgaacaccgggtgatcctcagacggcttgatgtagccgtagtgaatgttgaagccatgagcgaacgcaacagcggcacccggcttgatgttgggctcgatgtcgttggcccagatggtgcgctggtactggtcgggggccagaatcatgatcacgtcggcctcggcggaagcctcggccacggacttgacctcgaggccctgctccttggcgaagtcgaccgacttggaggtcggacgcaggccgacgaccacgtcgacaccggaatcgcgcaggttcagcgcgtgggcgtggccctgggagccgtagccgatgattgcgaccttcttgccttcgagaacagagagatcaccgtcgttctcataccagatctgtgctgccattattggcactccttttcagtagtgggttgtggcgccgctgggcgccgggggtatctacggtgtgcagataagtcctgttttgcgaggattgtgtccttcaaaccgagttcaatcctaccgagaacgccgtcgcagccccgctggagtccacaacgtgagctaggtcactattggagtatggacagccgtgtgcagagaacgattctcgataacaactctgcacccttttgaacagaatcgcacaatcccacatatggggaaaggctgagatatcaacgaccttgcatattcggtgttcgtttgcctgcaagaaatcagcgcatagttgttattgagaatgattcgctgcgcgcaacaacacaaaaccgccgctcccgtatgggcgggaacggcggtttgctagcttaaatccccttcaggggcgacaatcactgaacctgggtacgagcaatcttgccgttgaaggactcggtctcatccttgtccttggcctcggcgttattccaggagaacatggcgcgcagcttcgggccaacggtctcgaggtgcgggtgagagtactcttcctgcagcttcttgaacttcggagcgccggcagcctggtcatccatgaactccttggcaaaggagccatcctgaatgcgcttgagctggtactgcatgcgcttcttggtctcctcggtgatgacggtggaggtgtagtcgccgtactgagcggtgtcggagcaggaccaacgagccttgttcagaccaccctcgttagcgaggtcgacgagcatcttcagctcgtggaacacctcgaagtaggcgatctccggctggtagccagcctcggtcagcacgtcgaagccgaggtcgcacaggtggttgatgccgcccatgaggacgtcctgctcaccgaacagatcggtctcggtctcctcggtgaaggtggtcttgatggcgcctgcacgcagagcgcccagagccttggcgtaagccaggcacagcggccaggtcttgccgtccgggtcctgctcaacagcaacgacgaccgggacaccacggccagcggcgtactcacgacgaacgatgtggcccgggcccttcggggcaaccatgaacaccgggtgatcctcagacggcttgatgtaaccgtagtggatgttgaagccgtgggcgaaggccagggcagcgcccggcttcaggttcggctcaacgtccttcttgtagacggctgcctggtactggtcaggcagaagaatcatcacaacgtcagcctcagcgacggcctcaccaaccggtttgacctcaaggccctgctccttggcgaactccacggacttggaggtaggacgcaggccgacgaccacgtcgacaccggagtcacgcaggttcagcgcgtgggcgtgaccctgagaaccgtagcccaggatagccaccttcttgccatcgaacacggacagatcggcgtccttctcgtaccagatagttgctgccatttttggcgctccttttatttatttgtttatttatggggttgaatttttcttgcgttctgcggggtttcgctgagcgatattctgttgtggctttccttgtgggcttttccgatatgcaggtttagtcccgtcgcatcggaaaagccctgtaggggttcacttagtggaattaggggttttcacgttgtgaacatcgtcacttggtaaagtcaacgtccttagtctccttgcaggtgagcacggagacgaggcagcacacggccatcacggcaaggtagaggcccacggagtggacgccccagtgggagctcagccaagtggcgatggtcggcacgaaagccgcgccgacgatggcggccaggttgtagccgatgccggagccggagtaacgcacgttggcgtcgaacagctcaggcaggaaggcgccgatcgggccgaaggcgatgcccatcagggcaaagccgacgcacaggaacaccatgttggcgaagaagttcttctggccgaccagaccaccgtccagcaggaacgggaagagtacggcgaacaccacaagtgcgcaggaggagaaggtcagcacgcgacggcggccgatcttgtccgcgtacaggcaggacagcacgatgaacagggcgaacacgcagatggagatcatgagcatgagcaggtattcctggttggtgaagccaaggttgccgccgccttcgccctgctccttggtgccccaagcgagggaccaggtggcgagcgtgtagaacagcgtgtaggtcacagccacaaggaaggtggcctgcagcacctgacgccaagacttgcggaagacctcggtcagcggggacttgacaaccttcttctgctcctgagccatacggaagatcggggtctcctccatgtgaacgcggaccacgagaccgacgatcaccaggatggcggacagcaggaacggcacacgccagccccaagccagcatcgcgtcctgattgttgaaggattcgagcacgaagtaggtgccgttggacaggaagaagccgatcggggcgccgagctccgggaaggagccgtacagtgcgcgcttgtcttcaggcgcgttctcggtggcgaccagtgccgcgccggaccattcgccgcccaggccgatgccctggatgaaacgcagcaggcagaggatggcgactgcaccaacgccgacctgatcgtaggtgggcaggcagccaatcaggaaggtgccgacacccatggtcatcaggctgacgaccagcgtggtcttgcggcccatgcgatcgccgaagtggccgaagatcagcgagcccagcgggcgggcgatgaaggcgacggcgaaggtcagcaagctcatcagcagtgcgacggtggggttgtccttcgcggagaagaagatgtgcgggaagtagtttgccgcggcggtgccgtaggcgtagaagtcatagaattcgatggcggtaccgaccatcgacgcggcgatcacggtcttgaccgaatcgcgtaccaaggtagcggctttacctgccgcctgccctaagccagtctcttcgactgctgcagtcattgttactcctgttttgctctcgttcactctcatcggcgggcgattatttcgccccacagggaggttgttgttctgtcgctgtgttgttgccgtgtactgtccgctaccgtttccgtctgcgggattctgccgtaagccttgtgagcgcaacaaaaaaagccccgcatcatgcagggccgtgccgattgtgtcagcttgattggccctgccttcgttgacggggcttcaagcatcagtgccgaattagtccgccagcgaagacgggctaataattcgtgcggatacaaacgcagaagcattgaatccagtcatcgcgtggcctcctttcggtatttcctcaggccgttcgacctgaactggaatgtaaacataggtttgtatgtcttgccaatccagcaagggttcacattgtggacattgtgacgtaggagtcatgtgagatgggtgactgtgggcggccgtgactcggctcccctcagtcgcctacgccgccagctcggccgcaattacagacgggctaccgcccgcagtctgcctgctcgcctcccggctcgccttcgcctacaaacagtccaccggactgtttgcttcacagctcagcctcagagaggggagccaagataggagtcaccgggtggtttcgccggggatgagggctacggggatgacttcttcgggagtgggttgggtgtcaacgtccgaagcgctatcgttcttggacggagaggcggggccaccgtcggcggcgatctgtgagtccatgcggacggcgagcgcggcggcgatggccgggaagtcctgtcgaatcgcggtcaggcgtttgccggcggtttcggccatgagagtgccgtcataggcgatgacttgcagatcagcaggcacctcgataccccggcgtgaggcttcctgcaatgccacggatgccaccacatcggagccgacgatggcgtcgacatcaggataccgctcgaaaatggcgcatgcggtggcttcgtgggcggcgatgtcggccacggtgccggcttcgacataatcgcaggcaatgccggcctcagccagcagacgctcgacggtgagatggtagcgaatcgtggggaaagtggtgccttccgcgaactgggaacgcgggccaccaacgagcaccatgtggcgcgcgccggaatcgatgagctggcgcgcaatcagacggcctccctgttcatgatcagaccggacgaccggcacaccctcaccgagcgtgcggtcgaaagcgacaattggccgatggatggaggtccagtagtcggccggatgctcggtgtgggccgccatgatgatgccgtccatcatgtgccgctggagcatgtcgatgtactcgctctcgcccttgtctgtatcggcggtggagcagagcagggttttgaggtcgcgcgcggcgaactcgcgctgcagatgcgcggtgagtgtggagaagaacgggtgggcgatggtcggcatgatcacgccgatggtgttggtgcggttccggtagaggttgcgggccagctcgttgggaatgtagttgagctggcgcatcgcggactcgactttggcacgcatatcggccgagacgtagccggtgttgttgaccaccaacgaaacggtgcttaaggacacccctgccgctttggctacgtcgcgcatgccgaccatggttttgctcccctgcgagtactggactggatcactgctgaccagtgtactcgaaccggtttattattcggcagatttggtggtgagggtgacgattccggccagcagcaccatgacgatggcggacgggaagagcaggtaatagccgaagctatgctcgaaggcgttcaccagtagcgcgccgatgatggcggcgagcgccagaccggccgagttggcgagcgcataaatgccgaggtcgtggccggctcggcgcgggtcgggcaaagagtccatcaccagttcaagtccgagcgaatcatagacgccaaaggcgaatccggagatcaacgcaaacagcagcatgccgttttcacgggcagtgccggtggaccagacgccaaggccccatgcgagccccagaccaatcgcatacagcaggcaagcaccggccaccacacgggccacgggaatgttcttttcctcgattcgctcggaaatcggaccggcggcccaggaggcgagcgcggcaccgatcaatgtggccacagccataccggcaatgaggaatccggccggaatggtcagcggcgcggacgtaagtaccacggccttgccataaacccagaaacgtacgagataccacagaaacacaccggtcagcccaacaccggccatcatgcacgtacgggcggcgaacatccgggagaactcgggagcgtgggccggcgggcgcaattggtcaagtacctgactgcggtcaaaaagctggttcggctgctcagcgctagaaggctccttgggcagaatcaatacggtggcaataccggacactgcaaatagcacggcggtgtaactaaacggcgcaaacgaattgaacatcacaccaagcgcacccatgcacacgccaagcgcttggccgagcatcacaccgatgccatgccagcgttcgatgcgagggcggaacttgtcgggcacccgttcgctgatggcgctggtcaacggcacggaaagcatcgcataggcgaactgtaggaacacccagaaaatacaaagcacaatgatgccgatattctgccccagaatcagcgtgatcagcgcgcacagcagacctccgccaaccatccacggggtacgacggcccaatggcgtgcgtgtgcggtcggacaacactgaaatcagcggcatcgcaaacatggaggccactacgccgacaatcaccaacacggccaggggcatcgccaattcggtggcgacgggcaacgggcggccagtggccggattgatggcgatatgaccggcaacagcagtgtcatagccgaacgtacgcgcaatcgcgttgggcatggcaatggtgttcaacgccacccaaggtgcgccgaccagaattgaagcagcgaagaaaccccagttgagtcgggagacctgacctgcggtagggcgttggccattgacggcgaccatgggatcgcgcatgtcgaggtaggcggacgacatatccggcgcgggagtgtccacactggcggctgcagcagcggctgccgaagaaccggcggaagccaatcgcacagcctgagcctcaggctggtccgcagaggcttcgggcgggcggcggcgattcttgatggccagtctggccacggcggctttgtcttcgggacttaggaccttgtccaaatccgggcgatcatcaatacccggacgcacatacggttccaacatgatgctgctctttctctgttctgctgctcgtctcgtcgattccggcgggatgcttgggccgcgcccgcaggagcacgaccttcaaccccgcatacgcaaaaccgcccgagcgcactggcttcagtgcactgcgggcggtttgctctccatgaacccagcttacgccgggcgcactacttggagcgcgcacagcggagtgacgtttatgggccaacggttagtcgatatcggcaatcggcgggttggcgagcagatcgcgggtttcgtggtcgccggcggcatcgctccaggcaaggctggcaaccggggtggcgttgtctgtgccgaggccgcgtccgggctcgaaggtgagggcggccgtggacgcgccgtcggcggcggtccagcggaaggtgatggacgtgtcgccatcgacctcgtagctgaactcgccatcgaatgcagacagctcgttgcggaacttggccagggcgttcagggccttgaccaccgggcgttcgaggttttcatcgatttcggcggtggagtagtagtggcggttgatgtcgcggccgttgttggtgcggcgcagcagttccatgtcgttgcggccggcgagcgcgcccacgtagtagacctgcggaacgcccggcaggaagaactgcaccgcgcgagccgcaatatagtgctgatcgttgcatcccagcgccgaatagtaggtgctgtt

SEQ ID NO: 890 - DNA, 98724 bp, Unknown
  gut microbiota DNA sequence
gctcccctcaaagaaggggagccaagagacaatattctggctcccctccctgaggggagctggccggcgcagccggactgaggggggcactcgttgcagcgctacttacttcttctgctcgtcgagcacggactggtagacttccacggtcttgtcggcgatggtctcccagctgaacacgtcgcgggcgcgttcgtagccggcctgtcccatcttcttggcgagttcggggtcagccatgatcttgtcgatagcggcggccatatcgtgtacaaacttgtccggatcggtgggggtgccggtgccgtcgtgcagctggtcaatcgggaccagatagccggtttcgccgtcgaccacgacttccggaataccgccggtggcggatgcgacgaccggcagaccgcaggccatggcctcaaggttcacgatgccgagcggctcataaatgctcgggcaaatgaaggcatcacagccgtgttccaaagcattcagctcaggcttcggcagcatttcttcaatccagacgatgttgccgcgctcctcatccagcttggcgaacgcggtcttgacctcttcggcgatttccggggtgtcgggcgctcccgcgcacagcaccacctgaatgtccttggaaatcagatgtagggccttgagcaggtatggcagacccttctgacgggtgatgcggcccacaaacagcagggtgggcttcgaacggtcgatgttgtaacgatcgaacaccttccagcccgggtcgtcaggggccggggtggcgaagtcggccatggtgatgccgttgtacaccacgacgaccttgtccgggtcgaggttcgggtaggcggtcagaatgtccttgcgcataccgccggacacggcgatcacacggtcggcgtgctcgtaagcatccttctcagcccaggagctcagattgtagccgccgccgagctgctcacgcttccacgggcggaacggctccagagagtgcgcggtaataaccaatggagtgccgtgcagcatcttggccatgtagcccgccaagcaggcataccaggtgtgcgcgtggatgatgtcggcgtccacatcattggcgatctgcaaatcaacgccgaaggtcttcaatgcggggttggcatcagccagctcagaaggcgtgtcatagccgacgaccttcaagctgcccttagcatcggcagcattcgggatagcaggaatgtccgcctcggtgcgcttgccatcaaacgcacgaacggttacgtcgatgcgctcggcaagcaccttggacagttcctcggcgtgtacaccggccccaccatagacatgcggcgggtattcgcgggttagaatatcaactttcatcggactgcctctccttcgtgcgtcagaaagaaactcaagcacttcttactttagggcaccgcatacaagaaaacgcacaacttccgtcgtgcgttttgcttttcaagccggatttaccaggcaaaagatcagacggccgtgccgttctgatccaaattcggattgtgcttggaatcgccagccgtaaagaacaggctcagcacacccacaatgaacaccgcggaaacggtgatgatcagccacatcggatggctcggcagccacataaccacgaagaacgcgataatcgcgatggcgatcagcgtccagctgcccacgcggaaccactgacgcagcgaatgcggtgccttgaacatcttcggattcgtgtagttcgggttagtggtcagcagggtttcggtgtccgcaatcgtaccgccgctgggcttccattcggtgccgtcggtgccgtcctgcagacgctgggacttctgctgcagctggtattcgtcaatcattcccgagcgaccgcgaccttgggtctggtcgtactgcgacggcactcccctacgattggccttggcctgtgcacgacgttctgcacgattcgccatctcactcactcctttatccgcaaaaaaagaatcctgcggtagatattaccgcaggattcatctaaacagcgcgttttcagcgaggcagcatcatcggacgctggctggccttgatcggagccggcagctcactggtctgctcgctggagaggtactcgtccacggctgcggcgcaggagcggccttcggcgatggcccagaccacgaggctctggccacggccggcatcgccgcacacgaacacgccgtcctgggaggtggcgaacttgtcattgcgggcgatgttgccgcgcttgtcgagttcgacgggcagctggtcgaggatggtctcggtgtccgggtgcaggaagcccacggagatgaggaccagatcggccggcagcacgcgctcggtaccgggctggcgggtgaaggggccgttctcgccgggagccacggagacgaccttcaggccggtgacgtgaccgcgttcatcggccacgaagccttcggcggtggtcgagttgtcgatggtgaccttggccttctcctcttcggtgccttcgaagttcaccgagtcggtcgagtaaatgtactcgccaccctcttccatggaggaagtcttctggtaggtgcgggcgaaggtcggccacgggctgttgtccgggcgtgaagacggctctttcggcatgatctgcagcacggtgacatccttcgcaccctgacggatggaggtaccaaggcagtcggaaccggtgtcgccaccgccgatgaccaccacgtgcttgtccttggcggtgatgtcgtgcaccggcttgacgccgaagatacggcgcgtggcgtcgggcaggaagtcgagggcgaagtggatgccgtcaagctcgcggcccggaatcttcatatcgcgcggcacgcgggagccgatggccaccacgacggcgtcgtaacggtcacgcaggtcatcccacgtgatgtccttgccgatttccacgttggtgcggaagcgggtgccttcggcctccatctgcttgacacggcggtcgatcagacccttttcaagcttgaagttcgggatgccgtaacgcatcagaccaccgatggcgtcgtccttctcgtagacgacgacggtgtggccggcgcgggtgagctgctgagcagcggcaaggcctgcagggccggagccgacgacggcgaccgtctggtcggtcagacgctgcggcggcaaaggcttgacgatgtcaagatcccaggcctgatcgataatcgtgcattcgtcgttgcgaatcatggtcggcggctggtggatgccgagcacgcaggcctgctcgcacagagccgggcagatacgaccggtgacttcagggaagttgttggtcatggacagacggttgtacgcgtcctcccacttgccctgacggaccagatcgttccactcaggaatcaggttgcccagcggacatccggtcatacagaacggggtgccgcaatccatgcagcgggccgcctgcgcttgggtccacggttgcaggccggtttcggcgtgaacgtcgaaccagtccttgatacgttcctcaacggggcgttcagccagctctcggcgggtacggaccttcagaaatcctctcgggtcgcccatgtcagcgcgctccttccataacctgctcgtacaccttttcccaggcgccgggcgcattgaaatctacattgttggccttggcctcttccatggccttcgtcatggccacgaactgcttcggcaccacgtgagtgaaccgcttgacggtctcgttccagtcctccagcaaagccgcagcgaactgcgaaccggtctcttcagcatgctgcttgaccagtgcgtacaccagcttggaggtttcggcatcaagcgacttgaagagcagtgcaccggacttgatggcacccgggttgaccttcttcatatcaaggtcaagcacataagtgttaccgccggagaagcctgcaccgaagttgcgtccggtggggccgagcaccacaacagtgccgccggtcatgtactcgcagccgtggtcgcccacgccttcgaccacgaacgtggcaccgccgttacgaacgccgaaacgttcgccggcgcgaccggctacgaacatctggccggaagtggcgccgaaaccggtgacattgccggcgatgacgttgctgtgcttgtcgaaggtgacggtgtcttccgggcgcacgatcatgcgaccgccggacaggcccttgccggcgtagtcgttgacttcaccgtagatgcgcatggtctcgccgcgcgggatgaacgcaccgatggactggcctccggaaccgtgcagggtcatgtcgatggtgtcgtccggcagaccttcctcgccgtaacggcgggtgatctcatagccgaccatggtgccgaccgtacggttgacgttgcgaatcggcatttcgatgcgcacgggttccttgtgttcgagggccggctgggcaagtccgatgagcttgttgtccagcgccttctccagctcgtggttctgctcgatggtctggtgcaggatcgtgccgggtaccgggccggcctgcttgagcacgttggtcaggtcgatgccgccggacttccagcgcttgatggcctcgtcctgatccaaacactcaacgtggccgatggcctcctcaagagtcctgaagccgagctgggcgaggatctcgcgcacctcctcagcgatgaacatgaagaagttgaccacgtactcgggcttgcccttaaagcgggcgcgcagctcaggatcctgagtggcaatgccctgcgggcaggtgttcttctggcaggcgcgcatcatgacgcagccttccacgatcagggccgcagtagcgaagccgaattcctcggcaccaagcagggcggcgatgaccacgtcacgaccggtcttgagctcgccgtcgcactgtacgacgatgcgggagcgcaggccgttcaggatcagcgtctgctgggtttcggacaggccgatctcccacggggtgccggcgtgcttgatggcgttgagcggggctgcacccgtaccgccgtcatagccggagataagcaccacgtcggcatggcacttggccacacctgcggcgatggtgccgacgccgaactcggaaacgagcttgacgtggatacgtgccttcgggttggccatcttcgcatcgttgatcagctgcttcagatcctcgatggagtagatgtcgtggtgcggcggcggggagataagctccacgcccggggtggcgtgacggaccttggcgatccacggcgggaccttggctccgggcaggtggccaccctcaccaggcttggcgccctgggcgagcttgatctgcaaatcggtggcgtgcacgaggtaatcggaggtcacgccgaagcgggcggacgcaatctgcttgatgcggctgtagcgctgcggatcattgatacggtcgtcggattcgccgccctcaccggagttggagcgtgcgccaatcgagttcatggcgatggcgagcgtctcgtgtgcttcctgcgagatggagccgtagctcatggcaccggtggagaagcgcttgacgatctcggaggccggctcgacttcggcgatgtcgatgggcttgcggttggtgttgaacttcatcaggccacgcagggtcatgagtcggttcgacgtgtcgttgatgtggtgcgaatacttcttgaacatctggtagtcgccacgctgggtggactgctgaagcaggaagatggcctcgggatcgttgaggtggtcctcgccggtgcgacgccacttgtagtcgccgccggtgcgcaggttgcggtgcggggacgcgctccactggttcgggtaggccacgcggtggcggatggccacttcttcggcgatttcttcaaggctcacgccgcccacacgggaggtggtgccggtgaagtattcgtcgatgacttcttggctcaggcccacagcctcgaacagctgcgcgccacggtagctcatgatggtggagacgcccatcttggacatgatcttgagcacgccggtggagagggccttggtgaggttcttcacggcggtgtccgcgtcgaccttgaggtagccgttgcgggccagatcttccacggattcgaatgccaagtacgggttcacgcaggcggcaccgtaagcgatcagcagcgcgacatggtgaatctcgcgcacgtcaccggcctcgacggccacggagatctgcgtacgggtgtggcggcgcagcaggtggtgctgcacggcggaagtcagcagcagggacgggatcggaccccacgtatggttggactcacggtcggagagcacgatgaagttcttgccgttggcgatggcctcgtcgatttcggcgaagatctcgtcaagtcgctcttcgagggccttgccgccgccggcgacctggtagaggcccttgaccacgtacgggcggtagtagccgccgaggatgcgggccttgtcaaggcgcttgagctgggccatctcatcagagttgaccacgggcagcgggatgaggatcttcttggcgtgcagctcggaatcggccagcaggttcggctcggggccgatggcggattcgagcgaggtgacgatctcctcacgctcccagtccagcggcgggttggtgacctgcgcgaacttctgggtgaagtagtcgaacagcatgcggctgcggctggaaagcgcaggcataggcgcatcgttacccatggaaccgagcggttccttgccggtgttggccatcggcgtgagcaggagcttcagatcctcttcggtgtagccgaaggcgcgctgacggcgctggacggactggccggagtggctgacgtgctcgcggcggggcaggtcgctcatttcaacggagttgccttccacccacttgcggtacgggtgctgggcagcgaggttcctcttgacctcttcatcgggaatgatgcggccttcggcggtgtcgaccaggaacatctcgccgggctcaagacggcccttggacacgatgtgctcctgcgcgatctccggcagaacgccggcctcggaggccagaacgatgtagccgtcatcggtgagctgccagcggccgggacggaagccgttgcggtcgagcagggcgccgacctgggtgccgtcggtgaagacgatgtcggccgggccatcccacggctcgataagcgtgttgttgtactcgtagaaggcgcgcacgtccggatcgagatccgggttcttctcccaagccggcggcagcatcatgcagatggcgtgcggcagggagcggccggcgaggtgcagcagttcgaggcactcgtcgaaggtgccggaatcggagtagcccggggtggtgatcggcagcagcggctcgaattcaccgagcagttcgctgctcaggcggccttcacgggcggagagccagttgcggttgccctggatggtgttgatctcgccattgtgggccagcagacggaacggctgggccagcggccagctcgggaaggtgttggtggagaagcgggagtggacgatggcgatggtggccttcatgcgctcgtcgttcagatcctcgaagaagtgggtgagctgcatggtggtgagcatgcccttgtacgtgatggtacgggcggacagggatgcgaagtagacgcccacctcatgctcgacgcgcttgcggatgcggaaggtcttgcgatccaagtccacgccggccagagcaccgtccggagaggcgaccacgagagtcttgaatcctggcatggcggcaagggcctgcaggccaaggccgtccgggttggtgggcaccacgcgccatgcgaggacttcgagtccctcctcgcgcacgatcttggcaatggcctgttcctgctgaccggaggtttcgatgtcgcggtcaaggaaggcgatgcctgccgcatagtgaccggcttccggcagttcggcgggcacggtggcacgcatgaactcatccggcatgctcatcagaatgccggcgccgtcacctgtgttctcctcggcacccacggcaccacggtgatcaaggttgaccagcacctcaatggcgtcggtgacgatcttgcgctcaggacgcttgttcaaagtggtgaccatacccacaccacaggcgtcatgctcgttggcgggatcatacataccgtccggagcgtggaccgtgagatcgagcggggctttgaatgtcaccgaaatcacctcaattggttgtgggcacgtaagaaaatcatgcctcttcgttcattgctgttgacacagtaccgtcgctccatgtcatttacgtttcatgtgtccatataccgagtcgccataaaagtcaatagtgattctcaagcaatttttttatggccagttatgggagtatttcgaactttttcgctcgaaatgtctatttgaccacacgaaaatacgatacggaaacgtccgtatcgtgaaatgctgcgttgggtgatgttacggattggcggctgtggaccaccctcagtcatgcttcgcatgacagctcccgccagcgggagcatgagaactgtgcatgtctgacaccatagcgatcggcgcgctccgcgaactcaccgaacatggcatccacgtgcccgacgacgtacggctcatgggattcgacggtatccccttctccgcctgcaccaacccacccatcagcactgtggcgatggacgtccccgcaatggctcgtacggttatcgatcgcatggtgacgctgaacgagtcgaacctacggcatgaacggcccgatgacatcacccatgaccatatccagttccaggtgatgccacgcacgtcgactctggccgcctgataccggccggcacccttatgagtgccggccttcatccttgaaaatatgaaggctatgccacgtacagcgcggcgggatacgtaagatacgaaatctcatcgagctgatcgaccgtcacatatccggctggcgcgttgagcacgtccggaatgcggttgacgattgtggcgcacgtatgttcgacggtcgccggcttgaccacgtggaactccacgtccggttcaccctcgatcttccaatcgcacatatcgccatcatccggcccgtacaccttgccgatacaggcagtttccaacgtgatgccctgattagtttcggtggttaccacggcggacatgccgatgcatttgccgaccggaatcatctcgcccatcgtttcggaatacacgtcgacatcgctgaaatacggcacactggcctgggtctgcgatgcgatggtaagcccaagcttctgggccagcgcttcattggaattccatacatacgagggcaccacggtttcgggatgcgcaagctcggcctcgaactcctcggcggtcagaccgcaaccgtgcgctttggccaaagccaggccgtattcctcgacgttgtagctcaccgcaccggtgatcttcttgatgctgtggcatccggcggcgacggtggagaccatgttcacccagtagatgtcctgcatgccggagccgaccatggtggcaccggcttccttggcgatgatgtcgagacggttcgtggtggccggatcggtggtccacgggtagatgcattcctcgcaggtggtgatcacgctgatgccgcgggccaagcactgctcgcacatggtggcgatttcgttctcgaagctgaatagcgtgactaccgcgatatccgcgtcgcactcgttgagtacagcctcggcatcggcgcgaatcggcacattgatggggccgatgcctgcaaacacaccggcatccatgcccacgacttccgggttcacgtcgatggcaccgacgatttgaatgcctttctcgtgcatatagcgaatcgtgtacttcgccattttgccgcagccgtattgaatggctttgattggttgcataccgcatgctcctttgcaacagtgcatattggccattggagaagtctcgccgtcgagaccaagccaatagcctttactctaccgacatcaggctgggcattcactgatatcggcggcactggagtgtcggggagagtcggtgtagcggtaccactaccgaacagaagggctggggccatcacgaggtctcccgccgaatcacggcatctcgctgattttctgcccgccgggcaggggcccatgcccatcggcgtatgcgccgctgatctggccgaatccaacgacccgagagaacgacgcgcaggggctcgaaacccttacagaactcatcacggcatacaacaaggaaatgagcaatgatttcccgcattgcaatccccagcggcgctcatccgtggaatatcgtatacatggtggccgagcgcattaccaaatcatgactgctcaccggcggtctcatggtgcagttgcacgccatcatgggcggtctcgacgtgcgtcccgctaccgacgcggatctgcttggcgcgttgattcttaagagcgccgcataccaagcagaccatgccggatatggagatagacatctgtacgatgccgcaatgcccgcatccctcatcagcgaccctgacgccgaaactcggcgactacatagccacacggatcgcagacgtatcaagctcccgtacgacatgctcaccgatgaatcaccttactggaacaaccttgacgaacaacatcgcagaacaggactcgatgccatagagacactggccgattggtagccgctctaccgaacccggctgtggcggataccagtcagaccaatcccgcctacaacctacttccggttacgtagggcgtggagcatggcgacgaacacgataacaatgaccacggccatgatcgcacagatgagtttgccggggatgcgttcgtcgcgggccgattgcatcgcggcgtctgccgctgagatagtgcccgaggtctggggctgagtcttcagagttgccgattgttcaaaagtcatactctaacgataatgctacagaaagcggttaccataaagcgtgctcacagtcgcccgtcatgcggacttttcgaaaactgttgataaatagccattttccgcaaaagcccttgcaaaacactatgatttagaatatctattagtatgacgtaaaccatattacaaactacttaaggtaagcgcttacagttcggcatgagagactcctcaccacgatatggatgcgctacagtcactatgattgatacgcacgtccccatcgactacgcgatttcgccgtcgccgtacgcgcgttcggaggctcgcagacacggcttgccttgcaccacctcgacctgcgagggcggcgcgtcatcgccggcgcgcttggcctggatctgttcgaacagcattcggaaggaccgctcccccatgtccaggaagttctgggtgtaactggtcagcgccggattccacatggcaccgaagttgcggtcgtcaaagcctacgacgctcacgtcagcaggcacgcggcgaccaacctcccttagaccccggatcacagcgatggcagtctcgtcgttgccggcgaaaatcgcagtcacatcaccacgacggcccaaggtgcgtccagccttgaccgactcctccaaatcatcgtcgggcacgatgattgggtcaggtgccgtgacgccgcgctccttgagcgcgtcacgccacccattggtgcgggtgttatcggtcggaccttccggacgccccacatggaacacggtgcgatggccgagatccagcagatgcatggtcatccaacggccgccatccctttcggcgttgatgacctggtattcaccgtcgccgaagctgccacccaccacgaccatcggcatatctttgggaatgtattccagtgcggcgatgccggcccggtcgtactcgtagacgatcacgcccgccggcctgatcgacaaacccatgcgcacgcgagccttgacggagtccatgtcggactcgtccaaagaaacaatattgagcaggaaccgacgtttacgggcggcggcctccaccccatggttcgtttcggacgtggagaaggcggaaggattggccgcgaacaccaccacggagtccatctcccggttcgacagagcgcgcgccacaatgctcggctcgtagcccagctccttgatggccttggcgatgcgttcacgcttgtcttcggtgacgttgacggtgccgttgagataccgggagacggtcggtgccgagactccggccagtttggccacgtccttgatcaccggccgggtgcggcccgcacttctcgccatccttgtctcccctgttgttgtcagttgttgttattgcgtatgttagagaaccggcatcactatgacagccatccagtcacacccatatccgttcagccgcgctccgacttcggttctccgtttttcgccgcgattcattgtagttcatgacggggaacctatacccaaatcgataacttcgtgaaaaccgtacgctgagttgcggtgagtgtacggtttccgcgaaatcatccctaatttcgtgaagaacgtacactgaatcgtcgtcaacgtacggttttcacgaaatggggcctcatctcgtgaagaacgtacactgagtcattctgagcgtacggttttcacgaaatggcagctgatttcgtgaagaacgtacgctgaagatgcccccggtgtcactgatgactgttttcggtatggaaggcggcgcagcaaggtgtcctaggctaatatcgcctccgacaagaccgtcggcaaagccgtcgacgtcgattcaagttatccacagcaacaattcgcgtgacatagtatccacatttgccggttgagcttgtgcaacgatcaaaatcacccttagcgtcgagatatgaaagaacacaaggaagtttctgcactgctgcagcaggcgaagcaggagcgtcgctgctgctatggcaccagtgatgcgcaacggcgcgccctgaaacgtcgcctgcatgccggggagctggtgtcaccgtataagaacctgtacgccgaccgaacactttggaacaccatgaccagagagcaacagtcattgcaggtcatacgtgcgttgtccgcaatccaccctcagtgggtatttgcggggttgagtgcggcgtgcgtatacggactgcagcacaactattccctgcacgacggcacagtgcacatcgcctcgaagtccggcatcggcggcggagacgaggcgcgtctcaaccgcatctatatcaatcggattccgacgcggaagcataacggcattctcttgacgactccggcgcgaacgctgctcgactgcgcggcattcccattcccacaggcgctgcccatatacgattcggctctgagaaagtccctgacgaccatcgaagaggtgcagtcgctgatgattcaaagcgtctgcgacgaggtctccgtgaccaagctgctgaagtacgcggatcccctgagcgaaaacggcggcgaatcattgatgcgtggccagatcaccgaattgtctttcggcatccccctgctgcaggtgcagttcatgaatcccgacaatcccgcaatgtcatatcgcgtcgatttctgttggaagctcgcagacggccgcatcatcgtggcagaatacgacggcatggccaaatacgccgacatcagcaacaagaatcgcgcaagcctccaggcgaaaatggagtacgaccgcagacgtgatcggcatctccgggaacagggcgtcaccgaaatcgtccatgtgttctatgaggatctgctacgccccatcaatcttgagaccaagctgctcaaggccggtgtgcccaaaatccggtgaagataggccccatttcgtgaaaaccgtacgcttacgacgactcagcgtacgttcttcacgagatgagaccccatttcgtgaaaaccgtacgcttacgacgactcagcgtacgatttccgcgacatgaggccatacctcgtgaaaaccgtacgctcagaacaaggccgtcagaaggtcgactagacaacctcttaactaccgaatggtatctaaagaacggcgatattccgccagaaacgccgagagcggaatagtccccttgcgtttgtcatcggactgcgttattctgaaaccggtttcagaaagaagccgataaacaaaactcaaagccccaaggttttgaccaacgaaaggaaacatgatgtctctcaaggattccatgattcgcggtctggctgtgtacggcctgagctccatgagccagtgcggtcgcgccaacagcagcacgctcgtcgacctgatcaacaaagccaacaagaacgctcgctgagccatcggctccggtccggcaatccaatcagattagccacggaccccataacaacaaagcttaaacaacaatcgcaaagccgctcacggcgatgcgcaaacgaaaggtaatgattatgtctctcaaggattccatgattcgcggtctcgccctctccggtatggatgccatcgcccgcgccggctacgccgactccaagatgttcgccgacatcatcaacgccgccaacaaggacgctcgctgaatctagcgaacaatcccgttcatgagattgcacgacacatacgaaggcaatcccccgcaggccgcaatcggccggcacaccacaataattgaataacgcaataattcaacacagtaaaactgaacaataaccgggacaacggggtccatatattctttcttttcccatcgtgcgtacgccgcgccagcacaggttcacatacgatgcacacggccgccaatacacgatgcgtcatcatcaacgccctcaccgcatcatgagatactcccccgtccgttgtccacactgttgcctctacaatgcctgtgatgcacgccgaacggcatcctgcacagtgactgaagaacgaaacaccaagggacggaaatggataacgaactcttcgaaaaggcgccgattccgaaggcgtatttctcgctggcgatgcccgtggtgctcagcatgctggtcaccttggtgtacaacatggtcgacacctatttcatcgcgcatacgggaaacaccgatatggtggcgggcgtctccctcaccgcgccagtgttcaccgtgatgatcgccctcggcgacatcttcggcctcggcggcagttcggtcatctcgcgcttgttcggccaacaccggttcgccgacggcaagcgactcagcgcgttctgcttctatgccgccatcgccaccggcctgctgattctggtgctgggcctggcgttccgcgacccgatgctcgcgctgctcggcgccactgacgacacttggcagtatgcctccgacttctacacgctgatcatcgtcggctcgccgttcatcatcgtgtcgatgacgccgtccaacctgctgcgcaccgaaggccacgccgtgcagtccatgatcggttcggtggccggcacggcggtcaatatcgtgctcaatcccctgttcatccacggattcggctggggtgctgcgggttcggccggtgccaccgtgatcgccaacatctgcaccgacgcctatttcgtctggttcacgctgcgtcacagcagcaacctgtccatcgacccgcggaccgtcatcgaccgcgcgcgccggcgtctggcggtcacggcccgggaggtcgggagcatcctcgccatcggcatcccctcggcgatcacgaacctcacgcagagcgtcggcatcgtcatgatcaacctgttcctgctcccctacggtaccgacgcggtagccgcgatgggcatcgcgctgaaagtcatcatgatcgcggtgctggttttcgtgggattcgcgttcggcgcgcagccgctgatcggctacaactacggcgcccgcaatatgcctcgactgcgcggcattctgcgtttttcctacctgttcctgtccctgttcgccctggtgatgaccgtggtgctcagcctgtctgaccgtctgctgatgggattcttcatcgaggacgccaccatcatcacgctgggcgccggcatgctgcgggttcagctgctgagcctggtgtgcgtagccgtcgtgatggtcacgacctgcaccttccagtccgcgggcaaggcggtcggcgcctttgtgctgtcgatcagcaggcagggtgtgatgctggcgattaccctgttcgtcggctcccggctggccggctatcagggtgtaatcgccgcgcaggccatcgccgatctgctgaccgcgattgtggcggtcatcctgttcgtcgtgatgttgcctgagctgcgcagtcggaaagctcgctgatagagcaacacgaggtttagcagacacgcattcggagagccaatacgctgcgtaatattgcgcgcgatattgcgcaatgggaggcggtgccgttttgttggactcatcgttgattccatcaccaccaatcatgtcacaagaccgagctcgcgtcgacgatccatgataccagttccacgatgccggtgtcgctatctttgcgatacacggcggtcagttcgccgcagctcacggtttccagtgtggcgcgcacgtcttcctttccggtactcgctcccgctgcgggagctgtctcgcatagcgagactgagggtggttctcagcgctggccccccagtcgggcgaagcccgccagcccccgccagcgggagcctgctcacagttgtagggttcgtacgatttgttcggtggtgcgggtcacgttggcggccgcatcggccagcagctcactaaggctggcagctccgggcgcgatgccgaataccgcgtcgatgccgacctcatgcagctcatcgatgccggtgccaatatgcccggctactgcgatgaccggcttgccgtggcgcttggcggtttcggccacgccggccggggttttgccgaacttggtctggaagtcgatggagccctcgccggtgaacaccacgtcagcccattgtgcggccgcatcgagtccggattgttcgatgacgatggcgatgcccgggcggaattcggcgtttaggaagcccttcagtgctgcaccgatgccaccggccgcgccggcacccggcacgtcgttcacggcaacgccgagctggctgtcaattacctgcgcaaaatgcgcgagggaggcgtccaatgtggcgacatcatctttggacgcacctttctgcgggccgaacacggcgctggcgccggtggggccggtcagcgggttggtcacgtcgcaggcggcggtgatggcgacgttcttgagagccgggtccatcgtgctgatatcgatggtggtcagattggcgagggccgctcccccgtgtgccaagtcgttaccgttcttgtccagaagacgaacgccgagggcctgcagaagtccggcaccggcgtcgttggtggcgctgccgccgagcccgacgatgatgcgcttggctccggaacggacggcggcgagcatgagttcgccggtgccgtaggaggaggcgatcaacgggttgcgttctttggcttcaagcagtgccagtccgctggcttcggctgtctcgaccacggcggtcgtgccgtcggcgagcagaccgaagtggccttcgacaggccggccgagcgggtcgtggaccggcacggcgcgcatcgatccgccggtggcgtcgacaagcgcgcgtgcggtgccttcaccgccgtcggccatgggaaggcaacggacctcggcatcgtggtcggcattctcaatcccctgagccatcgcccgggccgcctccatggcggtcaggctctctttgaaggagtcaggggcgcataagtatcgcgtcatgcttcgagcataccgcacgacacgacgaaacggtaaacgttttccgtaattcgcgtgattatttttttgttcagaattcaggctttccaatccacaatgctactattgcaagcaaaaatgcgatatcgttgcggtaaacgtttagacacgttttccgtttcagggaagaaaaggatcgattcgatcgtggctgtacagaacgataaggcgcaatcgccagcgacattgatggatgtcgccaaagaagcccaagtctccatcgccaccgcatcccgcgtgctcaacggcagcacccgcaaggtacgcaaccaatcgtatgtcaaggtgatggaagcagccaccaagctcaactatcgtcccaacgcctatgctcaggcagtggccaaaggcaccgcaccgaacatcgtgctgctggtctccgatatctccgatccctacttcgcatccgtatcgcaaggcgtggtcaaggcggcggccgaacgcggcatttccgtgaccatcggcgtggcagccaccccgcacgaagagttggaggcggtgcgtaagtccgtatccaccaggccgcgcggcatcatcatctccgaaagtgaatacaccgacgcgccggaacgccaggcgttgcagacggaactcacccagtacgaagcatccggcggacgtgccgtgttcgtgctcaaccgcaacctgcccttcccggccgtggacgtggcgaacgatgtcggcgcgcgcgccatcgcaaagctgatcgtcgattccgggtatacgcgccctgcgattctcaagggcgatgacgcacatcgctcctccaaagaacgactggccggcgtgatggaagtgttggacgaggcaggcatcaccgtggatccgaaagccgtggcgaatggtaagttcagccgtaccgacggctatgcggccgtcatgcaaatggcccgatccggactgctgaagccgggcgaaggcgcactgtacgacggcaaaggcatcgattcaatcatcgcgctcaacgacgtgatggccatcggtgcgatgaccgcgttgcgcgccaacggcatcgagccgggtcgggaaatcggcgtcaccggtttcggcgacatcccctactccgccgacgtgtttccgccactgaccaccgtgcatctgccgctggccgaaatgggccaggccgccgtggacagcatcctgtccaaccgcgatgacggggaggccaccggcggcactgccaaccgcctgatctacgtgcaaagcgccccggacgtagtcctacgcggttccctcccccgccggtaaaacaaaaatagctccctctgacggtgtaaccacaactagcgaacaggtaatggcgactgccgcgcaccataccaccgactcatacaccgacgaaatcgaagaactgttcgattaccgagtcattgagcaaccggccacgacgagtgggcaccactcgatgattatcggatacggtaatcaggccttcgctgatcatgggggcgagttggtcaaccgaaacggttcggagagtctggggcgtgctgctcatacccgcatcgttgatggcgcggttgatgcggtcgaggtcaaggccctcgtgcaggcgcagcccgagcatgatgagctcttcgaggttttcctcgggagtgatcgtctcgctatcggcccacggcacacggttctcgttgatggccgtgccccacaaacgcgggtgcgcgatgtcccagctgcgcagaccgtgtgagacagaaaccacccccagtccggcatccgccggacagcccccgccagcgggggctgtcagcgaagctgactgggggtggtcagcctcggtcaccgcgttgtagtgggagtgggcacctggccctagaccggcccaatcgacgttgcgccagtagccgaggttgtgctggctttcgtatccggggcgggcccagttggagacctcataccattcgaggccggcggcggcgaacaggtcgtcagcgatctcgtatttagctgcctcgtcatcgtcattgggtttgggcaacgtgccggcggcaatctgacggcccattttcgtggtcggctccacggtcagtgcgtaggcggagatgtggtttacgccaagatcgatggcggtcgtgaccgaggtgcgccaatcgtccaggctctcccccggtgcaccgtaaatcagatccacgctggagcgcaggctggccttattggcggcattaacgcctgcggccacgttggccggcgtatgcgtgcggtcgagggttttgagcacatgtggtacggcggactgcataccgaaggaaacacgggtgaagccgccggctgcgagctcattgatgtaatactcgttgaccgtgtccgggttggcttcggtggtgatttcggcgtcgggcgcgatgccccagatcttgcggatggcatcgagcatggcgaccagatcgcgggcggcgagaattgtgggggtgccgccgccgaagaacacggtggagaccggtggctccgcgatgccgtgatcgagctgccactgcttggtcaatttcatttcccgaatgaccatattggcatagttgccgcgcgaggcccccgcaccaagatccgtagccgtgtaggtgttgaagtcgcagtaaccgcagcgccgcaagcagaacgggacgtggatgtagacctcgaacactagccctcggtcttctgagcggcacgaatcttgtctttggtgtcgcggtcgttggagtcctcgccggtggacagggctgcgatgaacgcctcctgcggcacctccacatggccgagcatcttcatgcgcttcttgccagccttctgcttttcgagcaacttgcgcttacgggtgatgtcgccgccgtagcacttggcgagcacgtccttgcgtaacgcacgaatgttctcacgtgcgatgatgcgcgaaccaatcgcagcctgaatcggaatctcaaactgttggcgaggaatcagactacgcagtttcttggtcatcatcacaccgtacgaatacgccttatcgcggtgaacgatggcactgaacgcatcgaccttctcgccctgaataaggatgtccaccttgaccaaatcggcggactgctcgccatcctcatggtaatcaagggaagcgtagcccttggtgcgggacttgagctggtcgaagaagtcgaacacgatttccgccagcggaatgcggtagtgcatctcgacacgatcggtggagatgtactccatcgtgcccataatgccacggtggtcctggcacagatccatcaccgcaccgatgaattccttgggcgtgatgatgtcggcggcaaccatcggctcgacaatcttcttgattttgccgtccgggaattcgctcgggttggtcacatgatgctggctgccgtcctcggcggtcacgtcgtaggtgacgttcggggcggtctggatcaggtcgaggccgaactcgcgggagagtcgctcgttgacgatttccatgtgcagcagacccaggaagccgcagcggaagccgaagcctagggccacggaggtttccggcgtgtagatcagggcggcgtcgttgagcttgagcttgtcgagtgcatcacgcagttcggggaactgggcgttgtcgatcgggaacaaaccggcgtagaccatcggcttcgggtcgcgatagccgggcaacggctcggcggccgggcggacggccgaagtcagggtgtcgcccaccttggactgactcacatctttcgcaccggtgatgatgtagccgacctcgccggcaccgagtgccttggtgcgggtcatatcggggctgatcacgccgatttcaatgggatcgtgggtcatgccaatgcccatcatgtggaccttttcgcggtcgtgcagttcgccgtcctccatacggatgtaggtgacgatgccgcggtaggagtcgtagacggaatcgaagatcagcgcgcgggcgggggcatcggggtcgccgtgcggggcgggcacgtccatgacgatctggtcgagcaggtcggccacgccttcgccggttttgccggagacgcgcagcacgtcgctcggctcgcagccgatcagacctgcgatctcctcggcatgcttgtccggttctgcggacggcaggtcgattttgttgagcacggggatgatggccagatcatggtcgatggccatatacagattggacagggtctgcgcctcgatgccctgggtggcgtcgacgagcagcaccgcgccttcgcaggcggccagtgcgcgggacacctcataggtgaagtccacgtggccgggggtgtcgatcataccgagcgtgtattcggtgccgtcaaaggtccacggcacgcgcacggcctgggatttgatggtgatgccacgctcctgctcgatatccatacggtcgaggaagcgatcgcgcatctctcgctcgggcacaatgccgctcaactgcaagatgcggtcggccacggtcgacttgccgtggtcgatgtgtgcgatgatacagaagttgcgaatcaccgactgatccgtggaacccggctgattgtgttggacgaccaacgcattcctcctcttggcatatactcaaacttcacctagtgtagccgagggactgtattcggcgtggcattgcgcgggtttttccggggctcatgctatcctctaacttttgtatgtccttataacacacatcgtttggagtaaacgtggcaaacattaagtcgcagaagaagcgcgtgctcaccaatgagaaggcgcaccttcgcaacgtggctgtgaagtccggcctgaagaccgccatccgcgccacccgcgaagccatcgccgccggtgacaaggctgccgccgaggccgcctacaaggttgccgcccagaagctcgacaaggctgctggcgctggcgtgatccacaagaaccaggccgccaaccgcaagtccggcctcgctgttgcgatcaacgctctgtgagcataagcctcttaaggttttagaaagtcccgcaagtcatctggcttgcgggactttttgtatctccgttcaaagaggtacattggcggtcttgcgaaatgacatctccgttcagagaggtaccgaatacgggaaaaaccaactataaacgccatcattgcaacacttatactcagcgtttcgtgcttcaggtacctctttgaaagcagttagcattctgcagaaggccagatgtacctctttgaagacagttagccctgaggcggccttgaaccatcctgaggcttgtcttcttcgtccttggtggtatcgccgggatcgacggtatcggcgtgcggatggatgaccgggcgcttgagatatcggctttcgctgggcaggtagacgcgatgacgttcgacggctccgggcagagtgacgttgaagcctaccgagagcagtcgcagcgccaccacgatgatgacgatcagcacgtcgagcagcatttccgagcgcatgtcgaaccagccgtagcttacgccgcgccataccagcacggtcaggatgcagccgatgaacgaaggcacagcatagaggtgtttgtctcgaataatcattggcacgtcgccaatgaagatgtcacgaatgaggccgccggccagtgctgtgaacatgccaaggaatacggctgtcatgcctgaggaaccgtaggccagagcttttgcggtgccgctgactgcgaatagtccgaggcccagagcatcgatgacagtcatcgtccatttgagtttggtgatctccggatgggccaccaccacgataatgccggaaaacagcgtggtgagcacatagcctttgtcggtgatgccgaccggcggcagggcaccgagcatcacgtcgcgcacaagaccgccgccgagtgcggtaagccatccgcacagcatgatggtgaagatgtcgtagcccttgcgaatggcggcaagtccgcccgataatccccaacacaggattgctaaatactcgatgaccacaaaaacgatgttgttctccaacgccacctgcatgagccactcccctctggtaccgcttcggttcgtctcagtccgtcttcgttctgttcccgttcatccttattcggcgctacagcccgtcgtacccgagcctacaacaggccttgcctgagtagtatggccggggaggaaggggccactaagacgtgaataggatggcaatgacgccagcttgccggtagtcgttggcaactcagcccctctaggttttacgatctgtaatcaaaaaacatgtatggacttaatcgttgttgatttctgattcaatcaaggcgactttttcttcgacatcacgcaagcgatttcgcagtgcggactcgatatcgatgccgtcaacgcgggccttgcgcacgacggcgaggatttcatcggcgtaggcatcggccttctcccgttcagcggaattgtcgccgcttgattcggattggttcgccgcttgaggatgtacatcatctcgctgagcatcagccgcagccggctcatcaaacgccgcgaacaatctatcagcattcggcgatttggagatgcgagaaacgactttggccgcgcgaggcaacgcaccttgagcgcgggaaatgccctcaagcacggatttacgatgcttttcctgctgtttcatcttttcccatagagccagcacagcttccggggattcgggttgggcagcttctcccccgtcgttactgtcagcatcaaaagcatcagaagaatcagaggaattgccggcatcatcagccgcaaacacatgcggatgccgagtgatgagcttgttcaccaaccgatcggcgacctcatcaataccgaacgggtcctcagtatccgattcgcagacccgcgcctgaaacacggattgcagcaacacatcacccagttcctcgcgcatgttgtcacggtcgtgagtctccaccgcgtcgacgtattcgtaggtttcctcgagcagattcttgagcagcgacttgttcgtctgcttgccgtcccacgggcagccgcccggcgaatacagcacatccaccacggccttgacccggtccagcgccgtcgctgcctcagccaccggcttcaatttcgagcagtgttcgaagcctgacggcaaacggtaggctgaagcatggtattccgtcatgtcactcatcttgctcataggtttgctcctgttctcatctggatgaaccataaccaccccccgcaacgtgcagaagacctagatcatattatttgttgcggaatgttgctaaatccatctgtatctctctagccaagaacatttccaatacgccaagaccccttggaattgttgctgttccaaggggtcttagtcagaaacaaaaggtgctagttcagcacaccttccacatccagttgtgcgggtcctcgacttcgccgagctggatgccgagcagctcgtcgcgcagttcgcaggtgagcttgccggagccgccgtcggcgacggtgacatcgaacttctcggacttgaagcgaccgatcggggtgatgatggcggcggtaccgcaagcgaacacctcggtgacttcgccggacttgatgtcctcgagcagctggtcgagggcaatcatggtctcgactacgtcgtggcccttgtcctgcagcagctgaatcagggagcgacgggtcacacccggcagaatgttaccggtcagggacggggtctccacgtggccatccttgtgcacggccatcatgttcatgccaccgagctcttcgaggtaggtcttggtggcggcgtccacgaagcacacctgctcgcagccattctcaacacccttgtactcgccgagcagggaggcggcgtagttgccgccgcacttggcgaaaccagtgccgccagggccggtgcggaaccacttgtcttcaacccagatgctcaccggcttgacgccgcccgggaagtacgggccggacggggaggcgatcacgcagtagtcgacctcctgcggggcgcgcacgccgaggaacggctcggaagcgaacatgaacggacgcatgtacagcgtgtactcgcggcgggacggcacccagttggagtcgcgcttgaccagcgcggccacggaaccgaggaagtcgtcaatcggcagctcaggcaggtacagacgcttggcggagttctggaaacgctcggcgttcgcatccgggcggaacagccaggtggagccgtcggcatgacggtaagccttgaggccctcgaagcactcctgtgcgtagtgcagcacggaagcacccggatccatcttgagcggtgcgtacggttcgacgcggcggtcggaccagccttcgcccttggtccaggtcatgtgggtcatgttgtcggagaacacctggccgaaagccggcttgtcgatgagggactgacgcttctcatcggatgcggggttgtcgttcggcagtacggtgaacggttcggcgagcttgtcgagcgctgccggatcgtggtgcgtgttttcagtcattactagctacttcttcttgactttggcggcccgaaagccaccatatggggtgtgtgctgtgcgcttgtggcgcgagctctgttgcatacttttgcacacccatgtgttactcgtgtggcagagttcacatggtgaaaaacgaagaagcccgcaccgttctcaacggctgcgggcttccacgtttcagttatgttctgaattgttcgctatcgaagcgatcgactcacttggcgtcggcagccggagcagcagcgtcggcagccggagcagcagcttccggagcggcggtggactcagaagcatcttccggcacctcaacggtgacgacggactcttccgggtcctcaacgtcgagctcaacgccttcaggcagaacaacgtccttagcgaacaccttggtgccgtcggttaggccctcgacgctcacaacgatcttctcaggcaggttggcgacgtcagcgcgaaccttgagctcctgaatgtcgacgaatgccacagcagcgcccttcggggtgccttcaacgaagaccggcacctcgacgtcgatcttctcaccggccttgacctcaaggaagtcaacgtgctcgatgatgcgcttgaccgggttcttctgcacgtccttgacgacggccatcttggtgttgccgtcgaaggcgatggtgaacagggcgttggtgtgacgcagggccagggtggtctcgcgcatcggcaaggtcacgaaggcgggctcttcgccgccggcgtagatggtggccggaatcttgttggcaacgcgcagacgacgagcaacgcccttgccgaactcggaacgggcctcgccctcaagcttaatggtggtagccataatggatactccttgtagtttcgtttcgttctgtctcgctcagacgccacgacacgccgaaagacaccctacaaggagtgaaatacaccgagtcgataacggaagctgtgtcatgtgtcagcacgcacacttccctcgccaaagcaacaattgtcaagtatacgccaactccggactttggcgcggtgatgcttcgatgacactgcatcccggccgtcccagccacgtcaacgtacggtttccgcgaaataatccctaactttgtgaagaacgtacgcttacccgttctcaacgtacggttttcacgaaatcgtccgccatttcgtgaaaatcgtacgctcagcgacactcagtgtacggtctttcacgaagttggggatgatttcgaaaataacgtacgatggtgagtaccgtatcgggaggttgatatgactcgttcggacgacgtcatcaatgaggatggccatgacgtcatcgccgcacacactcgcgttgtcaggggtatggctgcggcacttgccgcgatagccgccacaggagccggcgtcacagccgcggccgccaacgtcatgttcacgttcgcgctggacaccaaggccaaacgttcgatgttcaacatgccgcacgaggagacaccgaaaggcatcgaattcgacatgtccgagcagcttgaggccgcccggtggttcgaggaggccaagcaatcggtcacgctgcgcagccatgatggattgaaactccacggctggctgttggacccggattgttccgacccacagccgcatctatacgcgatctgctgccatggctatgccggagagcccgcggaaatggccaaatgggcgcatcgctatgcgcaactcggttttacggtcctgctacccgcgcagcgcgcccatgagttgagcgaagggcgttacgtgggtatgggattgctggaaagcgacgatctgttgggctgggtttcgctgatcaccgcagctgatccggatgcacgcattctgttgcatggcaattcgatgggcgccgccacggtgatgatggcggccggcgatgcgcgactcccccgcaacgtcgtcgccgcgatttccgattgcggatacggttccgtggtctcgcagtttacggataatgccgaggcgatgttccgtttgccgcactcgttggccgtgctgctggtcaaagtggccagtcatgtgtctgaacgcaaggctggataccggtttgaggacgcctcctgtgtgaaggcattacggcacgcgactattccgatgatgttcattcatggcggagcggatacttttgtcaatccgaagtatctggacatcaattacaacgcctgcgccagcatcgaccgcgagaagctgctgattcccggcgccgaccacacgatgagcgccagcaccgatccggaccgctattggcgtcgcgttaacagctttgttaagcgggtgtttgggctgtagtagatatagagctcggctcccctctgtgaggggagccgccagcgaagctgactgaggggagcacccgcgtatgggctactcccctcagtctcactccgttcgacagctcccctcacagaggggagccaagaatggttacgcgagcaattccttgacggcggcgatgacggactgcagactcttcttcgcgtcaccgaacagcatctgggtgttgtcttcgaagtagagctcgttctggatgccggcgtagcccataccgcggccgcgcttcatgaccacgacgttctgggacttgtcgacgtcgagaatcagcatgccggagaccggggtgccgggacggcgagcagccgggttggtcacatcgttggcgccgacgaccagagccacgttggcctgcgggaactgcgggttgatctcatcaagatccacgagctcctcgtagggcacgttggcctcggccagcagcacgttcatgtggccaggcatacggcctgcgaccgggtgaatggcgtaggagacttccacgccgtggcccttgagcagttcgccgaggtcggcgagctcgcgctgggcctgagcctgagccagaccgaagccgggcacgaagatgaccttctgcgcgtagacgagctgaacggccagatcgtccggcgtggtctccttcatggtgccttccggaccgtcgccagcagcggcggcgtcagcaccaccgccgaagccaccggccaagacggagagcagcgggcggttcatggcctgagccatgaggatggacagggtcacacctgcggaaccgacgagtgcgccggccacgatcagggcgacattgtcaatcgccagaccggacatagccacagccgtaccggtgcatgcgttgagcacagagatgacgacgggcatatcggcgccgccgatcggaatcacgaacaccaagccgtagcacagggcgaacacggtggtcagaatcgaccacagcagacgctgttcgggctggacgcacagcatgaccagcgagacgacagacagcacggcgaacagaatgttccatacgcccttgcccggcaggttcagcttcttgacccacttgataccctgcagcttgccggcagcgatgagcgagccggtgaaggtcacagaaccgatgagaataccgagaccagcggtgatgagcaccacgatgtccggggtgccttccttggtcaggatgtcgttcagggccacgagtgcggcggcgccaccacccacggtattgaacacggagaccagctgcggcatatcggtcatcttcaccttcttggcggagacgacaccggccacggcaccgatcaggatgccgacgaccagcaccaccacggcgacaatgttcacgaagcccttggcgaagagcacgatgaacgccatgagcacggccacgaccatgccgaacgcggagatctggttacccttgcgggcggtcttcggcgaattcatgaaatgcagaccgaccacaaacaggacggcagagaacaggtagacgaaccaagcgacgatgtcgatggcgccaacggttgcggaggtcattacttcgactcccccttcttctcgttcttgctggacttgaacatctcaagcatgcggtcggtgaccacgtagccaccaacgacgttcatggtgcccagcacagcggccaggaagatgaacacgtaggccagcgggctattggcttcggctgccacgatcacaacgccgacgatgacgatgccgtggatggagttcgcgccggacataagcggcgtgtgcagggtggcgggcaccttgccgatgacctcgatgccgatgagcagcgcgaggacgaacagggtaatggaaacgacgagagtaggcatggtattccttcttccttacttctcggacttctcggcatcggcagcagctgccggggcggcggcgcggccggcaaccaccagcgcgtcgtcgagttcttcggtgagatcctggccgagcttgccgtcacgcacgaagtgcacgaggatgtcggccacattgcgcgaaagcaggttggatgcggtggtggcgacgccggaggccaggtagggagcgccgatcagcttgacaccgccctcggtgacctgctcaccaacggcggagccttcgacgttgccgccgaggtcggatgctgcgcagtccacgatcacggcaccacgcttgagacccttgacgccggctgcggtgagcagcaccgggggcttacggcccgggaccttggcggtggtgatgatgatgtcaaagccggcggccttttcgtcgacggcagcctgctgctgagcctgctcttcggcgctcagcgcgcgggcataaccgccctcgccctggcccttggagaagtcaagtcccagatcaaggaacttcgcgccgagggactcgacctcgccctgggaggcgggacgcacgtcgtacgcggtgacgaccgcgccaagacgcttcagcgtaccgatggcctgcaggccggcgatgccggcaccgagcaccagcgccttagccgggcgaatcgtgccggcggcggtggtcatcatcggcaggaaggaaccgtaagcatcggcggcggtgatggctgccttgtagcccatcacggagttctgagaggtcatctcatccatggactgggcgctggaaagcttacggggcagcttttcgatggcgatgcccaccagaccggccttctcgagcgcggccacgtaatcggcatcggtgaaggaaccgagcatgccaatgacccactggccggccttgagcttggccacggtctcggcggacggtcggtccacaaaaccgagcgcgtcggcttcggcgagcacctcgtcacggctggtcaccttcgcaccggccttttcgtaatcctcatcggtgtagtcggcagcaatgccggcacctgcttcaatcagtgaggagacaccgctcctcttcagccgggtgacgatatccggcgtcagcgcgacgcgggattccgtttcggacgtttcgttcaaaacgccgaacaccacggtggcttctgggttttgcgccatgagagccctttcttgttctacttcaaaatggacatggttatccgcatggtaagtgtagtcgaaaggtaaagaccatgacttgagattccgccaatcgaaatagaaacgaacccgaaattagtaagaaatacgaatgtgtccatgtgcattgcggatgaattgctcggaagccgtccaacaatcacccggcatcgatcagcaaccaaccgctcaataattatcgacaatcgccgtttcgcagctcacggttactcaacaatatcgggacctgtgcaattttttgccacgcactcccctaacccgccagaatcctacggttgcgtaaggtgacgagttcggtttgggcgattacaatttgaactttgagaagcgttcgcctcatggctggacgacactgaaaggtttacaggagcaagacttgtcggttatcaattccttcacgcagcacacgatcaatctcacccgtaaggcgctcaggttgggatccgacttcgtccacccggtccacgacgacaccccggacgagcccgattacctgtccaacgccgacgtgccggtcgagaccaatatcgctttgcctcacagcgacgattgggacgacggccacctgaccgtcaccgacatcgaccccgccaccggcctgctcaccacctccaccgaaggcaatccgccgctggacgaaggtacgtccatctacgacctgtatgcggaccgcgccgaacgtatgggcgatgagccgctgtacacctacaagtccggcaacgattgggtgaccgtcaccgccaacgagttcctggctgacgtgcgtgccgtggccaagggcctgattcattacggcctgaagaagggcgatgccgtggcattcatgtgccgaacttcctacgactgggacctgaccgacgcggcgatcatggcgtgcggcggcgtgctcgccaccatctacgacaccgattccgccgagcagattcgcaatatcgtcaacaactccgatgcccgactgctgatcgtgcaggacacggacatgcgtaagaaggcggatggggccgtcgaagagtgcccgtccctggagcacatcatcaccatcgagaccggtggcttggacgagatcaaggcctacggcaccacggtctcggacgaggagctggacgagcgcatcgattcggtcaagaagaccgacctgtgttccatcgtgtacacctccggttccacggccgcgccgaaaggcgtggagatgacccacgagcactactgccagaccgcgctgaatctgccggcctacatgcccgatctgctgcacgacaagaggaacaccatcctgctgttcctgccgcaggcccattccttcgcccgcgccatcaactacatcgtcgtctcctcgaacgtccgcatctacatcgccaccggcatcaagacgctgatcagcgatctgcaggtggccaagcccactctcatgatcgtggtgccgcgcgtgctggagaaggtgtacaacgccgcgtcccagaaggccggccacggccccaagggcgtggtgttcgcctccgccgtggtggccgcgcagaactatatgaaggaagtctccgccaatggcaaggcgggtgcactgacccgcactcgccgcgctgccttcgatccgattgtctactcttcgctgcgcgaagtgctcggcggtcgcgccaagtggattgtggccggcggtgccccgcttgacccggaactgctggctttcttccgtggcgcgggtgtgcctgtatacgagggctatggtctgaccgagaccaccgcaccgtgcgcgttcagcccgctgggtacgccgttccacgctggttccgtgggcatcgcattccccggattctccctgcgcatcgccgaggacggcgaaattcaggtcaagggtcgtgccgtgttcccgcgctatcacaagaacgacgaggccactgagctgtcgttcaccgaagatggctggtatgtcaccggcgacttgggccgtatcgacaacgatggcttcctgtacatcaccggtcgtaagaaggatctgattatcactgcaggtggtaagaacgtctcccccggcccgatcgaggaagtcattcagcgttgcgagttcgtctcccaggcgctggtgctgggtgataagcgtccgttcatctccgcattggtgacgctggacgaggagtcgctgcgcccgtggctggccgccaagggcctggacgagaacatgccgctggaggatgccgccaagaacgccgccgtgcgcgccgaagtgcagaagtgggtcgatcaggccaacgagggcgtctcccgcgccgagtccgtgcgcaagttcatcatcctgcccgaggagttcactcaggaaaacggcctgatgaccgcctccatgaaggtgattcgtcccaaggtcatcaagcgctactccaccctcctcaacacccagatgtacacgaagcggaagtaaaccgtatagcaaaagctccctctgacgagggagcttttttcgtctataagccttagaagcccaggcgctccagctgcttggggtcggactgccagcctttggctaccttgacgtggaggtcgagcttggctttttggccgacgatgcggttgaccggggtgcgcagcttcttcttgacgtaggtgaggttcgaggcgcccttgccgatgatgatcggcttctgggagtcacgctccacgtaaatggacacgttgacctgcgccttgccgtcatagccctgaccggtctcgttgtcttccggatagtcgatggaatcaaccaccacggccagcgaatgcggcagctcgtcgtccagggtctcaaggaacgcaccgcgcacgagttcggcgatggtgtcttccggacgctcctcgctgatctgatcgtccgggtacatctgcggaccctcgggcgtgtgctcaatgagcacgttcttcacttcagccagattgtcgtgcttcagagcgctcaccggcacgatgtccgagaaatcggcgaaatcgttgatttcgatgagcttgttgatgagttgctgacggccaagctcgtcgatcttggtgacgatggcaatcagcgggatgcgccacttgaacgtaccgtcctcacgcttggtggcgaagtcggtacgcagtcgggagagaatacgcttgtcgccggggccgatttcctgatcggcgggcagcaggaaggccaccacgtccacatcggccagagattcgtcgaccacgtcgttcagacgctggccgagcaacgtacgcggacggtgaataccgggcgtgtccacgagcacgagctgcgcgtggtcggcggtcaggatgccgcggatcgccttacgggtggtttccgggcgagaggatgcgatggcgatctgcttgccgatcaacgcgttgatcaacgtggatttgccgacgttcgggcggccgaccacggccacgaatccggagcgatacggcacgtcctgcttggtcacgttcgccgtttcaccggtcgcgtcgacttcggcaacgccggcaacatcggaagcatcggtaacgtcaatgtcatcgacgtcgttcgtgctgttgttctgatcggtcatatcactccttgctggcggtatcatcgccttcgacgggctcgccgtcagtttcctcatgggtcttgttattttcctcgccgccctcgacgtgcgccggttctacgacgatggtggacaccttcttgcggcgtccggcggagtccacggcggtcagtcgcagaccgcgcgtcacagccgaggcaccgacaatcggcactcggcccagaatcttggtcagcaggccgtacacggtatcgacatcgtcctcatcaatgtcgatctcgaagatctcctccagatcggcaatcggcgtacgggcgggcatcttccacttgttgtctccgattttctccggctcagtacgctgggtgcggtcgtgctcgtcttccagctcgccgacgatctgttcgatggcatcctcgatagtcaccatgccggcgatgccgccgtactcatcgaccaccacggccacatgctggcgggaacgctgcatctcatggaacaggtcgtccaccggcttggattcgggaacaagcagcggctgccggacgatggattcgaccgcgcgctccatggccgccgggttgaaggcggtggcacgcacggcgtccttcaaataggccacgccgatcaggtcatccacatcctcaccgatcaccggcacgcgggagaaaccggagcgggagaacagtttcagcgcggaagacagtgtggagtcgcgctccatgcagatcatatcggtgcgcggcaccatgatctcgcgagtcaacgtatcagacagggtgagcacgttgcgcaacatttcggagacttccggatcgaagtcgttggactccaccagtcggtcgatggcggccttgccctgctcgagctgaatcttctcaagctcctcgtcgtcggacagatcggagtccttggagcggcggcccggccccttggaaccggacttgtcgccaccgatgcgtgcgaacggcgtgagcttggtggccaacgacacgatgcgcgagttggaaatcatgatgccgaccggcttggccatgccggcggtgcgcgggcggaccagtacggagaccacggctacgataatcgcgaacaggaatccggagagcagttcaatccacagttccgcaccccacagggatgcgatggaagacaccagtacgccgtcgagcacattgcaggcgatgcggaagaacgcacagctgccggcggtggcgtaacggtcggcgatgagccgttgcacgcgatgaatcttgtcgatcttcttcatcttgaggaactggcttgcttcggagtcggtctgcacctcgaggatgagattgttgaggctggctcgcgttacgcgggccacggcgccttcagcggcggccatggtcagcgagagccagacgaacagggccgccacaagtacgagaatgacggtgatggcgatcggcgtggtactggaatactccataatgatttttcggtgtccttgaatgtccttgaacggtatcgaataatccggatttggtgtgattgatttgggagcttatttggaatcgaggtcgcggccggcaccgtgcgcggcgtcgtacagggccagcgcgtcgggcgtgccggcgggcagcgtggcctgcacgttggcatcgtggcgtagggcgaagaaggtgagcagcagctgtcgctgcaggccgaacatctggcgctcctgctcgggggtcacgtggtcgtagccgagcaggtgcaggatgccgtggatggtgagcaatagcatctcctgcatggtgctgtgcccggctgcggcagcctgttgggcggcgacccacgggcagatgacgatgtcgccgagcactccttccatcacggttttgccgtcgccggggcgcagctcgtccatcgggaagctcatcacgtcggtcgggccttcgaggttcatccaacgcatgtgcagttcggcgatgggatcgggatccacgaacatgatggtcaggtcggactgggtgctcacgcgcatctggtcgagtacccaaatacccaaatcggagaagaccttggggtcgatgacccactgggtttcattggtgacgtcaacgctcatcgtctgtctcactttggttggttgaatccgcttgctggcgggcatcgaagtcggtatggttgcggcggcccttgcgttcgatgtcgcggtggtcgccggcgatggcggagtgacggtcgtaggcggccacgatctgtccgaccagctggtgacgtaccacgtcctcggttttgagatgcacgaatgcgatgtcgttgatgccgcccaggatgcgttcgatggtggccagtcccgagcgaggcacggtcaggtccacctgcgagatatcgccggtgatgaccatcgtggtgttgaagcccagacgggtcaggaacatcttcatctgctgttcggtggtgttctgagcctcgtcgaggatcacgaacgcgtcgttcagcgtacggccgcgcatgtaggcgagcggcgccacttcgatggagccgtcgtccatgtaccgcttgagctggtcggcgccgagcatgtcgccaagcgcgtcgtacagcgggcgcagatacgggtcaaccttgtcattcagcgtgccgggcagaaagccgaggctttcgccggcctccacggccgggcgcgtgaggatgatgcggcgaatctgcttgtcctggaaggcacgcacagccttggccacggccagatacgtcttgccggtgcctgcggggccaatgccgaaggtgatggtgtgcgattcgatggcgttcacgtaggccacttgtccggcggttttcgcacggaccggcacgccggcagcaaaggtgatgacgccgggaaccgtgggcttgcggtacgtcgggtcgtgggagccggcagaacgtgcatgggcgcgttcgtttgaggtcgattgcgccagtttgtcacgcaccgggccgtgaccgggatgttcgaggcgcacgtggttcttgagcacgttctggtcgagcatgcgacgcacggtgtcggcgtccataggcgcggtgtaggcggcttggatgatggtattgaccaaatcctcggcctgtgcggcctgggcttcggtctgcttggagcgggagacgatcgccacgcggttgccgcgcacgataatcgtcaggtccggaaaggcgcgctctacctcgcgaatgacctcgtcaaccgggccgagcacggcgacggggtcaagttggggcgggatggtgatggtacgtgtagtcgttgccacgaagcggatattcccctactactcgtcgagcttttcgccggtcatcacgtgcgcgtgcacgtggaagacggtctggccggcgtcgagaccggtgttgaacaccagtcggtaggcgccgtgaaattccttgtcggcgatgttctgcgcaatggagacgatgtgggccagctcggtcgggtcgtcggcggcaagttcggcgacgttggcgtagtgcttcttgggcaccacgagcacgtggaccttggccttgggattgatgtcgttgaatgcgtaggtcgtctcgtcctcgtagaccttgctgctgggaatctgccctgcgatgatcttgcagaacaggcaatcgtcggattcgctcatcatgctccttggtttgatgttgctacgcaccagcttagcgcgtgggcgttactcgtaacgtcccaacacccgagacaacagcgacaacgctacaggaccggccgtcgcggctctcagaatattgcgccccagtacgcagctcaccgctccggccttgacgaaatcagctacctcctgctcactgatgccgccctcaggcccgaccaccacactgacagtccgcggccggccgtcctggagcgtgcgttccaccaactgcgcaaccttctcctccacgccggaccacgtatcggtagcatcctgatgcagcacaatcaccacatcgccatgcacgcaggccctgcggcagatggccacgacctccttgctggacgcacacgcctccagttgcggcttaaaggcgcgccgcgactgctcggtggcggcatccagtaccgaattccacttcttgtctgtacggccgaccttccacttggcaatggatcggtccgcctgccatggcaccacttggtcgacgccaatctgagtagccatatcgatggcctgctcatcatggccggttttcgccaatgcctgaatcagcgccaaacgggtgagcggctcgggttcgcgccccacttccacgacttcagccagtccggcttcaggatcggccatcactgcctggattctcaagccgttgccgtcggaaagttgcaggctgtcccctgccttgagtcgcatggcctgcacggcatggcgcttgatgtgagcgggcagggttagcttccagccggcgtggagttcgtcgctgttcaccgggacgtcgtcgacctgcgggtcgaaaagaaaaagggcatcagtcatgacttcaaggctacacgcgacacgccgggcacacgcgcgaattgcatccctgtaatttcatgctaagctatctactcgttgtccaaacgacacctgcccgggtggcggaatggtagacgcgctagcttgaggtgctagtgcctattttatacaggcgtacgggttcaagtcccgtctcgggcacagataaaccccttgcattgcaaggggtttttcgttatctgcacacacgaaaggccaccaatgcagttcatcacgctggacaccgtcgacgacccgcgcgccgaagcgtatgtgagcctcaccgaaatgcagttgcgtaatcgcttggaaccagccaagggcgtgttcatcgccgagtcccccaaggttatcgaccgcgcgctggccgctgaccgcgaaccgctgtcactgctggtcgaggaaccttggctggagggcatgaaagacaccttcgacttcatcgacgggcgctggggcgcggatattcccgtctacgtggcctcacctgagcagctcaagcgtctgaccggctaccgtttgcatcgcggcgccctatgcgcgatgcgacgctggccgctgccctccgtagccgagatctgcaagagcgcccgccgcgtggcagtaatggaaaacatcgtggaccacaccaatgtgggcgcactgatgcgttcggcggccgcgctcgatgtggatgccgtgctggtcacaccctcctgcggtgatccgctgtaccgacgcgccgcccgcgtgtcgatgggcaccgtattccagattccgtggacccgtatcaccgggttcaacgacgacggcaccgaaaacaagcattactggccgttccagggcatcgacgagttgaagtcgctgggcttcaccaccgtggccatggcattggaggatcgttcgatttcgttggacgaactgacacgccgtctgcacgcgcctgccgaagatccgacgcatatcgacaagctcgcgctgatcttcggtaccgagggcgacggcctgtcccaccatacgattgcccgcgccgatttgaccgtgaagattccgatgagccacggcgtggatagcctgaacgtggcggcatccagcgcagtggcgttctacgcgacacgctaaggaatcgcacgcgctccgaaaaggccggatccttaacaaatctacgaaactgttcatcgcaagttcacggcacgcgggggcgaaagccttgcatgttcgtttttttctgcaattattaactatgtaaaccgaatgcaaggaagcatccggcccggcagtgcggtgtcgaaagacgctcagtaacagagaggacagttacgatgaccaagaatcccaagattctgtcgattgtgcttgcaggtggtgaggggacccgcctgatgccgttaacccgtgatcgcgcgaagcccgccgttcccttcggtggtgtgtatcgtctgatcgatttcccgttgagcaacctggtgaactccgggtaccgtcaggtcgtggtgctcacccagtacaagtctcactcgcttgaccgccacatctcccaggtctggcgtttctccccgctgcttggctcgtacgtctcccctgtgcccgcgcagcagcgtctcggcaagcactggtatctcggctccgccgacgccatctaccagaccatcaacatcatcgaggatgtccagccggacatcgtggtgatcgtgggtgccgatcacgtctaccgcatggacttcgaacagatggtacagcagcacatcgagtccggcgccgagttcaccgtggccggtatccgccagcccatcgaggaatcgaaccagttcggtgtgattgaggtcgatcccgatcacccgaacatgatcaagaacttccaggagaagccgcccaccaccaccggtctgccggacaatccgaaccagattctggcctccatgggtaactacgtcgccaacaccaaggccctgttcgaggctctggctctcgatgagaaggctgccgacaccaagcacgacatgggcggcgacatcgccccgtacttcgcttcccgcaacgaagccggcgtctacgacttcaactcgaacgagattccgggctccacggccactgatcacgcttactggcgcgacgtcggtacgattaagcagttctacgatgcgcacatggatctgatcgcctatgtgcccgagttcaacctgtacaaccaggattggccgatttacacgatgtccggcaacctgccgccggccaagttcgtgcacgccggccgcgaccgtctgggccacgccaccgattcgatcgtctcccccggtgtgatcgtctccggcggtgaagtgcaccactccgtgctctcccccaatgtgcgtatccactcgtgggcacagattgtcgattccgtgctgttcgacggtgtagtcatcaaccgccgcgcccgcgtgtacaaggcgattcttgacaagaacgtggtgctcaccgagaactccactgtcggcatcgataccgagcacgatctggcccgtggcttcaccgtcacgccggatggcatcacggttgtcccgaagaacaccatcgtcgatgactgattgaccagtccagacatggaaaagccccgcatcatgcggggcttttctcgtatagagctccctctgatgagggaacttactaagcgctatcagtactttggcatattgtcgaagctgaagcctagggcggcgagctggtcgcggccttcgggcgtgatgcgctccatggtccagcgcggatcccacgtccagtcgatgcggaactcctcgaccagaccggccagcgtggatgcgcattcgtcctcgataaggtcggtcagcgggcaggccggcgtggtcagcgtcatcgtaataatggcgcggcctagctcatcgatctcaatgccgtagaccagacccaaatcgatcacgtcgatgccaagctccggatcaatcacctgatgcagtgcctcgcgcacgtcttcggcagtggcgcggccgatatcgtcaatcgccttgatcggaatctcgctgccatcggactgttcgtcatcctggcaaccgcatttgccgtggtgaccgccacacgcacaggtgtcatcgccggacgcagcagagtgctcgatcgggcgtccgttcgggaagcccttggccaaggccgggttggccatcacgcggcgagcggcctcctcgtcctgcaggacgccgttgacagcatcgaaaacggacggctgtggttcgggaaccaaattatcgttggacatatttcctcagttctttgcagcgagggctttggcgatggagtccttcagcccttcccagcctagcagagcgcatttgatgcgcatagggtatttcgacacgccttggaataccacggcgtcgccgagcttttcttccaggttctcgtcgtccagaccggcaccgcgcgattccatcagcttgtggaatgtctgttccagatccatggcctcgtcaacggttttgccgtccaccagatcgaccatcaccgacaggctggcctgcgaaatggagcagccgtggccgtcccacaccaatcgcttgatggtgtgcggttcgtcatcggagacttcgacatggatggtcgcctcgtcgccgcaggtcgggttgaactggtgcgattcaccgggcgtgcagtattcgtggctggcttgtacggtgacattggccgctgcgtccgcggactgttcgaccgctgcgttgggcgcaaaggattccttgccatgcggatgtttcgacgcctcgaggatgacctcttggtacatctgttcgaggtcatccccgctcataccgaattcgttcatggtgttctgttttactccactccaaagaacttacggatgcccttggccgcttcgaccaacgcttgggcatcttcgaccgaattgtagacaccggaggaggcacggttggatgcgtataggccgaagtggcggtgtaccggctgggcgcagtggtgtcccacgcgaatcgcgatgccctgggcgtcgatgaactggcccacatcgtgcggatgcacgccggccacgtcgaacgccacggtgccgatgcggtccacgttttcgcgcggcccgaggatgcgaatgccatcgacgtcgccgagcttgagcagttcggcggcgatggtcttctcatgggcttcgatgttctcgagcccgatgttcatcatccattcggcggcgacgcctgcggccgccacttgggcgaccggctgggtgccggcctcgaagcgggccggaggggccatgtattgggcctcgtggtccatgtaggcgagctcgaccatggagccgccgaagttggccggcggcagggcttcgagcaggtcgcgcttaccgtacaggaaaccgacgccggtaggaccgtacatcttgtgcgcgctccaggcggcgaagtccacatcaagcgcgtggaaatcgaccttgaggtgcggtacggactggcaagcgtccaagatgaagatcgaacctacttcatgcgcacgcttgatgatcggggcgatgttggtgatggcacccgtggcgttgcccacgtgggtgacggccacgaccttggtacgctcggtgatgacttcgtcgaggttgtccgtacgcacacggccgtcctcggtcaggtcgatccacttgaaggtggcgccggtacggtaggacagctcctggaacggcagcagcaccgaatgatgttccgcacgcgagacgacgatctcatcgcccggcttcagggcaaaacgcttggcggcttctcccccacgccccagcgatgcattgccgaatgcggtggcgagcaggttcagtccggccgtggcaccaccggtgacgacgacctcctcttcaccttcggccgcattcgcgccgaccagcttggccaccttggctcgggcctcctcaaaggccatggtgctacgggcggccagctcgtgcgcaccacggtgcacgccggcgttaattgtacggtagaagttcgcctcggcgtcgatcaccgcattcggcttctgcgaggtggccgcagaatccaggtacacgagcgggtgcccgtgaatctcctgatccagaatcgggaactgcgcccgaatcgccttaaaatcaaccattatgttccccctacttacgtaacaattgtacgaaacgagtgggagtctgacatggcctgttcgcgaccgtaaagacctggcctaagcggcccggagcgtgtcgagaatagggcatgtcagactcccacggtcacggactcaggccagtgcggactcggagtcggcgccttcgggcaggtactggtcgtagccgttctcttcgagttcgtcggccagctcagggccgccggtcttgacgaagtggccgtcggcgaacacgtgcacgatgtccggcttgatgtacttcaagatacgggtgtagtgcgtgaccatgaggatgccgaactggttggcttccttggcgcggttcacgccttcggacacgatgcgcagggcgtccacgtccaagccggagtcggtttcgtcaaggacggcaaacttcggtttcagcagttcgagctgcagcacttcggcgcgcttcttttcaccgccggagaagccttcgttcacggaacgggaggcgaacttcgggtccatcttgaggcgcttcatggctgcggacaggtccttggcccactggcgaataccgggagcctcgccgtcgatttcggtcttggcggtgcgcaagaagttggtcatggacacgcccggtatttcgaccgggtactgcatggccaggaacaggccggccttggcgcgctcgtccggagtcatcttgaggatgtccttgccgtcgaggagggcctcgccggagtcgaccacgtacttggggtggccggccaacgtgtaggcgagagtggacttgccggaaccgttggggcccatgatggcgtgggtttcgccggagtggacggtcagggtggcacccttcaggatcggcttgatgccttccttggtttcgacgtggacgtgcaggtccttgatttcgagtgttgacattgttgtgctcctaaaaatgctgttcttacttgtcttcgaggacctgtgccatggcgtcgttttcaccacgggccagtcggcggtcaatcacggtcatcagatgttcggagatggcgggaatgccgatctcctcgacgagttcgccgaagaagccgcgcaccacgagcttgcgggcgtcggtttcggggatgccgcgggattcgaggtagaacagttcctcgtcgtcgaagcggcccaccgaagaggcgtgaccggcaccgatgatgttgccgttttcgatttcgaggttcggctcggaatcggcgatggcgcccggggtcaggaccaggttgcggttgagctcgtaggagtcggtgccgggggcggtgggctggatgagcgcgttgcccacccaagtggagtgcgcgcccttgccgtcaagcgcgcccttgtagaccacgcgggacttgcagtcggggtggttgtgtaccaccatcgtgcggtgttcgatgtgctcgccggggtccacgaagtagatgccgagcatgttgaggtcgccctgttcgccgccgaagtcctgatccatgcggatgcggacgatgtcgccgcccaaggtcacgacggagtggcgcagggatgcgccttcgccgacgtggatgcggtggttggccacatgcttggcggttttggcccattcctgaacgaacgtggtggagacgtgcgagtccttgccggtggtgatttccacgccttcggccagtcgtgcgtcaccgtcgtgttccacgacgacgtccgcatgagccttgtcggcggcggcgatcaccagatggaaagcgtcgaggtcctcccccgcgccgtgcaccttgacgagcacgggctgggcgatctcaccggacagttccagaatggttgcggtgcggccggattcccattcgactgcggagacgcggtcgttgggcttggacacagtgccggacaggccctcaccgagcttgatctggctgagcttcacgccttcggccaacggcgagccgtcaatcatggagacttcgatctgcgtttcgccggaaggcttgaacacggtgaagaactcgttgatgcgctcgataggcgtgtagcgccattcgtcctgcttgcggctgggctccgggtagtcgcctgcgttgaacgagcgcacggcatggtccacggaggacggcatagcggccggaatcgcgtacgggtcgttggggtcggcgaccggaatcttgatttccttgacgggtgttgtgttgtcggtcatcggaatcagcccaccgatccttccatctgaagttccacaagtctgttgagttcgagcgcgtattccatcggcagctcacggctgatcggttcgacgaagccgcgcacgatcatgcctcgcgcctcttcctccgtgagacctcggctcatcaggtagaagagctggtcttcggaaatcttggaaacggtggcttcgtgggccatcgaaacgtcgtcttcgcgaacgtcgacatgcgggtaggtatcggagcgggagaagtcgtcgaccagcagggcatcgcacacggtcgagttggacgaaccgtacgcgcccttgacgattttgaccagaccgcggtaggcggagcggccaccaccacgggaaatggacttggcgacgatggtggagctggtgtgcggggcgaggtgaatcatcttcgcgcccgtgtcctggtactggcccttgccggcgaagccgagggacatggtggatgccttggcgtacggttcggcgaggatgcaggccgggtacttcatggtggccttggaaccgatgttgccgtcgacccattccatcgtgccgccctcgcgcacgtaggcacgctgggtgacgaggttgtagacgttgttcgaccagttctgcacggtggtgtaacgcacgcgggcgtgcttttcgacgatgatctcgacgatggcggcgtgcagcgagtcctcggaccagatcggggcggtgcagccttccacgtagtgcacgtaggagccttcgtccgcgatgatgagcgtgcgctcgaactgacccatggccggggtgttgatgcggaagtacgcctgcaacgggatgtccacatgcacgcccttcggcacgtatacgaacgagccgccggaccatgccgcggtgttgagggcaccgaacttgttgtcttccggaggcacgacggtgccgaagtacttcttgacgagttcagggtattcgcgcacagcggtgtccgtgtcgacgaagatgacgccctgcttcttcaggtcctcctggatggagttgtagatgacctccgactcgtactgggcggccacgccggagacgaggcggttcttctccgcctccgggatgccgagacgatcgtaggtgttgcggatgtcgtcaggcagttcgtcccagcttttcgcctgcttgtcgattggcttgacgtagtacttgaagtcgtctgcgttgaagccggagagatccacaccccaatcgggcatgggcttttcgaggaacgccttgaatccacgcagacgcatgtcgagcatccactgcggctcgcctttgtcggcgctgatcgcgcgtacgacgttctcatcaatgcctcgttttgcggcttcgccggcggcatcagaatcatgccaaccatagttgtagtcgccgaactggctgatgatctcgtcatccttcttgatcttgtcctcgttgacgcgggtacgatcagccacatactggctcatctccacgtcagcggcggcgtttggtgctgtgttttcggtcaccatcctgccttccttgtatcacacttaatcctatgaaaacctagcagaacccaagtgcaaacactagccgccctgacgcatattggctgtgggcttgattacacgaatgcgatacagcgatattggagccgggcaagcttgtcccatgcacaccgaacatcgcgtatgcggcattatgtgtcgcaccactgcatgccgtatttgttacatatcacactgttgcatatcacacttggatatgcacgctcgtgcccatattgcaccagttgtagaaccattcggccacatcccatccgatacccacgcaaccatgagatccgttggcaatggagggcattacggcatccgctacatatctgccggcaatacggtggattgcgcaaccggaggagaagtaattgacgaagcccacgtctttgacatcccatgtttccaccgtgccatcggcaagattcagcgtgccgctcatatcttgactgggcaacttttgccatacgttgaagtcacctgtcggcgtacacatcatgccaacgcattcgccggtgacgttgtcgttgccctccgcgaccacgacattcaatgtcttgaccaccgtgtcattctcataggcatagagcttacggtcggacaggtcaatcgccacgcgatgagtgaccttgacttcctgtttgggatctaccttgccgtccacattcactgagccagttcccgtggccagcacctgagccaagcgagcaccaacctccgtatccgcgccatcggcaatcacaatgccatcatggccttctgtttcagtgctcagcacctcgccagcattattgacgacgaccttcttgtcttcacgttccaatttgagattcggcttgatttgctcgtcatagtattgctgcagcttatcggcatcaaagaccacgtagccattacgtacttcattgtctttcagctttgactgctggttggcgtcgatgcgcatggccgaacccagcatggacgcattcacggtggcgatgtctttatccgccaccttgatggccacggcattgttcactagggtttccagcgtggttttcgcctcatcggcaattgcattggtaatcgtcggttcggttacgtcgagttccacccgaacggtctgtggctggacactgcccaatgactccactgtggaaatggcttgcttcgcaatgctggtggcgttggctccctggccattttctcccgcaataacgttgaagccactgttgttatcgttcaatgcgacttgcgcgtcaacaggttcttgtgcatcaatgttcagcgccttatctaccacactgccatcagcgagctcgggattgatttgcggggccacatcatgcgtaatccagaacgcatactgttgccaccatgcgtcaccgcgttgggcattgatgacatcggatgcgattgcttcaccatcaacttcgatgccgagatctttcagcgtgaacgtcgccgactgcccctggtatttcgctcgtaccgcggtgttgtcaacctgttcgttgattaggtcggcaatctcctgctcggttttgccggtaactgaatttccccatagcgttgtgccaggcagcacgtgatcttggaagaaccaaacaccgccgccacaggcagcccccaaggcaaccagcagacaagcaatcaccacccacggccagatgcggcgcctcctcatctcatcgccctgaatggaatctgatgcagcagcatccacactgtctgccacagtgccgctgacggcattattcgcaccaaacagaggcgcaaactgctgggtcgagtcatcaaggtgttcggtcatggtcggtctttctgcgatggcctactaagcgttatctgcatactaccaacacaccatagaaacggtaattttttaccgtcgccttccaatacatcatgctgcatgctgctcatacaacaaaaaagacgtggtggcgaaacatcattagatatttcgccaccacgtctttaccgtatgtcttgcactacgccgatgacggcagccagcacatcatgccgcgatattatgcacggcacgaaagtgcgtcagcgcgccgcctgatggtcgagcgcggccttgaccaagccggcgaacagcgggtgcggcttggtcgggcgagacttgaactccgggtgagcctgggtggccacatagaacgggtgcacgtcctgcggcagttccacgaactcggtgagctcgccgtccgggctctggccggagatgcgcaggccgccttcgcgcagacgatccttgtaagccacgttgacttcgtaacggtggcggtgacgctcggtgacatgcgtggtgccgtacagttcggcgaccagcgagccttcctccagctcagccgggtaggagccaagacgcatggtgtggcccatgtcgcccttgccggccacgatgtccttctgctcttccatggtggcgatcaccggattggcgcaatcgggctcgaactcggaagagttcgcgtcttcaatgcccagcacgtggcgggagtattcgatgaccatggactgcaggcccaggcacaggccgagggcaggcagcttggtttcacgggcgaacttcagggcgccgatcttgccgtcgatgccgcggatgccgaagccgccgggaatcacgatgccgtcgacgttgtcgagagcggcggccgcaccttcggtggtttcgcaacgatcagccgcaacccacttgacgttgaccttggcccagttggcaaagccgccggccttgatggcctcggtgacagacaggtaggcgtccggcagatcgatgtacttgccgacgatggcgatgttgacctcgtgcttggggtgatgcacacgctccagcaggtcggcccattcatcccaatcgacgtcatggaacggcaggccgagctcacgcaccacataggcgtcgaggccctcctcgaacaggatcttcggcacatcgtagatgctcggcgcatccacgcagttgaccacgccttcggcatcgacatcgcacatcagggagatcttgtctttgatggactgattgagcgggcggtcggagcgcagcacgagagcgtccggggagatgccgagctgacgcagcatcatcacggagtgctgggtgggcttggtcttgagctcgtgggcggcggaaatgtacggcaccagggaaacgtgcacgaacatgcagttgtccgggccgagatcgcggcgcacttcgcgggcggcctcaaggaagggctgggactcgatgtcgccgacggtaccaccgatttcggtgatgatcacatccacgtcatcggaagcctgggcgcgcatacgagacttgatttcgttggtgatgtgcgggatgacctgcacgcactggccgaggtattcgccggcgcgctccttgcgcagcacttcctgatagatctgaccggtggtgacgttggccttctggctcaggaagacgtcgaggaaacgctcgtagtggccgatgtcgagatcggtttcggcaccgtcttcggtcacgtagacctcaccatgctggaacgggttcatggtgcccgggtcgacgttgatgtacggatcgagcttttgctgcagaacatggataccgcggctgcgcagcaaacgaccgagcgaagatgcggtcaggcccttgccgagagaggagacaacgccgccagtgacgaaaatatgcttggtgacgtgttcttgagaattaccatgtgttcttctaaccatggaatttcactctatcatccgtgtatgacccggcgtgttcaccagacgcgtcggccccgacatggcgtacttgaacaatacgaatagtaggctcgtcaaaaagcatacgcaaggtcataatcacgtcaaacgtcttatccgccagctattgcaggtattggtcgagacgcactaggcctaacgcatataggacaaacgctgttttcaggtttttcagcgaggcccattcatcggcaccgtgcgcgttgccggcacctggtgcgatgaatggcggggtctccaggtcgatgccgtcgaccgccggcacatggtcggcatggaattcgggaccgaagttgagtgcgcgcgggataaagcgggcgtgggtgccgtcgccgacagccacgggtcgagcctcgcaaccgagcacgtcgttgtaggttgcggtgagcaactggacacgcgggtcgtcagcctgcacgtagtatgggtcatcgttaaggatgtcgacaatgcggccgcccgccgcttcggcttgtgcttgaatacgctcgatgatttgttcgtgtgcctggcctaccgcataacggatgtcgaagtgcaatacgatggcatcttcagaagtctcacctgataccgcgcctaataccttgtctgcttcagcgaactcattcgccggtataatcaaaccaccattggcggtagtcggtccgctttccgcattctcgcaatcgatacccaagccggtgccatatgagtcttttgtccattgggcaatcgcctgcgctgcagtgaggtcacggccttcgagcagaccggaccgggcaagcgccgtagtgagcaccgctatagcgtttacggtaccggacggctggcaggcatgaccggcgacaccggtggcctcaatcgtgacgccttgcgctgttgcgttgatatgcaatcgctcggcgatatctggagcgatgttgccgctctggcagaatgcttgccgcacggtagattcgtcgacgccggtgagggtgattgcggcggccccgggaaccgtgttagtggcggtgccggcatgccaaccgcgcaattgcggcccgaccggcagttcgacatccacatcgagcagccctttttggatattgttcaccgggaagggaccatcggtgacgatggcctggtacggcgcgccgatgttggcgacgaaccatttgatgtcgttgagcgcgatctcttcggagccgccgaacagtatacgtacgcggtggcggaaacggtggtcgtgttccttgaagaaacggagtaggaaatagctggtcagcgcgacgcctttattgtccaatgagccgcgaccgataacaatatcgccaataacctgcggatcgaaggcatcgtgcgtccaaccgtcgtcggcggggactacgtcgaggtggtcgacgaaggcgatgtcacggtcggtctccacgttctcctgtggataaacgacttccatgacgtggccggtgtagtcgcgcgtaggcagcccgtctcgtcctgccttggccagcatatggtcgaatacacggcgtacttcgggtccataaggcgcgcccggacgaggattcgggtccgattcgtcggaaaccgacgggtagcgcagcagctcacacagctcatcgacgaactgtgcgcggtgggcgtcaaaccagcgtgacgcggcatcgacgagatcacgttccgtggcggtgagagtcatggcttcctttacttggacgcttatggtttcctcaggtaacaggaatcccgggcgcaacgtcgactgctacccgggattggctggagggcttggttctattcgctcagcaagtgcgccacagcatcgagcgcgagcttgtagccgtagaaacccatgccggtgatggtgccggtggccacagggctgattacggaacgcttgcggaactcgtcgcgggcggacgggttggaaatatggacttccataagcggcaggttctcgtcaatgaccatgtgcgcggcgtcggcgagagcatacgaatagtgcgtgaaggcggcggggttcatgaccaccggggttttctcgtcggcggcttggtgcatccagtgcaccatttcggcttcgtcgtcggtctggcgcacctcgacttcgaggccgaggtccttgccccattcggtgcagagcttgcgcagggtgtcgaggtcttgacgaccgtagacgtcgggctggcggacgccgagacgtccgaggttagggccattgacaacgatgactttggtcattgggactccttttgtttgtgcttctctccctccgccccttcggggcacctccctcatcagagggaggtagaaggtaaatccgactccggggtacctccgttagaggggagccaagtacttttttctgaggggatggcgaacggcacggcctacggccgttcaattactgctggatacgacggaatgcttcttccacggcttcggcgggcgggttgtcgaggtgtacgacgtgaccaatctcgtcgaggaccacgaagcgcagctcattgccgcgggccttcttgtcgcgatgcatcaatgcgagcacgtcgtcgaacgagccgccattccacgacgtcggcagacccatcgaagcaagcaacgagcggtgatagtcaaccagatcctgatcgatgtaaccgatcagatgggccagctcggcggcatacaccataccgacggccaccgcattgccatgcctccagcggaaatgctcgagcttttcgatggcatggcccatcgtgtgcccgtagttgaggaattcacgcagacccttctccttcaaatcggaggagacgtggtaggccttgacctttaccgtgcgctcaatgagctcggcaaccacgtcttcgagcggcgagccgaggaatgtagagccgtcgaaagcgcgcagttcagctgcgtggtcttcgaggatatgcaggatttcggggtcgcggatgaaaccggatttggcgacttcgccgagaccctcgatgaagatgtcattgggcagcgtagccagcgtcttggtgtcggccagcacaccggcaggcgtgtagaacgagccgacgaggttcttgccctgcggggtgttgatgccggttttgccaccggtggaggcatcgaccatggccagcagcgaggtcgggcagtttacatagcgcacgccgcgcatccacgtggcagccacgaaaccggccaaatcggttgcggcaccgccgccaagccccaccacggcatcggatcgggtgaaaccttcgttgccaaggcgttcccaaatgccgttggccacggtaatggtcttgccgggttcggcatccggaatcacgatgtcggaaacctcatagccgccctgacgcaacagggcgcgggcacgatcggagtgtcgctgcaccggctgagtgtggataagcgcgattttggcgggtttgggtcccagcacgtcgaccagatggttcatggcaccttcgccaatgaccacatcatacggctcaattgccgctccggtaacatgcactgctcgctcagataccatatcaatcactttcttcgctgcgccctgaggcgtaagcccccgggtatggacatgaacgttggcgacctcgcggaatactgggtcacgctgcttgaacagttttttccaacgggagttggcgttgccattgagcatgggccggcctcccccacggttcgcgcgttccatggcttccgccggatcggcatcaaggtagaccacacgaccgccatggtcgatgtaggaggcgagggcatgctgggtggatggcgtcatgggagcgccaccgcccagcgaaaagataccgtcgaaatcctcaagcatatcggcgatgagatcggcctcgacctcgcggaatgccggctcaccgtattcctcgaagtaggagggaatcttcatgcccacttcacgttcgatctccacatcggcatcggcgaacggcagacgcaacatatgcgccacttccttaccgacacgtgttttgccggctcccatcatgccgatgatgacggcgcgggggcgtgcggtcataatctacgaatcctctcgacgattggtgagtacagttgctgatggttccgcggcagtcgtcacgaaaccatacgcccttcgttcagcgcatgtgctccggccacgaggcgagatacgactcaaggttgcgccgtgtttcggcaacactgtctccaccgaacttatccagcgcgtacttcgccaaagtcagacgcaccatggcctcggccaccacggatgccgcaggcacggcggtgctgtcggaacgctggttgatggcttgtgcggattcgccggtcagcacgtcgaccgtacgcagggccttggggatggacggaatcggcttcatggcaccgcgtacgcgaatcacctggccattggacataccgccttcaatgccgcctgcgcggttggacagacggtcgatgcggccgtcggcgttgaccacgatctcatcgtgcgcctgcgaaccggggcgggaggcttccaggaagccgtcgccgatctccacacccttgaacgcctgaatgcccatgatcgcggaggccagagccgcgtccagtcggcggtcggactccacatacgtgccgatgccggcaggcacaccgtaagccagcacttcaatcacgccgcccaacgtatcggaggccttcttggcctcgttgatgcgttcgatgatgcgggcttcggcctctttgtccagcgtacggacaggcgaggcatcaagcgcttccagatcgtcgggggtgggcagaggcaggtcggggttggtctgcacgccaccaagcgccaccacgtgggctacggtgcggatgccgaacgcctgatccaagaactgcttggccacctcgcccaaagccacacgggaggcggtctcacgggcgctggagcgctccagtaccgggcgggcgtcgtcaaaaccatacttgcgcatgccggtcagatcggcgtggcccgggcgcgggcggctcagcggcgcattgcggccttcgcgcggcaggtcatggtcgagtgcatcggcgctcatgacctcggtccacttcggccattcggtgttggcgatttcgatggccaccggcgagccgagggtcaggccgtggcgtacaccggtcagcagacggaccttgtcttgctcgaacttcatgcgggcaccgcgaccatatccaagtcgacggcgtgccagtgcggaaacgatatcgtccgtgctaatacgcacgccggccggcaacccttcaatcatggccaccaatgcttctccgtgagactcccctgccgtctgccaacgcagcataacttccctcgtttcatgtgtgtacgtctatgtgtacgtctagctaggggttaatgttaagccatgccatacctgttcacgctacccggtctgctatgtgggcttgcactgtccattgaggatgttcgtcatcggcgggtgccgatcgcgtgggtggctgcgggcgcgttgcttcagctggccgccgatttcgcgtatggagtggtggtgaacgacctgttcgtgctgttgcaggcgctgttgttcaccgtgctatgttgcctgatccagttcgcgttggcgttgctggtgcctcggtcattgggattcggcgatgtgaccgccttgatacctatgggattgtctgtcggactgtttggcctgttgcctgtggtggtctggtggctggcgatgggcgttgccggcatcacatggattgccttgtggacgcgattcgacccacaacgcacatcaccggcacatgcgggcaaggtgccgtatgtgccggtgatattggcgggcgcgattgtggcggtggctgttggggtgttgtcctagatttcttccatccgcttcgcgggagccccgggcttaagttgagcgttacattccctgcagtgctcccctcagtccgcttttttgcggacagctcccctcggcgagggagccaatgaagagaccaacgtccgatcagcttccccaagcgaaggaagctaacgggatgactactggttttcggcttgccacttgcgtagttcggccacgttctggtcatgttcatcggcggttgcggcgaacttggtttcgccggtgtccagattgaccgtgcagaagtacagccaattgccgccttcggggtgcagtgccgcttgaatggcgttatcgccgggattgctgatcggcgtaggcggcaggccggagatcttgtacgtgttgtacgggttggactcgtcttgggtcatctcggtggtcacctgcgcgggcttgacgttattgccataggccacggtggaatccatgcccaacgacatgccctgctccaaacggttctcgatgactcgcgtcactttgccgtagtaatcggctttgttgacctcggcctcggcgatagaggcgatgatcatcacccgttcgcggtcactgcctgccggcacgcccaattcatccaacttggcgatacgcttatcgaccatggccttgaggatttccgaagcgctcttcatgctcttgacgttgtaggttcccggctccagccatccctcaaagctaccgcccgcttcattgggcagaatatccttacccttgttcttgataatcgtgtcgaattcgctttgggcaatgccggaaagcttcgcggcgttggcgaacacatcggtggcacgttcaccgggacgaacctcgaggaagcccgccgcctggttggtgtcggagagaacgtcgatcactttggatgcggccatatgcttcttcaatgtgaacgttcccggatagagtgtcgtgctattggcgttgaccacgctggtgaacgcggcagtagacttgatgacttcggccttgagcagattatcggcgatctccgccgcgccttggccctcgctcacggtgaattcgacctcgccatagcccggtcccggatagtccgcgatggccgtcgactggttgctccggctgtcgcgccatgcgatgagcttggttacgccgaaatagccgccgccgataagcagggcgacgatggcgatagcgatgataatgccactgatacgcttgcgcctgcgctgtgcacgtcgcttgcgcatctccctgcgggatttcggcggttctggcggctcggccccgcgcattggttctgacccctgttcgacccaatgcgtgttgtcatcaaagaactcgttaaaatcatcggtcataaccgatacctcactgctcccgggtacggtcgagtgccgtctgcaaaatcaccactgccgactgctggtcaaccaccggcctgtgcttgttcgaagctttatgggcctcgaacagctgacgatgcgcactgactgttgtcaatctctcatctatcaatgatacctgcggaatctgatactccgtagaatcactgtcttcactctctgcttgcagcctcttctccagattggccgcccacctgcgcgcttttttggcgcttttgccttctgtaccgtccatctgcaggggcagtccgacgattacatggtccacatgttcgtcttcgatgacgttcaggacctcgtcaatagcaaagaaatagtcgccggcaacatgaatgttgccagcaggatgtgcaaaggtaagctccgggtcggacagtgccagtccgacccgggcattacccaaatcaacgcctaaccacaccactggcggaatcaggctttctgcgcctcgtgcttgagcgcttcgagggcctcgtcgatcttggaggcatcgacaccgccaccctgggcgaagtccggcttgccgccgccaccgccgccgaggaccttggctgcgccacgcaccagatcaccggccttgatgccggccttgcgggcggcctcgttggtggccacggcgaccatcggcttgtcatcctcgttcacgccggcaagggccaccaccacgggggcgtcttcaccgagctgggcgcgcacgtcgagtacggtcttgcgcagggcatcgaccgcgccaaagtggcccacgttcttgacggccaccttgaccggggccgcggagttcttggtgtcagcaaccagcgccggaaccgaggcggccagctgggactcgtacatggaggccaagcgacgatcggattccttgagcttggcgagcagggcgttcacacgctcggcgagctcgtccggacgagcgttgagcttgtcggacagctgggagaccagcgcgtgctcacgagcgttgaagtcataggcaccctggcccacgacggcgtcgacacgacgcacgccggagccgatggaggcttcggacaggatgttgaccatgccgatcttgccaacgtggtccacgtgggtaccaccacacagctcgcggctccagccgtcttcgccgatggagaccacgcgtacgatgtcgccgtacttctcaccgaacaggtgcatggcaccgagggcgatggcgtcgtcgaacttcatttccttggtggtcacggcgaggttgtcgcgcagcttgtcgttgacgcgctcctcgactgcggagatcacggacttggccggggccttggaccactggaagtcgaagcgcagacggttcggggcgtcttcggagccgcgctgggtggcctgcgggcccagctcctcacgcagcgccttgtgcaccatgtgcgtggcggtgtgcgagcgggcgatggcgccacggcgggccaggtcgatgttggcgttgacttcggcgccgacgaccagcgtgccttcggtcagacggcactggtggacgatgaggtccttgatgggcttctgcacatcgtcgacttcgagcacggcgccgtcgtcggacaggatctcgccctggtcggcgagctggccgccggcctccgcgtagaacggggtgcggtcgaggatgacctcgacgttggccgggccggtcacggcgggcacggaacccttgccttcctgcatgatgccgatcaccttggcgcgggcggacatgtcggtgtagccgaggaagtcgatcgggctgacgagcgtcttcttgaagtcgtcgtaaacggaaagatccacgttgtgacgcttcttgagggcgtcggcgcgggcgcgggacttctgctcggccatgagttcgcggaacttggcctcgtccaccttcacgccctgttcggcggccatctcgagggtcagctcaatcgggaagccgtaggtgtcgtgcagcttgaaggcgtcctcgccggccacgacgggctcggcggaatcgctcttggccttgttgacggccacgtcgagaatcgtggtgccggtctcaagggtgcggcggaaggcgtcttcctcgccatacgcggattcggacacctcatggaaggtgtcgttgagctccgggtagctggcctccatggcggccttggaggtcgggaagagggtgggcagcaccggatcggtcacgccgagcatgcgcatggagcgcacggtgcggcgcagcaggcggcgcagcacgtagccacggcccacgttggacgggcgcacgccgtcggacatgatcatcagggcggagcgcacgtggtcagcgaccacgcggaagcgcacgtcggcgtcctcgttctcgccgtacttcaggccggagagctgctcggcggcctcgatgaccgggaagacctcatcggtctcgtagatgttgttcttgccctgcagcaggtaggccagacgttccaagccggcaccggtatcgatgttcttgttctcaagctcgcccacgatgtgcaggtcggtcttggacttgacgttgtcgacctcgtagttctcgaacacgaggtcccagatctcgatgtagcggttctcgtcggcaatcgggccgccttccttgccgaaggcggggccgcggtccacgtagatttcggagcaggggccgccgggtccggggccaccggtggtccaaaagttgtcttccatgcccatcttctggatgtgctcggggtccacgccctcgttgatccacatggaacgggcttcgtcatcgtcggtgaacgtggtcatccacagcttctcggggtcaaagccgtagccgccctcatcctgcgaggtggtgagcagctcccaggcgtagtggatggcctcttccttgaagtagtcgccgaaggagaagttgccgagcatctggaagaaggtgccgtggcgggtggtcttgccgacctcgtcgatgtcgagcgtacgcacgcacttctggttggaggccatgcggcgcttcggcggggtctgctcacccatcaggtacgggatgaacggcaccatgccggcgatggtgaaaagcgtggtggggttcggggaaatcagggatgccgagggcacgatgagatggtcgtgcttggcaaaataatcgaggtatcgctttgcgatgtccgcagtgcgcatgagcggatgaactccttgtttgggtaatgggcgcagttgcgcctggtattggtggaaaagactggattatgaggattagtttgttctagctgattcagtgactagatggcaaggcggcatgcgcgtgtcagttggcgcgctcgatgtactgacggttgagctcagcctcgcgggctcgacgggtggcattgaactcgttgaccaacccttcgagtgttttcatcggcacattgtcctgatcggggccaagcaggaactggcgtgccgcatcaggcgtattggccttgacataggcctgtgccttggtgacggcaacgattccgatggccacgccgacgccgacccagaagatgcgtttgaacatcactcccccttctcggcggtgtcgttgacggtggttttcgcggcgttcttcgcaaggaaggactgacccgtggttttcagcgcgtagaaggtggaagcgatcttgatgatgggcttaccgaggaaggagccatacagatcggtcaacgcaccaacgttgttggcggtggtggaagccgcggcggaaatcttgttcacgtcttcgagcgacttgttgacctgcttgacggtggtcacgccttcgtccagcgcggggatggcgtgttcaccggactcccggaccgtctgcgatatctgatcaaacatcttgcccagcctgatcagcggatagatcatgaaaccggccaatactgcgaacgcgatggccgcgatcaggccagcgatctctccgactcccattgtttcctccttgcggtcacacttactcgcctaagggtagcactccttccctatttcttggcataccattgcatgcgcagggcgaaaaccgtgcgcgtaggcgtatgcggctataggcgaaaggctgtcctgctgacgctttcgtttgcggcgtgccgccgtggaccgtacgtgctattcgatatgtattgcttgctatttgctacttgccgtacgaaacgatggtcacggcttcgccgaacggcttgtcggtgtcgaagtcgatcacggttaccgaaccattggccgggcgttcgttcagatcgaggtcagggccgccgaaccggtgaccgaggctaagcagtgtgttgccatgcgaaatctgcagcacatcgtcgccgtccttgagattcgggttgtcggcgataagacggaacgcaccttcgacgcgcgtccaatattcctcatcggattccgcgtcgtggaagggatcggcttccttgagaaaatcacgcgaggcccccaacccgaacttctcgacgatttggttgtaggttttgacgccgtggggcgctcccgcggcgtaccaggccatggccatgtcaagtccctcgtagtagccgtagaactgctcgcggaagtgcatgtccgtcacgagtgcggggcgcgggttacccgcggcttcgttgatgtcgagaattttctcggccgtctgctgggcacgcgtggtgtccgaacagtaggcggcggcgaacgtcaatcctttcagtcgctcaccggccttgacggcatcggcgacgcccgactcggtcagcggcgaattcgaccatccctgcagacggttgtatcggttgaaataggtctgtccgtgacggaccagatgcagatgaagaatcatggttctgattatgtcaccattccggcggtttcggtgcgggttgccggaagtcataagtcataacggcataggtcactacctgagatatgcgtaatccgggcagtatacctaacgattcctgagagtacacttagaatactgtgagcataaccttgaaacctgcaccatctcgatcgtctgtgcctgcccatttcaggggtatcgatggactgcgcgctctggcgattcttggagtcatagcattccacacccgcccgtcgctattgcagggcggattcattggcgtgacgatgtttttcgttatcaccggttttcttgccacacgttcggtactgaacatggtggaccgcaccgggtcctttggatatggccgatatctgatccgccgcattactcgtttatggccggtgatgctggcgaccattgccgtggtgccttggctcacttggatgttcgctcccagcctgttgcagaaagtggtttccgattcgctgccgagcgccttgttcgccagcaattgggtgtacatcttccgcaaggtgccgtatttcgaggcggccggattgccttctcctctgacccatctgtggttcttgggcgtgacgatgcagttctatctggtttggccgttgctgatggtggtgctcggcaaaatcaccaagtccaaatgggtgcgctccatggcgattcttgtcatcatggctgcttccaccgccgacatggtgctgctgtttgacccggccaatacctcccgcgtgtattacggtaccgatactcgcctcgccgagctggccgccggcgcgctgttggctatctggattgcgccttcctcgcgaggtacggaagctgcggaagctggagcggcttcgcaaacagtgcagatcgaacgtcaggccggcgacaagacgggcgcccgtctcactatcgtctgcaatgttcttggcaccgcggctttggcggcactgctgaccggattctggttcgccaacgggtatctgtcgtacatgtaccaaggcgggtacctgattaccgcgttcatatcgttgtgcgccttggcctgtgccgtgaacaatgactcaatctggtcgcacgtgctgggttgtgctcccctacgctatatcgggtcgcgatcgttctcgctgtacgtcatgcattatccgctgctgcagttcatgaacccggcgacacgaacgcaggcgttgccgtggtggggttgggttcttgaggccgtcgtggtgttggcggcgtcggaagccttctaccagctggtcgaggcggcccgtaaatcggtgcagatgcctcgtagccaacacgccaagccgctgccgaaagccggctaccggctgcgcccgggcgcgtgggtcatgtcggttatcggattggtgaccgttgtggcgctgacgtgggcaccggtggactggaatggcatcgctcaagcgcgagccattcagctgcgccccgaactcgcggcacccgccaagccggtcaagaaaccggcgaagcccgagcccgagtcttctgccataaatgccgcgaacggcgaaaccaataccgctgacgcgaataagaacggttcggattctcagccgcccatcatcaaaccgattgcggaaaaggtgccaaacaatcttgacatttcgaagtacgcctatgatccggcaacggaaagctgcaacgcggatatgatgatggtcggcgattcagtgacgtcgggtacttcggatgccatccaggccgcattcccgaacgcttttatcgatggcctgccgaaccgtcagctgccgcaggcggtggatgtgtatcagcaggacaccgctgccggccacagtggcagtgtggtggtgtttggcctcggcacgaacggcgtgatttcgaatgagcaggaagtgcaacagctcattgacctgaccggcggcaagccgacatacttcatcaccatccgtatgccatacccgtggcaggagaacaacaacaatacgatgctgcgtgaggccgccaagaagaacaagaacgtgggcatcatcgattggcatgggtatagcgaaggtcatagcgaatacctcaacgatgacggcattcatccgaatatgaccggtgcctatgcgtacgcgacgatgattcgccaggcggtgtgcggccagtaatcgccctacaacgcaggaaccccgcggcttctcgaaagaagcgcggggttcgagcggtatgtcctggatttgttgaccagagggcccggatcagcgggcgtagaattcgaccacgtactggatgttgacctgcaccgggatctcttcgacctccggcttacgggtcacagtggccttcagggacggcaggttcacgtcgaggtagccggggaccgcaggcagcacgtcacggtgcacgccttcggcggcgatctggaacggaaccatggtctggctcttggccttcacctgaatggtctggccgggcttgacgcggtaggacgggcggtccacgatgttgccgtcaacgaggatgtgacggtgcaccacgaactgacgggcctgggcggtggtgcgggcgaagccggcacgcagcaccaggttgtcgagacgggtctcgaggtcggtcagcatggcgttaccggtctggccggcagtacgggtggccttctcgtaagcggcgcgaagctgcttctcggagatgccgtactgagcgcgcagacgctgcttttcgcgcatacgcaccgcgtaatcggactcggtgcggcggcggtcacggccgtgctcgccaggagcgtacggacgcttttcgaagatgcgctgagccttgggggtcagtgcgatgccgagggcgcgagacagacgcacctgacggcgagaacgctgaacgttcgtcattggattaatccttctgtcgttatctgaacggaacgcttgccttgcatatgcctgacaagcgctgagtcgggcctccccagcgcttcgtcgtgaataaacacgaacgggttggttttcttgcgattacctaccgccgacccgctgatgggctatgactccagacggtatctacctgttggcagacaccagcagaccatattacaccgaggctatggacagcactccgacgtccatgcgatacacccgatctgcgtattcgagtgcatcgggatcatgggtgaccatgagaatcgccgtgccgttgttggcttggtctctgagcagacgcattacgatgtcggtgctctcttggtcgaggtcgccggtcggctcgtcggcgatgagcaggctcggctggttcatcagcgcgcgggcgatggagacgcgccgcatttcaccgccggacagctcgcgcgggtagctgtctgccagatcggcaacaccaagctgggtgaacagcgtgcgagctcgggtggcgaacaggtccgaacggctcgcagccgtgtttgacggcgtgttttcctggtctgtgattggcgcaatgacatccggcatgaacgggtcggcggctgaatcggcggccgcttcatcattggtggcagcggcttgcgccacggcatccgttgcttctgcgttttgggcgaacggcagcggctccggaaacatcgttgcgggcagaatcacgttgtcgagcacggtcaggttgccgagcagggtctggctttgagtcacgaatccgatggtgcgattcctcagcacggacagtgctttatcgcccaagtcggccacattgcgtccagccacgctcacggttcccgaggtcgggcgaatcagcccagcgaccatgttgatcagcgtgcttttaccgttgcccgaccggccgacgatggcgatgaattcgccggcatcgacggtgaggttcacgtggctgacggcgtcgaacggcgtgccgcggcggacgaactggcgggtcaggtccgtcaaggtcagcagatggtccggggagggcgtctcggttacgtgcggcgaatccggcgcagtcggcgcgttcggctgagctggcgtggtcggctggagcttggtcggctcaaccgtggtcggctgaagcggcgtagttgtctcagtcatatcactccccctctcgcagggtcaggtaggcttcgggccggccgagacgccacatggtggccagcgaaccgatgatgccgatgaccgtagagcacacaatggtcacggcaatgaatccgatcaccgcaaccgggctggcttgcagatacggcaattgaagctgtttgccgatcagcgaactgaatgggaaaatcaccaggctggccgcgccgacgccgattacgccaccgatcagaccgatgatggcggattccttcagaatgatggcattcaacatgccgcgcgtggcgcccatgatgcgcagggacgcgaattcgcgtttgcgttcgttcaccgacgaggcgaatacggcgagcagcacaatcacgcccattacccagatcaccgccacgaaaatcttgaggtaggtgacaagcgcggtcagcgaagttctggtgttggcggtgatgccgccggggtatacgtatcccaaatcggcgaatcgggagtcaagacgcttgatgttctcagctacggtctgcgcttcgtaaccccgctgcgtcttgatcatcacggtggagacggctttgccggcatattcggcgggcatgacctgcttggagaccttggccgaggcggcgaccatgtcgggcacggtgttttggttgatgaacaccgagttgtcgaggctggtgccggtgttggcgagctgggcgacgaccggccatgaacggccgtagagttcgatggtgccgtcggtggacacgttgacgtttgcgcctgcaatcatctgaccgtcttcaagggggccttcgaactgggaggcgacccatggttcgatgacgaagtcagtgtccgggtcgtaaccgatgatctgcagcttttcggcacagcaggcggcggccagcgatgatatataggtctgttcggtggcctgtgcgatgccgtcggcctgcatgacctcgtcggcgatgtctttggtgaaatagaaagtgctgggattgccgttggtgagcagcgcttcggccttctgcacggtgttttgcggcacgaccatgaggtcggcgcccaggcgcttttccatactggtcatgccagtgttgaggttcatggtcagcatggtgccgccgaagaatgtcagcgcgaggatggtgacgacggcgagcagtgcgccggtgcggaacggcttgcgtttgaggttttcaatcggaaggccgcgcaatgcgatatgggatggcacgatgaatccttatgttgcttatagtgcggttgcaataagcgaggccggagtccagcgttcggaatggctgggctccggccgtctgctcgatcagttgcgcttggcggcgcgagagtcgagccagatggcgatggccgcgaacacgatggtgagcacgccgagcacgatgagcgtgggcagcataaccatgcgacagtgcatcatcgcgcccttgcagatgccgatcagaaaggtgggtacggcgagtagtagcagggcgtcggctgcggcggcgatattgaggccgatgcgaatctgcggggcgacgaacaaagccacgacgccgaacacgaggatgacgacgccgatgccggtggccgcctgctgcgagtagtggcaggcacccggcatgtcatggccggtgcaggcgtgcgcaaaggtctggggcgcgatggtgatcagcgcgccgaacagaatattgggcacggatgcaaacagcttgttcttcataactactttttcctctcccctgttcccagggctcgtaggcacaacctccgcattatgcccacactgtgatgaagaacacaagtcttgttttttgcgaatttatttggtatataactcagcccctcgtcagaggggccaatttatctacaacttctcaatcggcgctacgcggagcatgaggcgtttgacgccggcggagccgaagtccacggtgattaccgaattgcggcccttgtcttgtgcgtcggtgaccttgccgagaccgtactggtcgtggctgatcatgtcgcccacggcgaagtcggcgatattcaggccattgtccttggtgagcttcgagctaggcacggcagagccggtcgaatcggatttcggtgcggtacggcgcgtggtgaccttgccgccacgggtgccaccatatgaaccggacgaagaaccggaacgggaacgcgacccgtaagacgaccccgaacgggagcgagacccgtaggaggacgagccggagcgggaatcatatgatgatgaacgggaaccgtacgaagaacctgaacgggaaccatacgacgaggagccggaacccgagccatacgacgacccataccgcgaccgcgacccataggacgaacccggaccggacgaaccacgcgagccgaacgtcgacgacccgccaaacgtggcaccgccgaaatcgtcatcatcccagccgcccaaatcgtcggcgaatccatcggtctcccagctggcgcgcatacgctccacgccggcttcacggcgtttccaatcaatcagcgaatccggaatttcgtcgaggaattggctgggcatcatatcggcggcctggccccactgggagcggacggcggcgcgcgtgacatacagtcgctgcttggcgcgcgtgatgcccacataggcgagtcggcgttcctcctgcagttcagtggtgtcttccatcgaacgcgaatgcgggaaggtgccctgttccatgccggtcaggaacaccaccgggtattcgaggcccttggcggtgtgcaaggtcatgagcgtcaccttgccggagtcctccgcctcgccgggtagttggtcggagtcggccacgagcgcagtggtctccaggaatgcggacaacgtggcgtcaggcgtgttctgttcgaattcggctgcggtggactgcagctgggagaggttctccagacgggaggcgtcctgcgggtccacggatttctcgagttcggcccttaagcccgacttctccaatacttcggccacgatctcgctgggcttggagtcgtgcgcgcgcgtgaactgcgagagcgcgcccatcagatcgcggaatgctcgtagcgaggtggcggtgcgtgtcggcacctcgatctcatccaagtgcatgagtgcgtagaagaagctggtgccatgctcacgcgcgtaggcgagcagcacgccttcggcgcggtcgccaagcccgcgcttgggcacgttgagaatacggcgtagattcacatcgtcgtccggattgacgagcgcctgcaaataggccagcgcatccttgatttcgcgacgttcgtagaacttggtgccgccgacgagctgatacggctgattcgtgttgatcagcgcctcttcgagcgagcgggattgggcgttggcgcggtacatgatcgccatgtcggagtaggcgatgcccgcttcggcgtgcaggcgcgcgatttcggtggccacccactgggcctcctgctgggcgttgtccgccgcgtagccgacgatcggctcgcccttgccgagcgcggtccacagtttcttgggcttgcggccctcgttgttgctgatcaccgcgttggccgcatccagaatggtctgcgtcgaacgatagttctgttcgagcatgatggtcttggcgttcgggaagtcctgctcgaagtcctgaatgttgcggatgtcggcaccacggaacgcgtagatggactggtcggaatcgcccaccacggtgatccaggcggggccggacttgccggcgttaggcgcgcccgggatggccttctcccccgtgtccacgccggccagctcgcgcacgagcacgtactgggcgtggttggtgtcctgatactcgtcgacgagaatgtaacggaagcggtgatggtagtactcggcgacggccgggtcggtgcgcagcaactcgaccgtgcggccgatcagatcgtcgaagtcgacggcgttggccagggccaagcgatgctcgtattcggcgtagatcaccgcgtagatggcttcaaggtcgcccaccgtgccgaactggtagccgcgctggccgggcgtgaagtcgggcgcgtgaacggcgaggttttccttccaaccggtcagattgttcttgaggtcggagatatggccgagaatcgagcgtggagtgtagcgcttgatgtcgaggttgaattcggtggcgatgattttgacgagtcgctcggagtcggcggaatcgtagatggagaagccggacttgagtccgatggacttgccgtcgcgcctcagaatgcgcacgcaggcggagtggaaggtggagacccacatgcgctgggccaccgggccgatcagcgagccgagtctttcgcgcatttcggcggcggccttgttggtgaaggtgatggctagaatctggctcggccatgcgccgaactggctcaagatccaggcgatgcggcgggtcagcacgcgggttttgccggagcctgcaccggctccgatcagcagcgcctgaccgcggtattgcacggcttccgcctgctgcgggttcaggtcgcccacgagttcctgtgcgctgcgtgcgatgacttccggctcgtcgtacactgttgcctccctttgaatcgcgacattcatgtttaccacatgcacgggtcagcgcaggacaacgtacacttacgagtatccatatcattcactgacatacaacaatgggaggttcaatgcaggaacttgaggagcgaatccaaagcgagggaacggtgaaggcgggtgatgtgctcaaggtggacgcgtttctgaaccaccagtgcgacgtacgcctgttcgaccgcatgggttcggcatgggccgctcatttcgccggcaagcacatcaccaagattctgaccatcgaggcgtccggcatcggcattgcgtgtgtggcggcccagcatttcggcaatgtgccggtggtgttcgccaagaaggcgcagtccatcaaccttgacggcgaccagtacaccaccacggtctattccttcaccaagcagaaggagttcccggtgatcgtggccaagaagtatctgaacgccggcgaccatgtgctgcttattgacgattttctggccaacggcaaggcgttgcgcggtctgatcgatctgtgcgaagcagccggtgccacggtcgagggcattggcatcgccgtggagaagggcttccagggcggcggtgacgcgctgcgcgctgaaggctacgatgtggattcgctggccatcgtcgagtccatgaatcccgagaccggcgaaatcacatttaggcactgagcacattggctgctcccgccggcgggagcaacagagagaagaagagaatcatgtcagagaagaagagaatcatgtcagagaagaaaaccaatcattccgtatcctttgaggcgttgtcttcgctggacgcgccagtatccttctggaagggcattccgttcggcctgcagcatgtgatggccatgttcgtggcgaacctcgccccgatcttcatcgtcgcctcggccgcgaagatgaccccggcccaatcggccaccatcatccaggccggcctgctggttgcgggcctgggcacttgcttgcaactgtacggcgcgtggctcatcggctcgcgacttccgatggtcaccggcatctccttcacctacgtggcggccgccgtggcgatctgcgcggacaagggctatggcgcggtggtcggcgcggtaatggtcggcggtctgctggaacttgtgctgggtttgacggccaagtattggcgtcggttcgtgccgcccatcgtctccgccatcgtggtcacgtcgatcggcttctcgctgctcaacgtgggtgccacgagcttcggcggcggcagcggagccaaggacttcggttcctggcagaacctgacgctcgggcttatatctttggttgcctgcctggcgttccagctgttgatgaagggcacggccaagcagctgtccgtgctgttcggtctggtggtcggctatgtggcggctatctgcatgggcaaggtcgatttctccggtttccagaacctcgccatcgtgtccgtgccgcagttcatgccgttcaagcctgagttcgactggggctcgatcatctccatcggcctgctctacgtcgtctcctcggtcgaggtgctgggtgacaccgccgcgctgaccaaggtgggcctgaaccgtacgcccaccgaacgcgagaccgcgggcgccatcgccggcgacggcctgatctccaccgtatccggcctgttcggctgtctgccgctgacctcgttcgcacagaacatcggattggtggccatgaccaaggtcgtcaaccgcaaggtgattctctccggcggactgattctggtgctggcgagcttcgtgccggccatcgccgaggtgttcaactcgctgccgcaggcggtgctcggcggctgcacgatcatgatgttcggcaacatcattctttcgggcttccagatgattgccgaggcgggcttcacgcagcgcaacatcacgattgcggcgctttcgctgaccatcggcatcggcttcacccaggtgagcgacatcttcacgcagttcccggcactgttccaacaaatcttcgcctcgaactgcatcgccgtggcgttcgtggtggccgtgatcctgaacaccgtgctgcccagcgaggagcacttcctctctgcgcccaaggaggcaccggccgcggacgccgagtgataacaacgcaacatatcagctgcgcataatcacatgatgatgccctatcgtcttgcaggatgatagggcatcattgattttgggagagactacaagttgaaccatgagttcgagccggtggcgtgtcgatcaatcgtcatcttcccattcgaggatgtctccgggttggcagtcgagtgccttgcagatggcgtccaacgtggtgaagcggacggctttggcacgtccgttcttcagaatggacacgttggcgggagtgatgccaatttgttcggcgagctcgccgacgccaatcttgcgtttggccatcatgacgtcgagattgatgcgaatcgtcatctcaaatcacctgctcgagttcgcgcccgagccggacaaggagaacagtttccatacggccacgaacgccgcttcgatgcagaacaggaacagcacgcccataatgagatatggccagcgcatcgacgtctggctcgggtagaggccggccagcgcgccgctcaatcccggtacggcgaatagttggccccataggcaggccagccagaccagaatcacgatggctttcaacgcgagcaacacccatcggttcatgtagtttttcatagcccggtcctttcaggtgccgacgtttttttggcgacaccgcgaacatcgatatgactatatcgaaaaacgatataccttgcaaggcgtattgcgtcaaccggcattggtcgctcgtatacatataggcttcggcagactgtcagcagaccgtcagctcaacggagcgaacgccatatgagccacccattcgcgcacgagcgtgatgacggcttcgggttggtcgatgtgcgcgttgtgaccggcattgtccagcgtcacgaaggtggcgttgggatagtgcggcaacagggcttgctgatcttcgtatccgacgatctggtcttgcttgccggtgacgatgagcaccggacccgcatatgtgccgagcatttcctcgggattatcggccagccaatagcgctgatccagtcgttcgcatgccgcacggtcgcacaacgccacgccgggcaggatgaaccgttggtagcgtcgccacgcgtcgaatgactggttgacgcccatggtaatgaaatcgaacacctgttcctgcggcaaggagtgcgtcagcttgggattgggctgtgcaaccacatgttcggccacatgccggccggcatgctgcgggtccacgaccggcgcgatcaatgccataccggccactcggcgaggttcgcgcgccaatacttcgcggacaagcgcaccgcccatcgagttgccgaccatggcgaatggagccgctttaccgacaagaccgtcaatggccgtttgcagccaatccgccatttccggcagcccgcaggcatgctcgggcaatgccggcgtacggccgaaaccgggcagatccagatatatacggcgaattgaatcattgccgtcaaacgccttgtcgagcatcatcagcgaacgatggtccacacccatgccatgcacgaacacgacgggcaatccatcatcattgccctcaatcgcgcagtacggctgcaattgcgccatgtgttcctctccttcaacccggtacaaatcgcctttcacacaatagcggcagcagctcccttggtgtcggagcaatcccgaccgccattctcggtttcgaggggctgatttgcgcggatgtcatgaagcgtgaagacttgtcacaaagtcgcgtgatgacgcagccgccgttcaggtggatatgccacgctgtcatgatgacggccgagccggaacacggcaaatcccgcatgctgcataggccagccggtcacggtcagccatgacaccgaaatattggaggcgcaatgggacaacaggtgcggtacggcagacgccgctcccatggcgcgggcgcgctgattgcagccgtcatacttgttgttgcggcgctgatcgcggcatggacgctgctgccacggctattcacgcctcgcgagaccgcgcgcacggccgaggaagcatattgcgcggcggtgtcgtccgacggagcccgccgcaccttgacgcctgatcaggcgcagaacgcggcgctgattgcgaacatcgccgtcacgcgcagactgccggatcacgcggcgacggtggccatcgccacggccatgcaggagtcgaggctgacgaatctggactacggcgacttggattcgctcggcctgttccaacagcggcccagccaaggctggggcacggcggagcaggtgtccgacatgacctatgcgacaaacatcttctacgatcatctgctgcaggtgccggattgggagacgattccggtggaggacgccgcgcaggaggtgcagcgctcaggctacccggaactatatgccgcatgggatgcgatggcacgcgcttgggcctcggggctgaccggtgaacggtcggcgggcgtcacgtgcgcgttggagccagcaacctcctcggacgcggacgggttggttgccgccataggaggtacactgccgaatgtcaatgtctcggttgtgcccccaaatggcaaaaccggcacgaacaacggcgctgcgaccaatacggccagcacaacgttgacgatcacgctgccggacggcctgtccgccgacaaccgcactcgactttgctggcagacggcaggctggctggtcacgcatgcacgtcaatacggcattgacgcactgcacgcggacggcatggattggaaccgcaaaaccggcacatggatcggcaccgaaaccgccgagcagaccatcaccttcacgcttgcgtgatgtgacctataccgccgttgcgaccacaaatccgactggttggagcctacgccgtcgatgccgcctgaggcacgatacggatatgtttttactcgttcgaatgagcccaatccacgacggcttcgatgttattgccatccgggtccagcacgaatgcggagtaatagccgggatggtacgggcgcggaccgggagcgccgttgtctcggccgccggcggcgagcgcggctgcatggaacgcctgcacggcttgctgactgtcagccaagaacgcgatgtgtgtgaccggcgtgaccggcgaagcctccgcctccagcccttcaatcggtgacacgtagaaatcggagtgcagggttccgtcatccacgccgaatccgagcgtaggctcatgatgcgccttgacgatatagccgagcggtgcgagcgcctgtttgtagaatgtgatgctacggtcgatgtctttcacgtgcaacgtcagatggtccagcatggtcttggtcgccctcccctggttcttgtattcgattgctgcttgcagtgtaagcccgaacgtttcccacagggccgcgcatggctatgatgagagcaatcgcacgtcgagttcgagacaatattcaaaacgaatccaaggcaataaggggaatgacgatgaccaaggcactgattgtggtggatgtgcagccgacgttctgtgaaagcggcgaactgggtgtcgcaggcggcaacgcggtcgccgagcggattgccgattatgtgaacgcgcatcgcagcgagtacgcgtatatcgcaaccacgcaggactggcatatcgagccgggcgcgcactggtcggcggagccggatttcgtggacacgtggccgaagcatggtgcggccggcacgctgaacgccgaattgcatccggcgatcaaggcgctgaatatcgagcatcatttcaagaagggccagtattcggcggcatattccggttttgagggtatcgaggacaataccgaccgtatccagacccgcgaggaggtcgaggccgagcaatccgccggcaagacgctggccaacgcgctgaaggccgccggcgtgagtcgcgtggatgtggtgggcatcgccgaatcgcattgtgtcaaggacaccgcgctcgatgccaagaagctcggcttcgaggtcaccgtgttcgaggatctgaccgtgccggtcagcgaggaacttggtgttgcggcccgcaagcagatggctgcgggcggcatcacattggctgagtcccgctgatcgggccggatatacccagagcgaagcacacagccgtagcatcaatcacgcgcaagattcccacgccacccaacatagcccgcccgcctcgaccggccgatatcatcggcgaacacgcggaaccgaaccctacatcgacgttcgtttcgtctggtttggcccatgaattctgcatgaattggggtgaactggcggggctggaggcgagcgggcggcggattatggggcacaatggtttcaaggaggccgccatggtcgatgactatactgccaaaatgactgagctgatcgaactcatgcgtctgatcggcaacgatacgcaacagtgcgaggtcaaggaatgcaagcgcaagatctcctcgaccatcaccgatacgctgtccgcgttctccaatggctccggcggctggattatcctgggcctgtccgaaaagaacgggttcacgccggtcgagggattcgacgcgcgcgccatgcaggaggcgctgagccaggcgtgcgagaagatgacgccggtggtgcggcccgtaatcgtcacctgcccgttcgaaggcgcgaatctggtgttcgcgcgcatcgacgagatgctgccgcgcgacaagccctgcttcaccaccgcgctcggaccgcacggcggctcgttcatccgtaccggcgacggcgaccggcgcatgacctcctatgaggtcgaccggctcatcgaggagcatctgcagcccacatacgatctggatatcgtgcccgacgccacgaccgatgacctcgacccgcagcttgttgccggactgttggcacgcgtgcgcgaacagcatccgcgcgtgttcgccgaccgagacggcatcgatgtgctgctggatctgcaggtgttgcgccatgatgattccgacgagtcggaggtcggcggaatcctgcgccccaccttggccggactgctggcgttgggccgctatccgcagaagttctatccgcggctcggcatttcgattgccgtgtttccggggacgagccgggacgatgtgttccggggtgacgaacgattggtcgcctcgaagtcggtggtcggttcgattccggtgatgatcgacgatgcggtcgactcgttgatgcgttggattggcgcgaagaagcccgactatccgccgctcgtgttgcgcgaggcgattgcgaacgcgctcacccaccgtgattattcgcccgatgcgcgcggcacgcaggtgcatatcagcgtgttcaccgatcgcatcgagatcaccaatccgggtggcctgtacggcatggtgacacatgatgtgctggcgagccctcatccggtgacgggcgcgccgttcgtctccacccgaaaccagttcctgttcacgctgctggagtccacgccgtatccgggcggcgggtttgtgaacccggaaggcggcgacggctaccagcgcatcgccgccgcgttgcgcgaggccggcatcgagccggcgaccacgcgcaacgacatcaacacgttcacgatgaccatcaccaagcagcgcacgatggcgaacagttcaccgggcgacgtggtcaaggcgattatgaccgtactggagcggcattcggccatgagcgtcaaggagatcatgcgcgaactacagttgacgccgctggccgccacatccggtatgcgcgagctgatgaaggaagggcgggtcgcccgagtcaagttcgccgacgacccggcacagcggtatcggttgaaaggctgatttctcactcggccagctgcgtggtggcgggcgcggccagggcggggcgggatcggcggaagcggccggcggccaggccgatgcagatgaacatcacaccgaacagtgcgaccaatcccagcgagccggaccagccggcgacgcttatgccggtttccgccgccgtgccgaagccgagcgcgttgtcgatcgcggtgcaataccaccagccgggcaggaacttggctatggtcaccatcacgccgggcatcatgtcaatcggcaatgcgacacccgacgtgaacatgatgagcaggccgaagatgttggcgaacccgttggccgcctcttccgagagcccgaactcgctgagcatgaatccgcaggcgacggtcatcagcgcgtacacgcaggtcgcgccgaacgtcatcagcactcccccgacgctcaggtgcaacggatcgagccccgccgccatcatcagaccgattgacagcaccaaatagccgacgcatacgacgagcgcgaatccgcccaacgtcagcaaccgctggagtcccatcaggaccatgcgtcggggcgaggcggtgagacgccgccgcacctcgccggtggtgaatgcgcccaggatcatcgatccgcagatggtcatcgccagggacagcgggtacagcgcggttttcatggtgccgccgaatccgctgaccgccgtatccgcagcgcttgccgactcctcggtcggcgtatcgaccacggcgatctgatggttcacgtctgtatcgctggccgattcggcggccattttggcggcctgggacagatccttgatatccggcttgtcgacttgcccttccggcagcgagtccagcatgtcttggtccagactcgcgccatcaaaaccggcggcccctcctgtagcgttcatcatgccggcgagcgccgcctggtcgaccctcgtctgcgcgccgatcagtgcggtgcgggtgagcgagaggaacccgccgacgttcatccgcgccatcgacccggagccggatgcgtagctggtaaccgtgtccacgttcggcggattgtcgccgtccgccgccgcggcgacataatcgtcagcgaatccgtcgggaatgatgacgatcaggtccacccagttcgaggcgacggcctgttgcagcgtttcgctggtgtcgtcgaggtccaccagttcgctggaatcgcgcaggtaggcgcgcatcgacgtggcgatatcaccccggtcggagtcgcggtcgatgatggcgacgcgcgtcttggtcgattcgaacaccgcggacatggagccggatgcggaggtcagcatcgcccagctgatggacatcatcaggatgcctatgaatacgaggtagatcatcaggtagacccggtgcgcgaacagcacgcgcagcgtggctttacaggtgttcataacgttgcctcctcagcattgcgatgccggccaagaggaataccgcgctcatcgccagcagaatgatgcaggtggtgatgaacggccggtagctgtcgtagtacaggatgtcgtagaacaggttcgtcacctgctgtgcggggttgatggtgccgagtatgggcgcgttgcgggctatccagtcgctgatctgcatggcaaacccgccgtacagtccggtgaacagcgacagcgtgcaggagatgccggtcgacagcccgtatttcgtgttgtacgagagcttcggcaccgcaccgagcagggtgcctgctgagctggtcatgaacgaggcgatgatgaccgcaaggatcgccgccggttcgcgtccgccgagcgagacgttgcaggcgagccggatataggccaatgcgatggacagggcgaccgacgagcacagccagcaggagaggaagcccgcgacgagctgtttggcccggctcagcggcgctacggtccgccgtatgcccagcgcggacaggttcgcctgtgcggcggcgactgtgctgatggagtatcccatggccatcatgcaggacatggccagcagcgcgtaatagtatcgggcgatctcgtcaggctggaaatgcgtgagcgtcgtctcatgggtcatgtcgacgttctgcccgacgctgttccagaagttccggctgagcgcggcctgtggattgtcggcgatggtctgccgggtaacggcgtcggtgcggttgtacaggtcgatgacgctgcgcagggccgcgaggctaatgtccagtccgctgttttgcgtggagtccttggctgtgacggcggtttcccggctcacggtcatcgccaatcggccgttattgtcggcggtcagatagccgttggcagtgccgtcggcgagccgttgttcggcctccttcacggtgtcgactgtggtgatggtcagcagcttttggtcgatttcggcgtaggtcgtgtcgtctgaggccgattccgtttccccggccagcgcgtctacgaaggtgcgggcaccgtccgcctgctgccaacgggtgtcttcgatgacggccatcggcaccggcttgagttcgtatgcttcggccagcccgccgaacagtccgttgaacatggtcgccagcacaatcgggaacacggtcatccagaacaacgccgaccggttacgcaagttcgctttcaatgcgaccagaaatgtggtccacatgatgtctccttactcaggaactcccctcagtcacctttggtgacagctcccctcggagaggggagccaagttatttgcttgccgactgaggggagcatggtcagtccctcagtgctttgccggtgagttcgaggaacacgtcgttgagggtgggcgggcgactggtcaggtggccgatgttggcgccggagcgtttcaccgcgtcgagcacgtcggtcaggttgtgttcgccgcgacggcatcgcacgtcgagttccttgccgtcgtaggtggcttcgatcacgcacggcagcgcacgaacctcggccatcgccgaatccgccagatcgagcgtttcgatggtgatgcgctcgcccgtgtcgatcatgttcttgagctcgtcggcggttccgagcgccaggtgccggccgtggtccatgatgaggatgcggtcgcagatctgttcgacctcctccatgtagtggctggtgtagatctccgtggcgccggcctggttgagccgctggatgccttccagaatcgaattgcggctttgcgggtcgacggcgaccgtgggttcgtcgaagaagatcaggttaggcttgtgcgcgatgccgcaggcgatgttcaggcgtcgcagcagaccgccggacagtttgccgggccggaacttgcggaagtcctggagtccgacgaattcgatggactcctcgaccagcggcgcgcggtcggttttcttcggcacgtacagcgagcagaagtagtcgatgttttcggtgacggtcagttcgttgaacacggccacgttctgcggcacgatgccgatacgacgtttcagcgcgtaggaggtcggcgtcatcggctggccgaacacgcgaatcgtgcccgaatcgtaggtgagcagcgcgaggatgcagttgatcgcggtggttttgccggacccgttcggtccaagcagcccgaaaatctcgccctggttcacgtcaaggtcaaaatagtcgagcgccaccatgtcgccgtagcgtttgaccagttggctgacgtgcacggccagagccgggttggttgtcgagtcgtgttcggaagctctgttgtcggttgtcatagtcactcccttccttggcgattccatcatcccaagaaggggccggacgccgccacaggcaaacgtcacgacttggccgtacaggcgtgacatttgtcattacagtccttcggcgtcggtctgcatggccttgtacaccttatcgaccggcatcaggctgatctcgtccatcgaatagttggacgccctgtggctttgcgtaatcatcggtatcatccctttacggttgtgtcgacgacatccgacgcttgtgcctcatctattcgggaagtgtaagcccgttgtcttggaccgtcatgcgggtaatgccgcacgcccgtcaagttcgtcgtgttccgcacaccgctagactggtggtggaagagcgtcgagccggggaggtgccatgcgcgtgttggccgagatgggcttgctactcgtgttgggcctggttgtcgggctacggtccgatggcgtgttcatcgccggcctgctgttggccgtttccgtcgccggattggtggaatggctgcgtcccgcgcaatggtcttgggtcttgtgtacggcgtatctcgtcatcgccgtggcggtgccttcatggtgcgcgttcatgccgctcatcgcctacgatactgcacggctgccggccctcgcctcgaccggagcccgggctggggcacggactgcggcaagtggccgctcccccagtgtctcgcggaccgcggcctctcgccgttcccttgccgatgcaatgcgttcggccccgtggctttcggccgccgcgcgctggatatgggtgttgccgctgatcgcgctctggttcgcccgtggcaccgaccgtctccagacgctggtgatgacgctggtcgccctgcttggattcgttctgggccgggcccgcgcctcctcggacgaggcgcggcgcgcgttgctgcacgcgcaggacagggcgcgcgaatcctcgcgggccactcgttcgcgcatcgccgacatcgatgaggaacgcgcccagtcgattcgcatggcgaccctcggcgagcgcacgcgtatcgcccgggagatccacgacaatgtgggccatctgctgacccgcgcgatcatgcaggcgcaggccggcaaaacggtggccaaggcgacgaacgatacggtcgctgcgcaagggttcgccacgttgggtgcgacgttggatgatgcgatgacgatggtgcgccgttcggtgcatgatcttgaggatgatggcactgatttcgccgcgcagatcgatgatgccgtcacgtcgttcgacggcatctcccccggtttcgccgtgacgctggccaacgatatcgccaaggcgcctgcgccggtctcgcgctgtttcgcgaccgtgattcgcgaggcattgtcgaacgtggtgcatcacagcgcggcgcgcgaggcgagcgtgacgttgcgtgacttccccgcgttctggcagttggtcattcaggatccggggccggccgtgtccgagtccgatgggtcccggacggccgctgcccgcccgcgtgcgatgcgcgccacgcacgtcggctcgcgactcgccgccgacggcgttgccgatatgcgtggttcggccgatgagctgatgcgcggcatgggtttggcggatatcgaatcgcgcgtgcgcgcccttggcggcaccgcggtctgcgggccgtatgaggacggctggcgtgtgttcgtatccgtgccgaagaagcgttggaccatggaatcgagggattgatgagaatcgcaatcgtggatgatgatccgatcgtctgccagtcgttggagacgattctgacggccaccggcacggccgaggtgctatggatggcaaatgacggagacgccgccgtgcgccgttatttcgagacaccggcgagccgaccggacgtgctgctgatcgatattcagatgcccggcaccagcggtttggatgccgcgcgcgagattctggccacggacccggccgcgcgcatactgttcctgaccacgtttgcggaccagtcgtatatcgcgcaggcgatgggacttggcgccaagggctatctcatcaaacaggatgtggcggcggtcgggcccgcgctgcaggcggtgatggccggtcaggtggtgctcggcgcggaagtgctcggcaagctcaccgaacgaactccggatcctgccgattccgacgattccagagataccgccgattccatcgagggcctgcttggcgagcgcgaacgtgagatcaccgcgctggtcgccgagggcctcgataaccgcgacatcgccgccagactgttcctgagcgaaggcacggtccgcaatcgcatcagcgcgatactggacaagctcggcctgaccaatcgcacccaactcgccatcctctggctcaacgcccataggtgagggggcttttggtcaagtaggcctctccctccgacatcgcttcgcgatgccacctcgaacgcgattcaggacagcttgcagctgacctcttattcgctcgttgtcactcaccctcgcctaaaaacgcctccggcgttttcttcacggctcggctcatcagagggaggttgtgaaaaaccaacctcagctgtttttcatgacgatactgtcgatggtgttggccacgcgctcgcagtcgtcggagcactgttcgaggtgacggtagacgtcatgccaggcgaacacctgcagcggatcggtgcaggtggtgtgcagcgtgcgcatcgactcgatgaacaggtggtcggcgtccgtttcgatcgtgttgatggcgaacaccagttcgcgcaacgtcttggaatgccggaatcgcggcagttcgttgaccagctcgcagatgctttccgtggcgcgcaccaccatatccgacatctggaccgcgtcgtcgcgcatgtcggtcacgttgtcgtagtacatgcggttgagcacgccttcgatgctgtcggtcacgtcgtcgagcacgtggccgagctcgtcgatgtcctcgcggtcgaacggcgtgatgaacgcggtcaccagttcgtccatcatgtcgtggcgcacctcgtccgctgacttctcaatcgcgtgcatgctgtccatgcgttcgcgcagctggcccggattgaagtcgtgcatgacctcggacagcagcttcgcggcctggcatgcgtagtccgcgctgcggcggaatccgtcgaagtagaacgtgtctttttgtctcgccatgatgggtggattcctttctagaacacgaccatgaacagtttggccattacgaagctgatgagaccgcaaccagggaaggtgaacacccaggtgagcatcatgtcgcgcaccacgccgaagttgatggcggagaggcggcgtaccgcgcccacgcccatgatggcgctggtcttggtgtgcgtggtggagacggggatgccgagcacggtcatgacgagcaggcacagcgcgcttgacagatcggccgagaagccttggtatttctcgagtttcaccatgtcctggcccacggatttgatgatgcgttcaccgccgacggacgtgcccacgcccatgatggtgctgcacagaatcatgagccagatcggaatcatcacaccggtcacgctgggttggccattgcagaacgccatgccgaggaacagcacgccgatgaacttctggccgtcctgcgcgccgtgcatgaagctcatggccgccgcgcccacgatctgcgcgtaggtgaagaacccgttggtgcggcggcggtccatgccagcgcaaatcagggtcacggccttgcataccaaccagccgacggcgaagccgaacaggaggcttgcgaccagaccgtagagcaccttgacccattctcccatgttgatgccgccgatgccgccttggatggcgatggccgctccggacaggccggcgatcaggctgtggctttcggaggtgggtatgccgagcagcgaggcgcccacgctgtatacgacgatggagaacagcgccgcgcatagggcgatgagcgccgcgttcgtgtcgccgccgaaatcgaccatgttgctgatggtggaggccacggaggcgttgagctgcgtcatgatgaagacgccgaggaagttgaagatggccgccatgatgacggcggagcgtacgcgcatgcatcgtgtggtcacgcaggtggcgatggcgttgggtgcgtcggtccagccgttgacgaagatgactcccagcgtcagcaacgttgtgacggtcagagccgggttggaaagcacttgttggaggaaatgcgccagtgagacgtccaaggggaattaacaccttcttcttcgggggcggaagccgtcacactgattgtaacggaagaatggctacgtagttcccatggcgcgcgggttttatggtgttgttatgctattgcggcctgtcagcagcaacaactggtattggggtggagacggtcgtattcctcgcgggcgcgaatgaattcgacctcgctcatcggtgtttcgccgggatgctcggccgcgaaatgctcaagataatggtcgtagcgggcctcgccgctgatctcacgcagataccagacgatgccgtgccatacggcaacgagtttgccgagcattttgtctcctttcgctgattattggctccccttgaaaaaaggggagccaatgacgcactacgctgcaacctgcccgttccgcacaagctcatgcagcttggcgctgtattcgcgctgcaccttcttctcaagcgcggtggcgaccaggctggagggcgcgaaccactgggattccacgaacggctcctcggacgtcgtttcggcaccgtacttgccagcggcgaacgtgcgcgccacgaccacgatgccgactaccacgaagacgcccatcatgaccaggaagaacacggagagcacgccgtccagatacgcgttggacagcgcggccttggcgttggtcagcgcctcgccggtcagctcgccggagtcgatctgcgcctgatacttggaggcggtggtgaagtagctcagcggcccgaagatcttctggaagtcggcggtgaaggtcacggcgatgtcccacacgagcggtaccaccggtatccacaggtgcttccagtagcccatcttggccacacacacggtgatcagcacgaagcaggcggcggcgagcagctggttggagatgccgaagataggcaccatcgcgttgatgccgccgttcgcgtcggacacgcccatccacagcagtccgccccacagcgcggtggcgatcagcgtggtgatgatgttgccgggcttccaggtcgggtcggcgaacttcttgagcttgcgcacgttgccgagcatttcgccgatctggtagcgggccacgcgggtgccgttgtccacggtggtcaggatgaacagggcttcgaacatgatggcgaagtggtaccagaaggccatcgagtcgtggccgcccaggtaggacttgaggaagttggccatgcccatggcgaacgtggtggcgccaccggtgcgggagacgatggaggtctcgccgatgtcggcggcggcctgctcaagcgccgcggcgccttcgtaggtcttggccgcgccgttctcgtccacggaatcccaggtgacctgcatctggttgccttcgatgtcggagaccttcatcgactccacggccttgacggcggcatcggcctgttcgcccggcgtggaggtggcggagatgctcacgccggatgcggcggtgatctgtgcggcggacatgttggtggagaagtacacgccctgcgagatggtgatcgcggcgatcagcgcgatgacggcggtgaacgattcgacgagcatcgaaccgtagccgatcatgcgaatctggttctccttctccacggccttcggggtcaggccggagctcaccgcgccgtggaagccggagagggcgccgcaggcgatggtgatgaacaggaacgggaataggttgccggagaaggtcgggccggtggaggtggaggccagttcggtcagacccggcaccttgacggacgggttggcgatgatgatgccgatgacgagcagcacgagcgtgccgatcttcatcagcgtggacaggtagtcgcgcggggtgacgagcagccagtgcggcagcgcggcggcggcgaacgagtagatcaccagggcgatgacgagctgcttggcgtccagtgtgaacacggcggccacggccgggatagaggcgatccatccgccggcgacgatgtcgagcacgagcagcacgaaaccgagcagcgtggtctcaatgacacggccggggcgcaggaaacgctggtagcagcccatgatcagggcgatcgggatggtcataccgatggagaacacggcccacggcgaggcggccatggccttgatggccacgagcgccaggaatgccatggcgatggcggtcatcaccacgaggaagatggataggatcataccgccgaacttacccatttcatcagtggccatctggcccagagagcgaccgcggcgcttggcggagatccacagcaccagcatgtcctgcacggcgccggcgaaaatcacgccgaggatgatccacagagtggagggcaggtagcccatctgcgcggccaggatcgggccgacgagcggtccggcgccggagatgccggcaaagtgctggccgaagagcacgcggcggtcggcgcgttcgaagttcgcgccgtcatgcacgcgctcggccggggtggcgttcgcgtcgtcggtgcgcatgatcttgatctggatgtaataggcatagaagcggtaggcgatggcgtaggagctcagcgccacgaccaggaaccagatggcggagatccgctcaccgcgcgagacggccagaatcgcccatccgcaggcacatacgatggcgatggcggcccacagcagggccttcttccatgtccataccattttgggacgcacgcctacgggcagtcccttcgaattgcgaatcacacgttcggcttcgtccggcgtgtaatcgtccttgaattccaacttgccaggtgccggggcctgggctgcggcggtggtcataataaccctctgttcctcttcaataacctttgcgggaaaggttctcttcattgcgacccttttggggtatctctcgtctgcttatggcactggttggaagcgtagccacggcatgtcgcgcctcaggaaaatgtcccaatatgtgagcttggccacatgttcacggactgcgtttcatgccgattacccgggattcgcaccgcgatgtgcgaaaatggacacggtgtcaatcaggaggtgcacagtggttgtaagcatggattcgagccgcacaatgcccgattgggtgaagtacggggtgttctggcacgtgtatccgctgggcttctgcggtgccgatatcaggcccgccggcccgcgccagttccatggccgcggccttgacgcgataattccctggctggagtacgtgcgcgatctaggcgcgtccggcctgctgctgggtccggtgttcgagtcggcgacgcatggatacgacacgctcgaccatatgcatatcgatgtgcgattgggcggggatgccgcgttcgatcagcttgtcgcggcctgccgggacatgggattgcaggtgatgctggatggcgtgttcaatcacgtgagccgcaatcatccggccgttcaggcggcgcttgacgagaccgccggacgcttgaatccggccgacaacccgtggcatggtctggtccgcgcgcatgtcggtgataatggcgaacccgctttggatgtgttcgaggggcacggggatctggtggcgctggaccattcggctgacgagaccgttgactatgtggtccatgtgatgagccattggctggatcgcggagccgccggctggcgcctcgacgccgcgtatgccgtgccgagcccgttctgggcgcgcgtgttgccgcaggtcaaagccgcacacccgtattcgtggattttcggcgaggtgatccatggcgattacccgcgcatcatcgaggaatccacgatggattcgatcacgcaatacgagctatggaagtcgatccagcatgcgctggagacggagaacttcttcgagctggattggaacttgaagcggcacaacgcgttcctggattccttcgtgccgcagacgttcatcggcaaccatgacgtgacgcgtatcgcatcgcagattggcccggccaaggcggcgttggcattggcggtgctcatgacggtcggcggcgtgccaagcatctattacggcgacgaacagggctatgtgggcgtcaagcaggagcgtttcggcggcgatgacgacgtacgtccgaagttccccgactcccctgccgaactgtccacgctgggagagccgacataccggctgcatcaggcgctgatcgcgctgcgccgtcgcaacccatggctgctggatgcgcgtaccgaggccgtgaagctggaaaacaagcacttcgtctatcgttcgacgagcgccgacgcccagcattccctgaccgtggacctcaacatcgagcaatcccccactttcaccatccgcaacgccgatggcagtacagcgtatcaatactgagctccctcatcagagggagctaactcattcacctctgaatgcctcggatcagcaggtcgagcaggtaaccgtacgaccggtcgacccgctcgcggccgcgtgtgcggggttgtgcggaacgcagttcgaattggatgaacccgtgtatggacacccagatggaggatgcgattagatgggggtcatcgccgcggaatacagatgctgcctggccgtatcgaatgatctgcgtgatggcgtccaggcagtgctgggccgagtccgacgcctgccccatccagaccagcgcgtaaatgccgggggcgtccagcgcgtgttcacggtagattatgcccgccctgcgcaggcgcagcacggggtcggattcgtcaatggcgatgagctgttcgcgcagatcggtgaagtatgtgtcgatgagcgcatcgcacaccgcctgcttgccgccgatgtgctggtagatgctggtgggcgacacatcggcctgtgcggacagcgcacggatggtcagaccatccacaccgtcccgttccacgatccgccttgccgcgtcaaggattctcccgtggatttcaagggtgggcgtgcgtttggatcggggctgcgattgcgtcatatccgttattctagggtgcgtacaggccattaccgccgtttcggcatggccacgatcacaacgactgcggcgataagtgcaatcgtcatggccgctaggcaggcgaacaggcatccgcatcgcaaacaccggcctataacacaatcaggcccgacgaccatcaaaggtcgtcgggcctgattcatacgcgctgtcggactaacggcgtccagacttcatacggaatggcgcattgtggcgattcttcttggaatgacggcggttcgggccttccgtgttgccgtatttggcgatcatgcggcgttcgtgacgcttggcaccttctgaacgctcgtcgcgtacgatgcggttctcgttcttgcgatggatgcgcttgccgccttcgccctgacgggtgttgcgcatggactgtctgcggccgtcatgggagcgctcgtcataggagaagccgtaatcctcgtggctgcgttcattgcggcgaggcttgcgcggacgctcgaaatcgcgggaatcggaccgttcgaaatcacggcccgcattgtgcctgcggctgccgaaatcatcgttgcgaccgtatccggccctgtcgcgcttatcgaacttgtcgcccttgccgtaccgatcattgcgacggttcttgccgtgctggtcgcggccattgtcctgacgctcgtcgtaccggttcttgccgtatccgtcgcgacggtcgcccttgcggcgctcctcgcggcggtcatcgccatgctcgaacagatagtcgcggcgctcggcctcggggttgctcatgcctgcacggcgttccgcacggttgcggttcttcttcacggccttcttgctggccttgtcgccgtgcttgcgctgcggctcgccttcggcaacaaactcgccgcctgcgttctcgtgctggaactcggtctcggcaacgttctgctcgtcacggttgcgattgcgattgtgcttgcgcttgccgccgcggccggactcgtcgcccgccgcgttcttggcgcccctgttcttgcccttgcgcgggttgcccacgggctgcgacttgtcgaggctccaaccatccacgcgctcggcgcggtcgcccacaagctcaagcacttcgggcgaatcgtgggtcacttcgatcatcttggtcttgatgccggcctggttcagcaagcggcgcgtctcgcggcgctgctcgggcagcacgagggtgaccacgtcgcctgccttgccggcgcgggcggtacgaccggagcggtgcacaaaggacttcgggtcggccggcggctcgacctgcaccacgagctccacgccgccgacgtctatgccacgggcggccacgtcggtggccaccatgacacgcacatcgccggaatcgaacgcagcgaggttgcgatcgcgctggttctggttcaggttgccgtgcagctcggcggccggaatgccgttctgcgtcaggttcttggcgagcttcttggcctggaacttggtgcgggtgaacaggatgcggcggccttcgcccgaggcgagcatgcgcacgagttcgtgcttgtcgccgcgcgtggtttcgaacacgtggtgggtcatcaggtcgggttcggcggtggccgaatcgacctcgtgcaccttgggatcgtgcaggaaggtgttcaccacttcatccacgccgtgatcgagcgtggcggagaacagcatgtgctgggcgtcgggcgaaatctgctcaagcagtcgcttgaccggtggcaggaagcccatatcggccatttcgtcggcctcatcgatgaccacgacttcgacggacgagagcgtgagcgcctgctggcgcagcaggtcctcaaggcggcccgggcaggcgaccacgatatcggcgccggccttcagatcgcggatctggtggatgtacttgacgccgccgtacaccgtggtggtgttcatgccgaacgtgtgggccagcggcatcagcacgtcgttgatctggttcgcgagctcgcgggtgggggccagcaccaggccgcgcgggtgcggtaggaagtcgtcggcgcggcgctcttccaggctggccttcttgcggcgcttgatttccttgcggaactcctccatcgcgatttcgccgaacgaatcgtaggaaccgaggcgggtgaccagcggaatggagaatgcgagggttttgccggagccggtgcgacctcggccgagaatgtcgcggccggccagtgaatcgggcagggtgtcggcctgaatggggaatgcggtcttcttgtcatctgccgcaagcacgcgcaccagcggtccgggtacgccaagttcgccaaaggtaagggggcgggattccgcgctgtcgttcatctggaaatcagcggaatcgtcacgatcatcgaaattattacggggcacagtggcctttcatgtcaaaggttacgcaaattacgcaagctttccgagcttagcgtaagccccctactttgcttggtgctcgccacactgtcatcccactctttacttatgaccccatggggcggtaactcgcccatggggcggcaacttgcccatggggcggtttgaagaaattgtgaaaccgcagaataaagccattttcacctaccgccccatgagggttttaccaccccatgggatatttgccgccccatgggttttaccaccacgtaaggcgagcaccgctccatggaacacgcaaatggcccccacccgtgaaggtaggggccattgtgcaaaagggctgagccaagatacagcccagtagccctaaaacacactacaaaatatccggatcgtctttggcaatagtgccggttgccttgccaatggccttcaggccgtggtaggccacaagaatcacgatcgtgccaatggcaatgccgttgaaggaaatgccaccaacagtgaacgcgaattggccgatggcaatgatcatggtgatggctgccaccatgatattcagcggcttgtcgaagttgaccttgttctccacccagatgcggataccgatcatgccgatcatgccatacagcagcgtggtcacgccaccgagcacgccggcggggatcgtgttgatcacggcaccgaacttcgggcacaggctcaggatcagggcaaaggcggcggcgcaccagtaggcggcggtggagtacaccttggtggcggccatcacaccgatgttctcgccgtaggtggtggtgccggagccgccgccgaagccggcgagcgtggtgcccaggccgtcggccatgagggcggtgccgatctgattgtcgtagtcgcggccggtcatttgggccacggacttgacatggccaacgttctcagccacaagcacaagcacaacagggatgaacatgggaaggatggagaaatcggcctgcggcaggtggaacttcgggaagccgatccatgcggcgtcgccgatggcggagaagtcgacctgaccacggatgcaggcatatacatagccgatgatcacgccgaccaaaatattgaggcgacccagcaagcccttgaacagcacagccacgagcagcacggccaacagggtaaccagtgcggtgtcgggcgcggcttggaagttggtccacacggaaggtgccagattgaagccgatgatggccacgatcgcgccgttgaccacgggcggcatgatgatgtcgatccatttggagccggcgtaatgcacgagcacgccaaccagggccagcagaataccggtgaccatgatgccgaagctggcgaccgcaatgcccttgttggcggtggtgaccgcggtgatcggtgcaatgaagccgaaggacgagcccaaatagctcggcagcacgttcctgttgatcagcagaaacagtgcggtggacatagccgtgaagaacagggtggtggacgggtcgaagcccgtcagaatcggcaccaggaaggtggcaccgaacatggcgatgacgtgctgtgcgccgataccggcggtgcgcacccaagtcagacgttcatcgggctcgactacctcgccgggcgccagcgtcttgccgtcgccatgcaattgccattggaagatattggacattactactctcctcgctctcgcttggggcacggcattcacaaccagccgcaccacgcaccattctagctcacgaagattttgtgaagtctctcttccgggaaaggctatttgccgtaatactccagcaggtgtggatcgacggcctgcaccacatccaccaaatcgccattggagagatacgggcgcttgaattcgcgccacggctccaccttgacctcccagcggccggtcgtctcgtcgagcacgggccgggcggtctgctcccagcgcacacgcttggaggtgcggccggtttccgggtcgcggcgcgtgtagtgcaggcaggtgcagttggtgatcttccagtcgtccgagtcggcgcgatgcaggaattcctcgtcggccagatcctcgatggtgagcatcagggcgagcatgaagtcgccgtgggtgaccatgaccacggattccgaatcggatttgcggctcagcgaggtcaggatgttgtgcacacggtcctcggccacatcggcaatcgactcgcctgccggcggacgccagtacagcggatcggtattcttgaagttccagttgcgtgcgtagttgtttttgaattcgtccttggtgatggtgttgatttcaccccaagaacgttcgcgcagcacacggttctcctcccatttggccttgggcagggccatggtggctgcggtttcgcgggtgcgcacgtatggcgagaccatgtaacggtcgaacagctgctgctggctgaccagccaacgaccgatgcagtcggcctgcttgcgtccggtggcggtgagtctccaggagcggtcgggtacggtgacgttgtcctgcgtatacagggagttgtcgccctgttcgcccgcctggacgatgacgttcgcttcggattcgccatgccggattacgtatagatcgagcggcatgctcatatggattcctctttcgttattggttacgttgtgttgttttctgctgtttcctacttgacctgcgtaatggtgttccccttgaccatgaacgcatgccgggccatgtcgatcatcggctgatcgaacttggagtcggtgtagaactcgtcgatgacggcgtccggaccgtacagttcgcggaaccgtttggtcttgttggtgttgaagttgagggtacgtgaccttcatcgtctccacatccacctcgctggccacgagattcctcacgccgagtctgcggcaggcctcccccaccgtcagaccgaaggatgcggtgaga

SEQ ID NO: 891 - DNA, 24688 bp, Unknown
  gut microbiota DNA sequence
cacggaattcgtccggctcggcgggtttgaacgcgtttgcaccttcatcggccaactggtcggaggccgcggccgaggcttcgcgcaggtcgccgtcgagcaccacggcatcgggcgagacgaggaacatgcgttcgttgacgccggccaaatagaggccgcccagcgattcgactcgggacagcgccacatatcccatgcctggcgcgaaggtgcgcttcaggtccatgaccgcacggtcaagcgtcatgccttgcgacttgtggatggtgatgccccacgcgcagcgcaacggcacctggaagacggaggcgagcacggtgtcgccgtccatcatctcccatgtggcctgtttcatggtgacgatgttgccgttctcgaattccacgatcggccagccgcccttgttctcctgtgcgaagccacgcacggtgccgagcgagccgttgacgtactggcgatcggtgtcgttgcgcagggccatgacagccgcgccttccttgagtatcaatcgctcgggggccaacatgttctttttgagtcggtcgaccaggttggcagggcctgctgtctcggcgtggaactcgtgtggatcaagcatgatctggttcaggcgcatgtcgttgagattgtcggcctgccggttcaccgggaacaggtggacggcgacctggccgggctcgggcagtttgcccagacgagtgacgagcacgtcacggtcggactgggtcacgtcgccttcgcgaatgtcggtgagcacggtcagcagttcgccggtatcctgacggtgctgttcggtcagatagcagatcaccgggttgagttcgggccataccagcgattcggtgatgaagccttcggggttcaagccggcacgggcataccgttcgcgactggcgatgaattcgggcgtgggggcgatgaggtcgcggttgcgcccggacaccgaaaccggcggcagctggaagaagtcgccggacaagacaacctggatgccaccgaacgggcgtggatcacggcgtacttcgcggcagacttggtcgaccatgtcgaacagccaagcgtgcagcatggaaacctcgtcaatgacgaggatgtccgtggcctgaatcttgcgtttgcgccgggatttgatgagtttgagcaggctggcgctcaggacggtggccacgccgacgccgctccacgaatgaatggtttggccgttgatatgcgtggaggcgatgcctgtggacgcggtgactgctacactggcgccgtcggcccgagcctggcggatgaactcgttcaagacataggtcttaccggcaccgggcgcaccggtcaggaacacgttcgcgccggcgttcagaatggccagggcttcggtttggcgcatatcaacctctctagactcccctcagggaggggagccaagtacggcggactacttattgaggatgctggtggctacgatgtcggcggcgatggccttggatgcagcatcgtccgggccgggggcgggagccataaacgccttacggtagtagcgcagctcgtccaaggactcgatgatgtctgcgagagcacgatggccaccgttctttggcgggcggttctcgtacacggccgggtaccagcggcgggcgagctccttgaatgtgctcacatccacgctgcggtaatgcaggtggctcatgaggttcggcatgtaatggtcgaggaacttcttatcggagccgatggtgttgccggccagcagcgggcgcacgccttccggcgtgaagcgcagcacgtattcggtgaccttctgctcggcctcggccaggctcaggccattctcccactcgttgatcaggccggaacgggtgtgcatctggcgcacgaaatcgttcatatggttcacggccttctcggacggcttgatgacgtaatccacgccctcgtccagcacattcaggtcaaagtcagtgggcactacggacacctcgacgagttcgtcgccgccgaagatatccaagcccgtcatttcgcagtcaatccaaatcaggcgcgaatcctttgcgctgtaagtttctgcatcatggctgtcgaccatggtaagcctcttttcgtcatgtcacccgttattacaagaacagttcagactataccccagcgcatacaagctatctcgagccacatacgcgaaaagggcctgcataagcagacccttttcacaaggaatcaacccctaactagcgcaagctagcgggcatcaaccgatcagttgttgtggaagccggagtagttcggggcttcggtggtcatcacgatatcgtgcgggtgcgattcgcgcagaccggcgtcggtgatgcggatgaacttgccacgctccggcatctcggcgatgttgtgggcgccgatgtagaacatggactggtgcaggccaccgagcatctggtagagcacggcgttcagcggtccgcggtacggcacttcgccttccacgccttccggcacgaccttgtcgctggaggtcacgtcggcctggaagtagcggtccttggagtaggacttcttgccgcgcggggccatggcaccgagggagcccatgccacggtacagcttgtactgcttgccgtgcaggagcaccttctcgcccggggcttcctcacagccagcgagcgtgccgccgagcatcacggaggaagcgccagccacgagggccttggcgatgtcaccggagtagtggatgccaccgtcggcgatgcagggcacgccagcggcacggcaggcctgggcagcctcgtacacggcggtgagctgcgggacaccgacaccggcaacgatacgggtggtgcagatagagccggggccaataccgaccttgacggcgtccgcgccagcctcaatcatggcctgagcaccggagcgggtgccgacgttgccgccgatgatctgcacgccgtcgaaggcggagtcgtgcttcaggcgggaaatcatgtcgagtgccagacgggcctcaccgttggcggtgtcgaccacgagcacgtccacgccagcctccatcagagcggaggcacgctgccaggcgtcgccgaggaagccgacgccggcggccacgcgcagacgaccctgctcatccttggtggcgtccgggtactgctcggtcttgacgaagtccttgacggtgatcaggccggtcaggtggccttcctcgtcaacgagcggcagcttctcaaccttgtgctgggcgagcagacggtgagcgtcgtccttggaaatgttggacgggccagtgaccaggttctccttggtcatgacatccttaaccttcagggtgtcgtaatcctcggaggcgatgaagcgcatatcacggttggtgatgatgccgacgagcttgttttccttgtccacaaccggcagaccggagatgtggaacttgccgcacagcttgtcgaggtcggccagagtgacctcggggttgacggtcagcgggtcggtgatcataccggactcggaacgcttgaccacatcgacctgagcggcctggtcgtcgatggacagattgcggtgcagcacaccgataccaccgttacgagccatggcgatggccatctcggactcggtcacggtatccatggcagcggagaggaccggggccttcatcacgatcttgcgagtcagatgagtgctggtgtccacttcggagggaatgacatccgtctcgttcggcagcagcaacacatcatcataagcaaggccgagcttggcgaaaatcggaggaaggggagcatacgccgattgggcgttcaattcatcgaggtttgtagccatacaaacactatatgaacacgcgctgaccttcacgacacacgcttgtgagcgctcacttatccgctgccgggtcctgcacctcacccgcctgcgagtcccgcgaatccgcaggcgaatcagtcatcgaatccgctgcctgagagccaatcgaatcccggctctcccctactgcagactgcgacttaaccgtagcatgctgcgcgttcttgcgtgcggattcgagcgtcaggttctcggcttggatctcgggaatacgatgccgcagataggggtacatcgtggctatggtcagcaccaccacggcgatgggcatgcccacggccacatgctgcgctttgaagaacagaatcgtcagcgaaccgaatgcgatcagcgcggcccatccccacaggatcagcacggcgccacgcaccgaatgcccgatcttcagcatgcgatggtgcaggtgcatacggtccggatgcatgggcgactggcctttggccaaacgccgcacaatcgccagacacatgtcgagcacaggcaggaacaacaccagaatcggcagcagaattggcatgaacaccggcagatagatgctggcatgaatcgaggccgggtcaagacgtccggtcatcacaatcgaagcgcaggtgatgagatagccaagcagcatcgaaccggaatcacccataaacagtttggcgggatgccaattatgcagcaggaagcccacgcagatacccaccatcatcacgtcgatcagcgtggccaacgaagcataactcggggaagaccgggcgatgatatacgaataggcggcgaacgctatgccaccaatcgccacgataccggccgccaggccatcgaggccatcaacgaaattgaccgcgttaatcgaggcgacaatcaggaatgcggtgatcgccatggacagactcggcgaggcggtaatcagcgaaccgcccaaaggcagtgagatgatctgcaatccgccccaagccacgaatacggaaatcagcagctgaccggcaagtttcagcatccaatcgagatcccacaggtcatcggccatgcccagcagactgatcatgatgccgccggcaagaatcacccacatctggtaattgccgttgaacaatcccgagagaaaaggcagccgactggcgaatacggtagccacggcaaaaccgatcagcatgccaaggccacccatgcgcggcgtgggaatggtgtgcacgtctcgggcacgcacctcgccaaccgcaccgatttcgatggcgacgtggcgaatcagcggagtcaccagccaggtgacgccaccggcgatggcggcaatcagtaggtagattctcatgcgccgagtccaccgccgttgaggtggagggccttgcgaatcacgttttgggcgatgacgccttcacgcaggatctcgatgccgtcgcgcgcgtacggatcggctttgacgacggtgctggagacatggccttgggtgggaccgccgtccagatacaggtcgacttcgctgccgaacgcgtcaaccgcctcctggacggtctgcgcgctttcgtcgccggaacggttggcgctggacgcggccagcgggccagtcgccttgagaatcgcgaggcacagcgccgaattggggatgcggatgccttgcgtgccggggcgaccatcggcggtgtcggccaaagtctccaacgtgcagtcgggccgggctacggcaatcggcgagaacgcgccaggcagaaacgccgccgacaaacgattcagcggggacggcaggtcgagaccgagctcatcaagctggtcggtggatgcgagcagtacctgcaacgccttatagcgcgggcgacgcttgagccggtagatacggtcgatagcggccttattacgcggatcgcacgccactccatataccgtatccgttggaatgacgaccaatccaccatcccggatgacacgcgccgcctgtgccagcgattcatccgtgactttcagcgttgttccgccttccacgctcacgccacctccgttcgcttgtgtattcacaatctaccattgcaccattgcgccccgacttgcatagttcatcatcgctcgtttgccgtactgccgttttccgattcgccccacacgcacagaccgtagatacaatgagtccatccatgctctttcgcgaaattacaggagtgttcaatgagcgaaatcaatgctgaatccaccaccatgcctcccgtcgaactgcgtatgccgcgcgccagcgagcgcgaggagatgctcgccggcaaactgtacaattcggtagaccctgaattgaatgccctgcgcgagaaggccggcgacctgtgcgcgcgcttcaacgccgcgtcgcgtaccgatcatgccgcccgtgccgcgattctcgatgagctgctgcccggccacggtgccggccttgacgtgatggggccgattttcttcgactatggctgcaacatcaccatcggagagcgcgtgttcgccaacttcaacttcactgtgctggattgttgcccggtgacgattggcgacgacgtgctgttcggcccgaacgtttcgctgctgccaccgatgcatccgttgcgttggcaggatcgtaacgtgaggcaggcacctgatggttccgcatacgactgcgagtatggcaagccgattgtcatcggctcgaactgctggtttggcggcaatgtgacggtaatcggcggcgtgacgatcggcgagggttgcgtgatcggtgccggctcggtggtgacgcgcgatattccgccgcacaccgtggccgtgggtaatccggcccgtccgattcgcgagattacggataaggatgcttccgcgctacagtattacgcgcagtgatatatgaatgctcccgctggcgagctgtcagcggagctgactgagggtggttgccggaaatctccgataaccaccctcagcctcacttcgtgaggtagctcccgccagcgggagcatagtaatgtgagacgtcacgcgccgaggtacgccttgcgcaccttctcgtcgtgcagcaggtcggaggccttgccctccatggtgatcttgccggtctcgagcacgtaggcgcgatccgcgatggacagggccatcttcgcgttctgctccacgagcagcacggtgatgccacgcttgcgcagcgtgacgatgatgtcgaagatctccttgaccagcagcggggacagacccatcgacggctcatccatgaggatggtcttcggatggctcatcagggcgcggcccatggccaccatctgctgctcaccgccggaaagcgtgccggccagctggcggcgacgttccttcaaacgcgggaagtagtcgaacaccatctcaagatccttacccagactggactggtctttgagactgaacgcgcccatctccaggttctcctgcacgctcatgcgggtgaacacgtggcggccttccggcacatgggccatgcccagcgtgacgatcttgttcgcatgcgttttgagcagatcgtggccatcataagtaatgctgccggatttggccggcaccagaccggtgatggtgtgcagggtggtggtcttgccggcgccgttggctccgatcagggagacgatctcgccgtcgttcaccttgaggctaatgcccttgaccgcgtcgatcgcgccataggaaacgcatagatccttgatttccagcatcagcgtgctccttccgtcagtgtcttggcaatgcttggctccggttccgccttggtggtggaatcgccgtccgcgtcatcgttgttgtcgctgcccaagtaggcggagatgacctgcgggttgttggcgatctcctccggcgtgccggatgcgatggtgcggccatagtccagcacctggatgcgctggcatacgctcatcaccaggctcatgtcatgttcgatgagcaggatggcgataccgaaacggtcgcggatcgtgttgatgcagtgcagcagatcctcggtttcggtggggttcatgccggcggccggctcgtcgagcagcagcagtttcatgccggtggccagggcgcgtgcgatctcgagcttgcgctgctggccgtacggcaggttggccgcctgggtggtggccagtccctcgaggttgaagatgcgcagcaggtcgatggccttctcgtgcatctcgttctcctgcttccagaagcccggggtgcggaagatggcgctgcccatgtggtaggtgaacgactcatcgaaggcgacgagcacgttctcctcgacggtgagctgcttgaacaggcggatgttctggaaggttcgggcgatgccggcacgcacgacctgataggtcttcttgccgttcatccgggttccgtccagccagaactcgccttcggtgggcttgtacacgccggtcagcaggttgaacaccgtggtcttgccggcgccgttggggccgatcaggccaatgagttcgcccttgttgatggtcatgttgaagttggacacggctttcagaccaccgaaggtgatgccgagatgttcggctttgaggatgggctgggttgcgtcgctcatcgtgaggcctccttcacggtcttgtcgtcggactggtcatgctgcttggcgctggccgcgggtttcgcgcccttgccggcggcgccgcggaacagcatgcggttgaccagacgcggcagtgagaactcccaggatccgaagatgccctgcgggcggaagatcatgacgagcaccagcaccaccgagtaggcgagcatacggtagtcggcgaaggcgcgcagcagctcgggcaggatggtcaggccgatggcggagacgatcgagccggtgagcgaacccatgccgccgaacaccaccatgatcacgtagttgatggagttgagccaaccggccatggtggggttgagcgagccgatgtactgggcgaagataccgccggcgatgcccgcgaagaacgcggagatcgcgaagacgagcaccttgaggtacgtggtgttgagtccggaggcgccggcggcgatctcgtcgtcgcggatggccttgaccgcacggccgtaacgggagcggccgaacatgaagagcacgaccacggtgaccaccatgatccagaacacgacgtacaggttggcggtgcgttcgatgccgatcagcgcctgtccggcggcgcccttgtcgaggcccatgccgccggctaccttgaggttctggatgatcacgcggatgatctcaccgaagcccagcgtgatgatggccaggtagtcgccgtgcagtcgcagggcaggaatgccgatcaggatgccgaacacgcaggctaccacgccgccgatcagcgtggtgagcaggaagcgggcggtggggtcgatggcaatgccggcggcgaccatgtatttggaggtcagtgcggccacgtaggcgccgatggcctcgaaaccgcagcagcccagcgtcagctggccgagcacgccgatggtgaggttcagggaggtggtcatgatgatggcgatgcacgcggtcatcatgatgcccttgatgtaggagtcggccaagccggattcgcacagcgccatcacgatgccgaacgcggcgaggatgccgatgaagcacaccagataggactgtttggtggaaagcattgtcttcttcatctgatcagaccttctccccttcgttcttgcccataatgccggacggtttgacgagcagcacgatgatcaggatggcgaacacgatggcgtcggagaacgccgaggtgatgatgcccgccgtgatggtgccgatatacgccttggtcaggctttcgatcagaccgatggccagaccaccgatcatggcgcccgggatggaaccaatgccgccgagcacggcggcgacgaacgccttcaggcccagcatggcgcccatcataggcgagacctgcgggtaggcggcgcagtacatcagcgaggcgaccgcggccagaccggagccgatggcgaatgtcagggcgatggtggagttcacgttgatacccatgagcacggcggcctccttgtcttcggagacggcgcgcatggccttgccctgcttggtgaatttgacgaacagctgcaggcccaccatgatgaccaggccgatgacgatggtcagcagggtgtctcccggcagcttgagcttgccgaacgcgatggacggcaggtggaagatggtcgggacggtctggaagtcggcgccgaagatggcctgtgagccgttctccagcagcaacgacatggcgatggcggtgatcagggcggtcatggagttgcccttttcacgcaccggcttataggcggccttttcgacgatcacgccgacggccacgcataccaggatggcgggaatgaccgccacccaggcgggcagtcccatggccacgatggccggaatggtgagcatgagcacgtaggctccgaccatgatgaaatcgccgtgggcgaagttgatcagtcggatgatgccgtagaccatggtgtagcccaatgccaccagcgcgtacacgctgccgattttcagaccgttgaacagctggctgatgaacatgatgatctgatcggtcatagctccccctttctatcaatgttgtggttctctaccgctgcgcgcgtagagatattcgtatgtcttgcgattgatggcgcgatacgcccgcgcctggcgatatccgcatatcgacggctgtccttatgcatccgagcccgtgaaaacacgaaagggagaggaccggcaaaaccggtcgctctcctgttcatgcggaagtcatgctaggacatcgtgattatgcggtgggaattcatggaattcacttgggctgcacggtggtgttgtacaccggcttgccgtccttcatttccagcacggtcacggacttggtcggcgagccggacttgtccatggtgaacttgccggtcacaccgtcgaaggtcatgccggccacggcgttgcgcacatcctcacgggtggcgttctcgccagccttctcgatggcctgcttgatcatgtagatggtgtcgtagcccagagcggcgaacgtgttcggctcggcgttgttcttggacttgtaggacttgatgaagtcctgcaccttggtgttggtgttgtcgtcggcggagtagtgggtggtgtagtaggtcttgttgtactgggacttgtcaccggtgagcttgaggccatcgtatccgtcgggtcccatcacgtagccctcgaaacccacggagcgggcctgcgggatgatgtacgggccagccacggagtagtagtacggagcgtagagcagctcggcgccggaagtctggatcttctgcagctgggcggagtactcggtgtcgtcggcggaggaggagctttccttgtccaccacttcgaggccgagcttttcggcggccttggcgaaggcctctcccacgccggaggagtacggatcgccggtgccgtagagcacggccaccttcttaaccttcaggttctcggcggcgaagcgtgcagccacctcaccctggtaggagtccttgaagcaggtgcggaacaggtaattgccggtttcgatggagtcggaggtggcggccggggcgatggtgaccagcttggactggtcggccagcggggccacggctgcggtggtggcggaaatggtcgggccggccacggcgagcacgttgttgtcgccggcgagcttgttgtaggcgttggaggcttcggtggcgtcgcccttgtcgtccatggactcgagcttgaccttcttgccgttgatgccgcccttggcgttgatctcggagaccgccagctcgaagcccttgacctcggcctcgccgtaagcggcggcggtaccggagttggtggtcacggtgccgatggtgatggagtcgccggaggccttggcactggagctggaggaatcatccatgctgccgccggagcagcccgcgagggacaacgccataacagcggccgcgctggccgcaacgaacttagtggagaacttcacgttcatcctcttccttcttccttgggatatttcaacatcgttcatctgtcaaccaacgcgcgggatgtgcgcgtgagacgttccactcacataattcgcataccacagaactacatcacacggcttgtgaccgtcattcacgtctctctcatccgatgtttgtcgcggactgttataaccagaccggctttgaacccgcaataaattgttcttattatgagacagcgcaattacggaaacgagaatacaatcccaaggaaatgtgggattcgtggggcttaggacactgcaaacaggtagcggtcgcgacccgtccagtcctggccggtcgatgcggcagcgaatccggtggccctggcaaaggccacgagacgatccccctgggtcacgtcatgttccatgacaagcacgcccccaggcttgagaagacggcaggcccgctcgataatgcgctcgggaatcaacgtaccgtccatcgagccgccatacaaagccaattccggatcccaatcacgcacttccggctgctcgggaatatcggtctgcggcacgtaggggggattggtgatgacgatatcgacggtgccgtccaattgggccaatgtggcgaaggacgtggcatccgcgatttccagatggtaattcgaggcaatggatgggtactttttcgcggtttccgacagattccttcgcgtccattcggcggtgttcggcgacagctccaccgcccacacctggctgccgggcacctcgctgacaacggacagcccaatcgcgccggagccggcgcacaaatcgaccacacaaggatggatcatgccgttttttgtcagccagtcaaggccggcctgcaccacggtttcggtttccggacgaggaatgaacactccgggaccgaccttcaggtcaaggtagcggaaaggagcatgcccggtgatgtattgcagcggctcgcgcttggcacggcggtcgagcatggcacggaagacggcaagctgtccggttgtgccaagttcctcccccataagcagagccctgtcgacgtcgcgcagttcaacgcctgccgcctcggcaaggagcaacttggcatcatgctcaggcgtctcaatacccgcttcgcgcaattgcgaagaggcttggttgatgatgtcggtaataagcactggcggtctccgttgatcggacattaggctcccctcagtcagcttcgctgacagctcccctcacagaggggagccatccggcaaagtcatttctgattggccagacggtcggcctcgtcggcttggatgtcggaatcgatgacggcctgcaggtcgccgtcgagcacggcgtcaaggttgtaagccttgtaattcgtgcgatggtcgacgatacggttttccgggaagttgtatgtgcggattcgctcggagcgatcaagcgaacgtacctgcgagtgacgcatgtcggcggcctcggcggcctcctgctcatgcttcatggccagcaggcgggacttcagtacgcgcaacgcggcggcacggttctgaatctgcgacttctcatcctgcatgttcaccgtgattccggttggcaggtgggtcatgcgcacggcggaatacgtggtgttcacggactggccgccggggccggagctcatgaagatgtcgattttcaggtctttcggatcgatctcgatctcgtcgtcatcctcgtcggcctcggggaacacgatgacgccggcagcggaagtctggatacggccctgcgattcggtgacggggatgcgctgcacacggtgtacgccgccctcgtacttcatcgaagcccacacgccgtcttcgggagcgggcgttcccttggcgcggatggcgatctgcacgtccttgacgccgccgagctcggtggtgttctcggactgcacgttcacgctccagccacgcttctcggcgtaacgggtgtacatgcgcagcaggtcgccggcgaacagtgcggcttcctcgccgccggtgccggccttgatctccatgatggtgtcgcgcgcatcatccgggtcacgcgggatcagcgcggtgcgcagcttctcctcgacaccgggcagttcgtcttcaagacgcttggcttcctcggcgaagtcggcgtcctcgccggccatctcctgagcggctgccagatcgtccttcacctgcaaccaggctttgtaggcacccacgatggcacccagttcggcgtgacgacgacccagcttgcgcagcttgtccgggttggacacgacttcggggcttgccatctgttcttcgatggactggtactcctcaagcgcggttgccgccgccgggaactgttcgtctgccataacacactttcttctgtatggtgctgttctgttcgattattcgattgcgcaggtcaatgctgcaacaaaacttgtcaaagaatacaaaaaacgccagtcctcgatcgggtatgccggagcatgccaaatcgaatcggactggcgtgaagtatgctacttgctcttcttgccgtagcgcttctcgaagcgagcaacgcggccaccggtgtcaagaatcttctgcttgccggtgtagaacgggtggcactgagagcacacgtcaacgaacatgtgatcttccttgccagcggtgcgggtcacgaaggtgttgccgcacgagcacgtcacctcaacggggtgataatcaggatggataccctgctgcattttacgtctcctatggattcgggggacccgggtcgtcatgcccctatggcaagacgtgaaccggaacctaagggattgtacacgcctatctggacgtgaagacgcgctgcgccgccgcaggagacgacgcaaaagagtggggccgcaggggcttgaaccctggaccgggcgattatgagtcgcatgctctaaccgactgagctacggccccacgttcgctgcgtaaaacagccaacttgccaaagtgtagcacgagcccgctaatgccggcacgcgcgccatgcacccataccatgcacccgccagcaacaagcagcatctcccggcgctacttctcccccatgtaccccaacgggttctcgatgaaccgtcgcaagcccatttcggccgcgccatatagcgagggatgcagcgccaccggcggcacaaacacgcgaatcttcacattcgggtatcccagaatttccgaacgcagccggccttcaagcacggtggccagctcgtcgccgaagtgcgtccacagtccgcccaacagcaccgtatcgacatccaccagattcacggcggaagcgatggcggaaaccagcgcatcggcggcctgatcgaccactttggccacatccgaatccccggctcgccaacgctggaggaacatatcgatggcctcgctgctggtggcatccccatcctcggcaatgccggcagcctcgaccaaagcgcgacggcccgcaaacgcctcaagacacccgtgacgcccgcagctgcacaacggcccatccatcgccacggacagatggccgatctcgccggcgaatccgtgcgagcccatcaccacttcgccgtcgcgcaccaccgcgccgccgatgccgatatcggtagacaggtaaataaaggagtccgtgcggtccaccacattcaggaagggcgcacgttcggtggcataccccggaatctgagcgatggcggccatcttcgcctcattgccggccaccacatccagccggcgcaccacgttgaaccgggtgaggttgacgttttcccaacccagattgcgggccaccaacagccacatgtcgtcggtgacgatgcccggcagcgcaaacccggctcccaccaccttgcagccgcgtcgtttgagccggctttccaacgggaaagtcatcgcatcgagcttggcgaagatctcgtacgggtcagtgccggtcatatcctcactcacccactcccggccgagagtgtcgccgttcagatcgagtgccaggcaaccgtaaccatcggtgttgatctgcaggccgatgccggcgatggatccgccgcgaatctccagcggcgtgctgggccgcccatatgtggtggaaacgaccggctcgccttcctgcaccacgccgctttcaatgagcatcgaggccaacagcgagagcgtggccttggtcaggcccgtctccttggccagatcggcacgactcatcggtttctgcgcacgcaataaggtgtcgagcgtcaccgacaggttatggttgcgcagatcctcctgattgatcctgcgtagatttgccattggcccctacctcctcgcacccctagtctcgagcgccgcacaggcgctcacatccgtctatcacaccatgatattgtgcgtcaaacgattgaatcggaccgcaccttcgcgtgtttccgtttgcaatcgaacgttgagatacagtatagtttaatcgtctaacttattggctatggcgcgccgaaacttttgagcgcgaccctcatcgaggaggaatgcatgacgagagtactggttgccggcgtagatacgtcaacccaatcaacgaaggtccgcatcacggacgccgccaccggcgaacaggttcggttcgggcaggccaagcacccggatggcacctcggtcaacccggaattctggtgggaggccttcaccaaggccgccgagcaggccggcgggcttgacgatgtcgcggccctcgcggttggcggccagcagcatggcatggtcattctcgacaagcagggcaacgtgattcgcgatgcgatgctctggaatgacaccagttccgccccgcaggccgccgccttgatcgacaagctcagtgcagctccggccgagggcgacgaaccggacgacgtgaccgcccgcggcaagcaacgctgggtcaaggccgtcggatcctcccccgtcgcctcctacacgctgaccaaggtggcgtgggtggccgagaacgagcctgagaacgccaagaagattgccgccgtctgtctgccgcacgattggctgagctggcgtatcgccggctatggcccggtggccgagggcgaggacgctcatctcgaagccctgttcaccgaccgttccgacgcttccggcaccatttactacgatgccgcgcatgacgagtaccgccgcgatctcatcgccatggtgctggcccctgccgagggcgaggaagccgccaaggcccacgccgacgccattgtgctgcccaccgtgctgggcccgcgtgaggcagccgccgtcaaggccgaccccgccattgccggcaaggacgttgaaggcggctgcatcatcggccccggcggcggagacaatgccatggcctcgctgggcctcggcatggccgtgggcgatgtgtccgtatcgctcggcacttccggcgtggccgcggccatcgctgaaaacccggtgtacgacctgaccggcgccatttccggctttgccgactgcaccggccactatctgccgctcgcctgcacaatcaacggttcgcgcattctggacgccggtcgcgccgccctaggcgtggactacgacgaactggccgaactggcgttcaaggccgagccgggtgccggcggcatcaccctggtgccgtacttcgacggcgagcgtacgccgaaccgtccggacgccaccgcctcgctgactggcctgaccctacacaacaccaccaaggagaatctggcccgtgcgttcgtcgaaggcctgctgtgttcccagcgcgactgcctcgagctgattcgctcgctgggcgccgagatcaaccgcatcctgctcattggtggcggcgcgaagtccgtggccatccgcacgctggccccctcaatcctcggcatggacgtgacccgtccggccaccgacgaatacgtggccatcggcgccgcccgtcaggccgcctgggtgctgtccggcgaggccgaaccgccgacctggcagctcaccatcgagggcgtggagaccggcgagcccaccgaagccgtgtacgaggcgtacgccaaggcccgcggctgatacgctgccagcaaatccatgagataacaactgaataacgattcctgatgaatgccgccatggcgagcatcgcgaagagccgctgttataccgcgctcctcgctgaagcacacatggcggcatttttcgtttcccacgcaatccacaaatacggctataatcaagtcgtttgaacaagtctggagatgatcctatgaacgaccgctcccgtatgatgctgtacgccctgaccgccgtcgcctgcgtgatgtggatatggcagtctgtcaaagagtcgatgaacgacggcacgatcatcagcacttcgaacatcatttttctggtatgcattggcatcgcggccatctactgcgcggccaacgcgctaatcctgtggtggcgccagcccagcaaggatgacgcggctgatgacgacgaaaccgacagcacggacgccgaggccgaagccgaacaagccgaagaaaacgaacacgacgacgttgccgacaccgcagacaccgacaccgcagacgccaaagaaaaccacaacccacagcactaaaggaacatcatggatgcaaccacattgtcaataaccctcagcgcgatattggccgtcatctgcacaccttgcggcctgtttctggggcttgttcccatgaaggccgacctggtgaccgccaagcagtcaaaggcctcgcagatggtgagcttcatcgttgccatagtgttcatcggcttgctggtcgcaggccatgatctggagacctgggccatggtaatcggtctggtcatcggcttcgccgttgccaagatccccgcactgcacgcctgggctttgcacaagtggccgttcttcgaacccaagaaaatggctcccacccccaagcgcgtcaagaaagccaggaagaagtaagctctggccttacctattcgctgaaagcgggatatcgacatcggtatcccgctttttcattggccgcacatatccgctgaggcacatcgccgaatcatattgtcgaaatacaccccaagtcagggctgatttcgcgaagaacgtacaccgggatccatccatcgcgacaaacggaaaagggacgctgcgtgcaacagcgtccctttcggaggaggaatggaactcaggtccatccccgtggccaccgggcgggcccggaggccaggtttagctcagcctttctttttcttggagagcaggtcgtaggcgacggcggcgatgacgacgaggcccttgatggtcttgacccaggcggcgtccacgcccatgatggacaggccctggttgagcacgcccatgatcagggcgccgaccatggcgccggggatggtgccgatgccgccggtgacggccgtgccgccgatgaagcaggccgcgatggcgtccatctcgaactcatgccgggcctgtctcgttaagtgtgtaactggcgttttcattgttgtgttccctcgcttggccagcggtcggcgaaggtgatggcaaaggcgttgagcgcgggcttccagcgcgcgctccatcgtatccgtcccttgccggtggggtccagcgagcggacggtcaggtacatgcacttgagcgcggcctgctcgtcggggaagtggccgcgggcgcggatggagcgcttgaatctcgcgttgagcgattcgatggcgttggtcgtgcagatcacgcgccggatctccacgtcatagtccaggaacggtatgaaccgttcccacgcgtccatccacagcctgcggatcgcgggatatctcgcctcccacttgtccagcatcgcgtcgcgggccgccgccgcggcggcggcgctcggcgcggtgtagatgggtttgacatcgcgtttgatggcgtcccagtccttcttcgacgcgtagcggaacgtgttgcgcagcagatgcaccacgcaggtctgcacgatggccagaggccataccgcgcccaccgcgtcgggcaggcctttgagcccgtcgcagatcaggaagaacacatcgtccacgccccggttcttcagctcggtgagcaccgacagccaatagcgtgcgccctccgcggcgggcgacgcccagatgcccagcacgtcgcggccgccctccagatccacgccaacggccacgtagaacgcgcggttggcgacctgcccgtcgcgcaccttgacgacggtcgcgtcgatgaacacggccgcgtacacacgatccaggggacgcgagcaccattcgtccttctcggccacgacccgctcggtgatgcgactgacggtctccctggacacgtccgccccgtagatctcctggaagtgggcgctgatctcgccggtggtcaggcccctggcatacagggacagcaccacctcgtccaccccgggcagccgccgctgccgtttcctgacgacgaccggctcgaacgagccatcgcggtctcgcggcacctcgatcccgaccggacctaccgaatcggtgaccacggtcttggcggtggtgccgttgcgcgtgttcgcggccctgccgtccttggatttcttgtgcttggcgcggcccaggtgctcggtcatctcctcgtccagggccgtctccagcacgcttttggtgaactgtttgagcagtccgtcgggccctgtcaggtccagtcctttttccttggccatgcgcacgaatgtgagcgccgcctcccgctcggcgttgcgtttttccgcgtccggcttcttcgtcggtgtcatgtttccccttgtcccagcagacatcgtccaccagcctttccgaccggccacacgaccggccagttaaggccagttacacacttcgagagacagtcccgttttcagcggaaggagagaaaggagaaagaaagaaggaatggaaaggtgccatgcgggcataacacaacaccgcacatggcgaaattatcgaatcagcccatcgggcgcactggcatcataattgatgtgtacgcgcccgatggagcgaattcaatcggtcagaccgatggtcactcgacctcagacagggcatcaatgatgtagttgttgatcgtggccttgacggactcgaggtgatcggacttggtggcggcgatgagctcggactgcggcttgtcgaggctgtaggcttcgaggtcggccagggtcacgttgccctcgtcgatgtccttgccgatgccggaatcgtaggagctgtagcgctcggccatgaggtcctggatgaagccgtcctggttcatcttgtcggcaaccagcaggccggcggcgtaggtgtccatgccggcgatgtgggagcggaacaggtcctcctcgtagaaggaggtacggcgcggcttggcgtcgaagttcagaccaccgtgaggtccgatggagccggcctgcaggacttcccacatgacggcgacggtctcgtacaggtcggtcgggaactcgtccatatcccagccgatgagcttgtcgccctggttggcgtcgagggagccgaggaagccggattcgcgggccacgcggatctcgtgctggtaggtgtggccggccaggttggcgtggttgccttccaggttcagcttgaagacgtcagtcaggtcgtggttgcgcaggaactcgatggcggtggcggcatcgaagtcgtactggtgcagcgtcggctccttcggcttcggttcgatcaggaactgggcctcaaagccgatttccttggcgtagtcggcgcacatgtggaagaacttggcgatgtggtcggtctcgcgcttcatctcggtgttccacaggttctcgtagccttcgcggccgccccagaacacgtagttctcggcgcccaggcgcttgccgatctccaggctcttcttgagctggccgccggcgtaggcgtagatgtcggcgaacggggaggtggcggcgccggacacgaagcgcgggttggtaaacagggaggaggtgttccacagcagcttgacgccggtggacttcatgttctcctcgatcttgtcgacgaccttgtcgaggttggcgttggtctcgcgcagggtgtcgccttcgggggcgatgtcacgatcatggaagcagaagtactcaacacccagcttctggaacagctcgaaggcgtagtcgaccttggccagagcctggtccatcggatcggtgtacttgtagtacgggcggtgcgcggtgccggtgccgaacggatcaaccagttcctggttgaaggtgtgccaccaagcgacgccgaagcgcagccaatccttcatcttcttgccggcaacgaccttgtcggcatcgtagtaatggaaggcgaagtcttccttcggccccttggcgcggccgacgtactcgatcttgtcaacatcccacagacccatttgggcgctcctttgcagtaggcgatattacggattgcaggaccaataataaaacgaacgaactaagtttgtcaaatgattgaattaataggccgcctctcagcgtgttgccaatcatcgcaatggttttcgaatgcagtcaaggcacaagatagtatgggcaagccaagaaaacgaggctcgataattgacgtcacgcaattcctcgccggccaccgctgaggccggctccatcgcccccgccaactccaacagcaccacccatgccaacaccactgccatggtcatcaccctgatgatcggctcgtttgtggccattctcaaccagacgctgatgatttccacactgcccacgttgatgcatgaattcgatgtgcccagcagcaccgtgcaatggctgaccaccggattcatgctcaccaacggcatcatgatcccgatcaccgcgttcctcatcgagaccttcaccacgcgccagctgttcctgtacgcgatgggcatatttgcggaatgatcttggcgttaatgcactggtgtccggtctggtgatgatgccgagcgacatcgccatgggcatcctgaacccggtggcaggcaagatgcatgaccgtatcggtggccggccgctcgccttgctgggcttcgcgatcatgacgtctgcggctgtgctgctggtcaccatcatgaacacgcacaccgcggcggccatgcgcaccggagtgccggaagcggcggcatcggccattggcgtgcgggcttcgttccgcacggtcgccattgtgtgcgcggtctgtttggttgcgtcactcttcattcgtgatcgcggccgccgacttggacagcagcgttaggcgaatccttcaccgattgctggccttcttgatcagcgcgtccaaagtaccggcttggcgcgcggcttccacatcttcccagtcgagaccggtgtctttggccctcccgtagaaaaaccgcaccagaccggcaaagtccggtttatatccggtttcccggaatgaacgggccagcgaatcaccgatttgcgggtcatcaggccttcgtgcctcatagatcgggatggaacaggatcgccacacgcctctcacatgtgcgatgcgattgacgatcatgccgccgtgcgcaccatcgtattgcgaggcggcatgtacgtccgccacctcgtagacaccaccatgaatgatgtcctcaactgtcagacgacctttgaccgcgctggcatcgcgaatccagaacatcgaagcgaaattggtgtcatcaagttcgcgaaaatcacgtatctcgcgtgtgccgatacgttcgtccttgtcatacatgaattcggccaaggctaggaatggcgagatacctgcgcccggaccgtactgcaattcgatacgtaaatcttcggattcattgccggtcagtccaataccgctgacggcgcagtcataggcaaaccaatcccagaaccaccattcgatcctttgcagcacctgcttcggatactttttgcatgggttcagattcacttcgcgataatatatgcgtctcgcttcggcatagacggcgagattgcagcgtttgaacatctcggctacgtctttggtgtccagcattgctggcaaaccggcattttcggcagtagtagtggttgcggtgctcatggtgtttccccttcatgtgatgtggacggcgggctacgttgcccgccgtgaggcacactgtatggcgctcatgcggtggcccgcaagcccacatggcgaaatggtggataagtggaaaacccaatgattccaaggggtatggaatgtgcataacagtggataccgtcggtggataaccgcactttcttgcaggttatccactgatcgcgcagctgttatccaccgtctctgggttatccacatcgtctctggcgtgtcgtccactgtcagcagtcgatttctgcttcgttttggcgtgtataagtgcacggtgaagtgtataactccgcgcattaggcatatttgctactgagaaaggtcccgaaatcgccttcgaacgcatagctacactcagcagatgtattcagcatggcaatagacccacttaggcaccagcgaatgatttccccccgcttatagagtcggcaaaggcccaacacctgtcccaacgccgacgctactgcactggcagcgtcggcagaggcccacgacttggcacagcaacgacgctaaaaccgcccagcatcgttacacgtccaagttttggccgctaacgacgcttaatgaacgcttagcgtcggcagcaggtcacgcactggttctccaccgacggtagcgctccttagcgaagccagcccgccactctttggcacatcaccgacgctgagagaacctccagcgaagccaaccagccaaccgctggcgacatgacaccacccacacccctcagcgaagccaacctgccagcgcatggcaccccaacaccgctgagaacacccaccccaccagtgcacataaaaaaactggtcatagcggttgcgatgtaattgcatcgtaatcgcgatgaccagcctcggaggggggggg

SEQ ID NO: 892 - DNA, 30111 bp, Unknown
  gut microbiota DNA sequence
aggtggcgtggcgggcgcggaaccgacggttctcgtagttgacctcaatacgtcgataacgcagcgtgcggcgttcgccggtcagggacaggcatccttcctgggtatcgaaggcaccgtccgaagcggtaatcacggggttgagcatcaccgttatgcgcccgccaaggtcttcatccacaaagacgatgatgcgtttgcctacgccaatcatgttggcggccatgcccacgcaccatgaacggttggcctccagcgtgtctacgaggtcttcgatcacctgctcgtcgccgggcccggccgcttcggacggcgtgcgcaaaaacgaccgcgaagtcataatagggcgttgcatgttggaatcacgcttcttcgtgccagtggatgttggtgatgagcgacaaggagatgccggtgccgagcgacatgaccagtcgggcggcgagcagcatcgggaagttgaccgcgagcgcgcccagcagtgtgccggcggcgaagatcacgacggccatgatgaacagggtttggtggcgaacttgcgcaccatgaacggcgagctcgaaatcgatactgacagcaagagcagatagccggtggtgagccactgcaccaccgaagcgccgatggagaactcctccatcagcgtggagtaggcgatgttcagtgaggtttccgacaggatgccgaggaaggtcagaatcgcaagcgagacgaccgcgatgacgagcttgccggaaaagggttgtttgccgccgtgaggtagttgtgttgctgaatcagtcataatcgttgctctcctccattcattcacatgcttttgcgatgctgcgcgtcttcctgcataagccgcagggcttcggtcaatgtgcgcacagtggtttcgcattgttccacggtcagcccgcccaatagctggctaagatgcgcatggtattcctctacgtaaacgcggcggatatctagtccacgctcggtgagcgtgagcgtcaccgcacgccgatcggcggcatccatatgcttgaccaccagaccaagctccaccatctcgccaacgagtttggtaacgctcggcgtagtgacgccgagaaaggcgctgacatcgcttacccgtgcggtgccgatttcctgcccattcgtttcgttgatatgccagacggcatcaatgacgtgtacgtagcgcggtttcaggcctttgggcagtgccggcatcagctcggtgatagccttcgctttccagcagacatccaggaggctccgcacctcattcaccggaagcaagccggtcttggtatcggttcgggaatcgcacatcgctggcccaacctccaattagttaccaatagtcattaccataagtaactatatgcaagctctagacaaacccaacggcctgcgcgcccgtgtcgagttccgtttcgacataaaaaagccagggaatccctggcttgcaatgcacatatcgctgcagatttgccgggacctatatgtccccggcaacaacagccgtatatacgctaccgatcagtgctgccctcatcatccttggcacctgccgtggcggcctcagtctccttggcgttccacccggcgacggcattccaaccactccatccgatgaccactagcaagcacagcgagaagacaatagtggcccaattgaacagcgagccatcgttattggcctcgaccagtgactgccagagccagataacgcaggccaagcaggtcaatgcatacatacgggaggtggagcgcgcggtgagtttcatggcggaaaaagtcctttgattacaagaatgacggcagataacagtgtgggatccgcaccagcggcaccggcacgaatcccacatcgaggaggagaaaggggaaggtcagctcttcttgcgcttggacatgatgtccacggcgacggccagcaggagcacgaggcccttgatggtcttcaccacggcggtgtcaacacccatgatcgacagaccctggttgataacacccatcacgaatgcaccgatcacagcgcccgggatggtaccaataccaccggtaacggccgtgccaccgatgaagcaggcggcgatggcgtccatctcgaactccataccggcctgagcagttgcggaagccagacgggagagcatgcagacagcggccactgcggacaggaagcccatgtggacgaacagcaggaagtccacgcggcgggtgttgataccggagaggatggcggccttgcggttgccaccaacggcgtacacgtggcgaccgaacacggtcttggtcaggatgaagttgtagatgaagaccagcacaccgacgatcaccagcatgatcggggtaccaccctgatcagcgttaccggaggaagccagcaggtaggtgacgaaggcgatgacgaccgcggcaagcacaattttgaggacggtcaggctcatcggctcgggcaccaggccgaccttggccacacgggcgcgcttgcgcagctggctccaggcaaagccgacgatgcacaggatgccgagcacaatggtcagaccatcgaacggaccccaccagccaaggatgttgggcaggtagttacgggcaatgccacggaattcgagggaggtaatcggcacggattcgccgacgatcacggtggcgagaccacggaagatcaacatgccggccagagtggtaatgaagcccgggatgccgatgacggcgacccagaagccctgccagacgccgacgatcaggccgacgaccagagcgatgacgatggcgagcatccagttgactccggcgcgttccatcagcagtgcacacacaccaccgatgaaggctaccaaggaaccaaccgaaaggtcgatgtgggtggcgatgatgaccatcaccataccaatggccaggatgatcacgtaagcgttctgctgaatcagggacacgaaggagttcggcttcagcagcacgcctccggtcaggacctcgaaggccacgacgatgaccagcagtgcgccgacaataccgtattgacgggcattgttggcaaccgtggccagcaggccggtcttttcttctttctttgcaggtgttgcagttgcggcgctcatcaggctgccacctccctttccttggtcatacccttcatcaggtattcctgggtaaatccattcttctcgacattgtcggtgacgacaccgtaggacaccgtgtaaatgcggtcacagataccgatgagctcgggcagctcggaggaaatcacgatgacggccttgcctgcatcggcaagcttatcgatgatttcgtagatctcatacttggcgccgacgtcgatgcctcgggtcggctcatcgaggatgaggatgtccggctgcgagataacccacttggcgagcagcactttctgctggttaccaccggagagggtggagacattcacatcgatgtcatggcacttgatgttgaagtccttgcggtactgttcaacttccttgcgctcaaggttgtcgtccacaaccccgcccttgctgatcttggtcagggaggccagggacgcgttctctcggatgttctgcagcaggttcagaccgttgcccttacgatcctcggtggcgtaggcgagacctgcgtcaatcgcggactgcacgttgggcatcttgacttccttgcccttgacgaacaccttgccggagatgttggaaccgtaagagtggccgaagatggacatggccatctcggtacgacccgcacccatcagacccgccagaccgacgatctcgccggcatgcacgttgatgttcgcatggtctacgatcacgcgctccgcgtcgagcggatgatgcacggtccaatcctcgacacgcaggtattcctcgcccggggtattggaggggtggttcgggtacaggttgtgcagcggacgacccaccatcttgcggatgagttcttcctggtcgagcggcgtctccggcgtcacgtacatcacaccgacggtcgaaccgtctcgaatgatggtgacattgtcggcgatggcggcgacctcgttgagtttatgagtgatgatgatgctggtcacgccctgctcgtcacgtagctgacgaaccaggtcaagcaggtgggcggaatcctcatcgttcagtgcagcggtcggctcatcgaggatgagcagcttcacgtccttggacaatgccttggcgatttcgacgagctgctgcttgccgacgccgatgtccataaccctggtatccgggtcttcgggaagtcccacacgatcgagcagcttcttcgcctcggcacgggtcttgtcccagtcgatcacgccacccttggcctgctcgttgccgatgaagatgttctccgcaatggacaggaacgggctcaacgccagttcctgatgaatgattacgatgccgtcggcctcggaatcattaatagtatggtatttgcattccttgccatcaaaggtgattttgccggaatagctaccgtatgggtacacacccgaaagcacgttcatcagggtcgatttgcctgcaccgttctcgccgcagatggcgtggatctcgccgcgatcgacggaaagattcacatcggtgagggctttgaccggaccgaacgtcttcgtgatgttttccatcgtcaagatggtgtcatttgatgacatgtcatcactcctcgtcacagttctgtgttcatggacatgcggcgcatatcggctatgcgccgcatgtcattgtgtttgtttacggattgcctgatgaggactacttagtcagctcgtcgaagcgatcctgggtgatgtagttggccgtgaccagatcctggaggttgtccttggtgatgttctgggggtcaagcagcttggacgggacgtcgatgttgttgttgttgaacttgccgttcaggccggagacttccttgccctcggcgatctcgacgaccatgtcgtacacggcgtcagccagcttgttcacgtccttgaacacggtctcgccctgcttatccttggcgatgttggcaactgcgatctccatggcatcctgaccggtgatgtacggccaggagtcggtgcccggcttcatgtcgggacgcttggattcgatggcgttgatcacaccctgggcgatgccgtcgtacggagtgaggaccgcgtcgagcttctcgccgtgggcgtaggtggagtcaaggatggattccatgtccttctgcgcctgctcggtcttccagctcatcacggagatcttctgccaatcctcaacggtgaagtccttggtcacgccaccctgaccgtgctgggacggggagacgagcacgcccttctcgaagtacggctgcagcagatcccaagcgcccttgaagaagtacttggcgttgttgtcatcaggggaaccggtgaacagctcgatattgaacgggccggtggcgccatccttaagcttgagctggtcaatgagccacgtggcctcgagcacgccgacctgctccagctggaaggtggcgtagtagtcgacggcgtcggtgttcatgatcagtcgatcgtaggcgatgaccttggcacctgcatcgcgggccttctcaacggcggggcccactgcggtgccgtccttggaagcgaccacgacgatcttggcgtcgttgttgaccatgttctcgatgtcagcgttctgctgggccggcttatcgtcggcgaaggacaggatgaccttgtatccggccttctccagcttggccttcaggttgttgccgtccttgttccaacgctcttcggacttggtcggcatcgaaatgccgatagtggcgcccttttcgatcttggcatcaccgccagttgcctggccgctacggctgccaccgcaggccgcgaggcccgcgcacatggcaacgcctgccaccacggcgacgatcttcttagtgaacttcatttgttctccttcatcttcgaggggatggcgaaccctccttggtcgcccgaacctgaggataacctcaggttcatctcatagaataccgtattgagttaagttgtcaaactcaagaaagcgaatttcctgtcatttatgttcaaccaatgaacgcaatggcgatttttcgcgcatcacaaggcgacacgccgaaaaatccacgctctgcgcctcgctgtgcctcatgccggtaacgactacactgaactcttatggcaacaaggcttttcggttcgcagacctcgcttcgcgaggcaaaccgcgccaacttgctggccagcatccacaagttcggcgccatgacacaggtcgaactggcagaggtgacaggactgtccactgcgaccgtgtccacgctcgtccatcagcttgtcgacgaagaccagctggagaccaaaaacaccgttcgcaacggtcgcagagccactctggtgacccttgcacggcatcagggcctcggcgtcgggctttggatcgcgcgacgtcatcttacgctttctatcgttgacttctcgaagtcaatcatcgctgagcacacgctccccctgccgttgggccacaaggcggacacaacgctggaacgcgccatgctgctcatcaatgagaccctgagcagcatcgacgccgaagccagcgagctggtcggcatcggcgtggccgtggccgcaccggtggccaccagcgaccacaccatagcgattcccggcattctgcccggatgggacggcgtcgatatcacggccccgttgcgcacggcgttcaacgttcccgtatacgtcgataatgacgcgaatttcgcggcatacggcgaatcccgtatgggcgtggcggcaggcaaacgcaatttcgtatatatctcagccaacgacggggttggcgcaggcatcgtcatcaacggcgaaatcatgcatggcgtgaccggcctggccggtgaaatcggccatatccaggtcgacccgctgggtgccatctgttcgtgcggtaaccgcggctgccttgacaccgtcgtggcggaaaacaggctggtgcagttgctcagcgtcacacacggcaatatgacgctggatgatctggtgtcctttgccaacgaaggcgaccccggttgccgtcgcatcatcgccgacacggccgtgcgtatcggtcaggtggcggctgatctgtgcatcagcgtggatccggaggtcattgtgctcggcggcaagctggccatgaccggcgacgtattcatccaaccgttcaatgaagcgttgcagcgcatgctgttccctgatgccgtggcacccatcgatgtactcgtgtcatcccacccgaacgacaactgcgcgctaggcggcgcattatgcgccatcgagttctcggttcgcaatgacgtcagccagtgaccggtaccaggagaagagtgagaagaaggaacacaccatgaggaattcgagcacacctcctctgctgcggctggaggacatctgtgtgaagttcggcttcgtcgaggcgttgaaatcggtgaatctgtccatccaacgccaggaggtcgtcgccatcgtgggcgataacggcgcaggaaagtccactctgatcaaggtcatcgcgggatttctgcagccgggattcggccatatctatctcaacggcgaacaggtgaccattccctcgatcagggaggcggaccgcatgggcatcgcatcggtgttccaggggcaggagttctgcgacaacctggacgtggcctcgaacctgttcctcggcaaggagatcaatcagattggcatacgcgatgacgattcgatgaactcgcgtgcccgttccgtgctgaagaccctgagctcggcgattcgggtcggctcccctatcgcatccttatccgtcggccagcgccagaccgtggccatagcacgcacgctgctcaatgacccgcagcttattctgctggacgaaccgaccgccgcactgtcggtgatgcagtcggcggaagtgctcgcatatatcaagcgactgcgctccgaaggccggtccgtggtgatggtctgccacgatctgccggatgtgttcgcggtatccgaccgcattgtcgtgatacgtcaggggcacgtcaccggcgtgcatcgaaccgtcgaaacgtcctatgaggagattatcgccgaaatcgccggcgtgaccaccgaacacgagtatgaggaaatcgccgagaacccgaaattcgattccatggtcaggcagcggaaactcatcgaccgcactatcagcgcggcagtgagccatggcaccggccatgactcaccattagactaacgccccgttgccggagcggcatcgtcagcgcagagccaggttggcggcaccgatgaggccggcgtcttggccggcggtggcggcgacgatcttggcatggccgcggtaggcgctgccttccaggaaacgctggtagttgtagcgggccggctccagcagaatgtcgccgacggccaccacaccgccgccgatcacaaacaggtccggatcgagcacggcggagactgcggccatcgtgcggccaagccattcgccgatcttgccgaatgcgtacaggccgagcacgtcgccttcctgggcggcctgggagaccatcgggccttccagcttggagatgtcgccgccacacagctccatgagacgcttggcatcctgcggacgacggcgcacggcggacttggcgaagttctccagcgaagtgcccgaggtgtagcgctcggcgcagccgcgcaggccgcagccgcagtggtcgccgtccgggaccatcggcaggtggccgagttcggcggccatgccgaaggagccgcggtacagctgaccgttgatcacgatggcgccgccgaggccggtgcccacggtcagggcgaccatgttggagctgccctggccggcaccgtgcacgtattcgccccagccggcgcagttggcgtcgttctcgacaacgaccggcacggcatggtcgatcagcgcgccgacgtgctcggacaggtcgtagttgatccaggccgggatgttggcggagaaggtgagcgtcttgcggtcggcgctcacgttgccggcggcggagatgccgatggcctcgatatcggtgtgtccggcggccacagcctcgcggtacacctcggcgatgtgctggttgatggcgtcggcatccatcggcgtggggacgcgccagcgctggatgatgctatcgttttcatcgcagacggcggcggcgatcttagttcctccgatatcaatggcgagcgtggtcatggcttactccttgaaggcttgtgtggcgtacgagacagcgaaaatagtaacgagttgccatgacctcccatagcgtatttttcatgatttgtcatatctcgcgcacgttctgccaatgtgaccctgcacacgtttttcaccatttataagcactgttaacgctaacgttgtcattcaatagcaaacgttgtcattcagactatcggcgtgtcgagcagagccccaaggccagcacgaaaccttcggtatttccatgcgatacggcatcggcatcgactgaaacagcttccatgccagagtcgaatggccatcaaacgactaaacaccagacacacattttggcctataaccccatatttcgccctacaccacgaaatacggcaaaagaacaaaaaagctcctgacatttgtcaggagcttggtggcgaccccggccggacttgaaccggtgacctccgccgtgacagggcggcgctctaaccaactgagctacggggccatctgtacctcaatgaagcacaagaggatatactacagcatcactggaccacggcgcgccgcccggcgcgtcgcgccacggcaatgtcaggcccatccattacccctccaagccatagcgacgcccgccattccagcccttccgataccatggtgggcggtggtttggcgtggattcgatcgttatgcggacagggcggcacaggcctgacgcggcgcaccgcgatccgtgattcgggggcgtgctccgcgctgcacacagcgtatccatcacaaactaaagactaaagaaacagcggaatttcaacccctttttaaggagtaactgcacaacatggcagaattcgtatttcagatgatcaaggcccgcaagtcttacggcgaccgcgtgattctcgatgacgtgaccctgagcttcctgcccggcgcaaagatcggcgtcgtgggcccgaacggcatgggtaagtccaccctgctcaagatcatggccggcctggagaccgtgagcaacggcgaggccagcctgaccccgggcttcacggtcggcatcctgcagcaggagccgccgctggacgacaccaagaccgtgggcgagaacatcaagatggcgttcggcccgattgccgagaaggtcgcccgattcaatgaaatcggtgaggagatggccaatccggacgccgacttcgacgccctgatggaagaaatgggcaagctgcagaccgagatcgacgccgccgacggctgggacctcgactcccagctcgagcaggcaatggacgccctgcagtgcccggacccggataccccggtcaacgtgtgctccggtggcgagcgccgccgtgtggccctgtgcaagctgctgcttgaggccccggacctgctgctgctcgacgagcccaccaaccacctggacgccgagtccatcctgtggctggaacagttcctgcaccagtacaagggcgcagtcatcgccgtcacccacgatcgttacttcatggacaatgtggccgaatggatttgcgaggtcgaccgcggccacctgtacccgtacaagggcaactactccacctacttggagaccaaggccaagcgtctggagatccagggagccaaggacgccaagctcgccaagcgactgaagaacgagctcgactgggtgcgctcctcccccaaggcccgtcaggccaagaacaaggcccgtctggagcgttacgaccagatggaaaacgaggcacgcaacaacaagaagctcgacttctccgagattcagattccggccggcccgcgcctgggttccaccgtgctggaagccaaccacatccacaaggccttcggcgagcgtgtgctcatcgacgacctgtccttcacgctgccgcgcaacggcatcgtcggcgtaatcggcccgaacggcgtgggtaagtccacgctgttcaagaccatcgtgggcctggagccgctgaccagcggcgagctgaagatcggcgacaccgtcaaaatcagctacgtggaccagaaccgtgagggcctggatccgaacaagaacctgtgggaagccgtgtccggcggcctcgacttcatcgaggtggccggtgtggaggtgccgacccgcgcctatgtggccagcttcggcttcaagggcgccgatcagcagaagctgactggtgtgctgtccggtggtgagcgcaaccgtctgaacctggccctgaccctgaagcagggcggcaacctgctgctgctcgacgagcccaccaacgatctggacgtcgagaccttggaatccctcgaaaacgcgctgctcgaattccctggctgcgctgtggtgatttcccacgaccgttggttcctcgaccgtgtcgccacgcatatcctcgcgtgggaaggcgacgacgacaacccggccaagtggtactggttcgaaggcaacttccaggcctaccaggagaacaaggtgacacgcctcggcgaggatgcggcccgcccgcaccgcctgcacaagaagcttgtgcgcggctgagatacgccggcattagtgccacaacgcgctttatacgtcgaaagccgtccctcaggggcggctttccccataattgccccatggctgcccgccccgcatcccataaaatcccacagtcgcctacggcaacacaccggcagcgcagcagcaacgtagcggcaatgcgccgcataacccaccgtttaccttccaaacagtctcgttacatttcgctcccggaactcttaacccccaccggatagactgccaaccataggttggaatacgataaccgaatactgaacacagcagaacaagaatcgaggaacgccatggctcaggcaaccaccgtaactccattggaccatctggtgaaggtgctgaagttgggcgagccttccgcttaccgcaatcacacatatatcaatggcgagagtatgtacttccccaccggccgcgtctacggtggccaggtcatcgcccagtcggtgatcgccgcgtccaaaacagtgggcccttcacgcctgccgcattcggtacatggctatttcattgccgccggcgatattcgtcaagacctgttgtttgacgtcgagaaccttcgcgacggccgctcgttctccgctcgtcgggtcaacgtcacccaagccgaggggtcgattctcacggccatcgcctctttccaggagaccggccaagagggtgtggaatttgccgatccgatgccggaaaacctgcccgatcccgaaacgttgacttccgccaaagaactcatgcagccgttcgccgagaagtcgccgttcgccaattactatgccgagaaatcgccgttcgatatccgccacgtgacgccgaccgtgatgctgcgcgcggacaaggattccgccgagcatgattccggcaagcagatggtgtggatgaaggccgatggccacgtcgatgtgccgcaggtcatgcatcgtgcgatgctggcgcttggctgcgatcaggtgatgatggagccggtgctgcgccgcgccggactgtcgatttccacaccgggcatttcctatgcgtccatcgaccattcgatgtggtggtatcaggatatcgatatcaacgaatggcatttgtatgtgcaggatacgcctatcgccgcgcacgggcgcggactcggcatcgccaaagtgtatgcgcagaatggcgacttggtggcggccatcgctcaggaagctatggttcgcgtgccgcaggaatagtggtaatcggcttggccgatggtgtggttttttcttctctcccccagtcggctacgcctacggccccctcgtcagagggggcttatcacggattatcttttgtaggcttgggctatgtcgctacggcgcttggcttccttgattttcgggttttcggggccttcgttcggcggtaactggcacaaccattcgccgataatgccgatgatcatgtcggcgatgcacaccacggccgcgattgcacactcggtgacggcgtgtgcatagaaatccgcctcgatatggctcaggctcatcacaatctgaccgccataccagccggcgagcgttgcgcccgccaatcccagtgcctttgccagcaccagcgtatacaccgcgatagtgggattgatgaagctatgcggacgcttcttggggtcggtattcgcgtatttatgcacttgcagggccaagatcagcacgataacgcccagcacggccagcaatccggtcacaatccaaggcgcaccaatcagcgacagtcccgagctttcgccgtaggaggccagaccgatacccgccaacaggcccagcacggcaccgatcacatactgccaccatgctgttcgccgtgttttcatgtccggcctccttatcgttgcgttgctgtttgctgtttgcgaacggccctcgctcctgggctgttcatcttgatttggttttcgtcactgccgtgcccggctgttcgaggccggagactggtccgtcaccgtctggtttctagcctaccgttcgtaactggttctgccatcagctcaactgttcgacagtatccagttgtccgatagcaatccgacctgtccggcatccggtgccatggccaaaaggaaggccaccgggtcgccgcccagagtagcattcgggtccatatccagccaaggtgccaataccgacgcatggttacgggccgacggccaaggaatgctgcagttgggctcatcggaagtcacgccctccatgtcaacaaggtcaaggtcgactgccagatcatgaacgctttcgatgctgcccaatacggcaatcaggtcggcgggcggcaacttggtttcgatttggatgaccgcgctcatcgcgtccgggccgtcgaaatggctgacatggtagagcggcgaaatgccctgtacctgattgccaggaacactgtcgatggaaacgatggtttcacggaacagccgttcggcatcctgcgaggtagaatccagcgaaataatcgccttgcgtgagacgggtgccgactccgacgcggattcttgcttgactgcatgcccgccgagcatccagtcttcgctctcgagttgcacggcgttacggtccggcgcggtggccagcaaatcggctacaggcccctcatgggctccggcgagtttggcgttcggattcaatgccaaccaaggagccagcacaaacgcacgctgccaagcacgcggatggggcaatgccagatccggatccgcgctggtgatgccatcaaagtcgataatgtccaagtccaacggcctggaatcccaatgattctcacgaattcgtccatggttcgcttcgatgttttgcaacgcggcaagcaattcgtggctgcccattgtggtttcaagctccaccacggcgttcaggaaatccggcgtaccgtcggccatgccccacgcggccgtgcggtaaagcggtgagataccggtcacctgtgtgccaggcaacgcgtcaatctcccgaacggcggctcgcaaggtggattccacctcgcccacgttgccgcccaaggccaccaccgcgttatggatggcatgctcttcagcagtacgtccattatcggtggcacgcacgcgcgagatggagaccgatacatctgcaaaagccacgacgatgggtgcgtgaggcttgtgcacggtgacgtcgatggaggcgacggccggcgcatcggcaagaatctcgtccgcgatacgttgggccagacgctcgatcaggtccacatgagggccttcgatgacagccgtgatgtccttggccacacggccgtaatcgatggtgtcgttgagatcgtcggattgaccggctgcggccagatcaaggtgcagggtgacgtccacgacgaaggtttgtggccgttcgtgttcaaaggcgagcacaccgtgggtgccgttggcatgtacgccggtaagtgtgatggtgtccattggtaaggctttctgctcaaatgctctcctcagtcgccttcggcgccagctcccctcgcccgaggggagccaaggcctagaagcaaccaaaacagggagccaggggaatcatgcgtattcgcgccaggtgttgccggcgatgacggcggcgcggcttttggccacgtcgtgtacgcgcacggcccatgcgccatgttcggcggacagggcggacaaggctgcggtcacgtcatcgcgctgggccatgatcggcccatcagcaccggcagcgcccgcctcggtaagcatcgccgagatgaagcgtttgcgggactggccgatcagcaccggatatccagtggcgcggaaggtctcgagtccggtcagcagcggcaggttgtgctcgatgccgggcttggagaaacccaggcccgggtcgatgataatgcgctcaggctttacgccggcggccagcacaccgtcgacttggcgcatgagttcgtcgtgtacgtcggtcaatacaccgtgctcgtagacggaggtgtcttgatcggggttcgcgcccttggagccggcgagccaaccgcgccaatgctgcacgatgtacaggcagtcgtggtcggcgaccacatgcggcagttcggcatccagcgtgccaccggaaacgtcgttgatgatctgggcgccctcgctcagcgcagcggcggccacggatgcgcgcgtggtgtcgatggacagtatggcaccggccggaatcaatgtcttgacggcaccggtgatgcgggccagttcgtcggcctcggacacgcgcttggcgccggggcgcgtggattcggcgccgatgtcgatgatgtccgcgccggcggccatcatgtcgcgcccgtgctgggccgccttggccgggtccagccacaggccgccgtccgaggacgagtcctcggtgatgttgagcacacccatcaccatggtgtgcgtactgtcatgcaacgcctgcaaatcagtcataggttatctccccttcgttgtttcccttcgctcccctcagtcgcctacggcgacagctcccctcagagaggggagcctaggttgcgtcacttgtcaagaatcaagctcatggcttcggcccgggtggccggattgcgcagcatgccgcgcaccgccgaagtcaccgtgcgcgcggaggatttcttgatgccgcgcatcgacatgcacagatgctcgcattcggtcaccacgatcacgccgcgggcgccagcgtattcgaccagggcgtcggcgatctgctgggtcagtcgctcctgcacctgcggacggcgggcgtatacctcgaccagtcgggcgagcttgctcagccccatcaccccgtccttggcgggaatatagcccacatgggccacgccatggaaaggcagcaggtgatgctcgcacaccgaatacagttcgatgtccttgaccagcaccagctcttcggtatccacgtcgaagtgcttctccagcacatcggccggggaagcctgcagaccggcgaacagctcgcggcacgcgcgggcgatacggtcaggcgtttccaccagtccctcgcgctcgggatcctcgccaatcgacttcaggaacaggcgtacggcttcgcgcacgccttcctcgtcgtatgtgcgtttctcccgctggcaagactctatatattcgttcatctcatctctcccttgtcattgtccacaacgacgtcggcccggcctgcgtacgtgagaaaccacatgaacaggtcgggccgaatcgtcatcgtgtctactcttccggcttcatgccgaccgagcgcttgaggctttcgggaatctccaccggcggcttgtccgagtcggggcggcggtcgttggacagccacaccgggcggaccggcgccttcttgatcggcgcgaagatctccgcaagctccttctcgttcagggtctccttgaccagcagctggcggaccagctcgtcaagaatctcgcggttgtcgttgatgatggtccacgcctcggtgtgggcggtttccaccagcttcaatacttcgtcatcgatcacttcggcggtgcggtcggagtatttgcgcggctgcagaccgtccattacggtggtctgatcgtcgtcggaaccccacttgatggcgccgagcttgtcggagaagccgtattcgatcaccatcgtacgggcgatgctcgtagccttctcgatatcgttcgaggcaccggtggtcgggtcgtggaagacgatttcctcggcggtgcgaccgcccatcgcgtaggccatctggtcgagcagctggttgcgcgactgcgagtagcggtcggaggtcggcatgacggcggtgtagccgagggcgcggcctcgcggcagaatcgtcaccttggtcaccggatcggtgttgttcagggcggcggccaccagcgcatgaccaccctcgtggtatgcggtgttgcgcagctcttccagagccatgcccttggacttgcgcttcggtccggcctgaacacggtcgatggcctcgtcgatggcgcggttgtcgatcaactgggcaccggcacgggcgcacagcagggcggcttcgttgagcacgttggccagatcggcaccggtgaagcccggcgtgcgcacggcgaccatgtgcaggtcgacgtcaggcacgaacggcttgcccttggcatgcaccctcaggatcgcctcacggccttccagatcgggggccgccacgcccacctgccggtcgaatcggcccggacgcagcagggcggggtcgagcacgtcgggacggttggtggcggcgatgatgatgaggttggtgtcgttgtcgaagccgtccatctcgacgagcagctggttcagtgtctgctcgcgctcgtcgtggccaccgcccatgccggaaccgcgcttgcggcccacagcatcgatctcgtcgatgaagatgatggcgggggcgttcttcttggcctcatcgaacaggtcgcgcacacgggaggcaccgagacccacgaacatttcgacgaagtcggagccggccatcgagtagaacggcacgccggcctcgcctgcgatggctcgggccagcaacgtcttaccggtgccgggagggccgtacagcagcacaccacgcggaatacgagcgcccagcgccttgtacttggacggatccttgaggaagtccttgatctcctcgacttcggccacggcctcgtcttcaccggccacatcggcgaacttggtggtgggggtctgcccgtcgagcagtttgccgctgttcttcctgccgctcatgccgagcatgccgccggcaccacccatccggctcatcagccaccagaacagggcgaagaagatgatgaacggcaggatcgaggtgacgaggtagctcagcatgctggtctgctcgatgttcgaggtccagcccttctcgagatcgccgttctccacggccttggccacctgtgcaccctgcgcgaaggtgtagtagaactgcacgttcttgccgtagttggtcaccttgccggtgtcggcattcttcttggtgtagtcgttcttcagcttaaggcggacgacctgcttgttgtccgtaatctcggcgtacgtggccttgccctgattgatcagcgcgaaaccatctttggtgtcgatggttttggtgccaccgccggcgaacatctggaacatcagcacgaccatgaccacgagtacggcaccccatagccaaggggactgccatatcggccggttctcgttgttgttgcctttgccattggtcccgttattgccacggttgaacgggttggtgaacgggttgccgttgttacggttgttgtccgggttcggattattgccgttacccggcccttgcgggaacctcatgcttgcactccttggtagacggacggcttgaggaccgcgatcgaatcgaggttgcggtagcgttcgtcaaagtcgaggccgaagccgacgacgaactcgtccggaatctcatagccggcgtacttcacatcaacgtccacctctcggcgggagggcttgctcagcaaagcgaagacctccacggaagcggcaccacgacgtttcagttctgcgaccagccacgcgagcgtgtgtcctgaatcaacaatatcctccacaatcaagatgtgccgtccgcgaacatcggcggacaaatcctgcctgactgtgacctcaccgctcgacactgtgcccgagccatagctcgacaggctcatgaagtcgatctgtacaggaatgctcatggcctgggtgaacgcgaccagcgtattcacggcccctttcagcaccgcaacgagcagcggattcttatcgcggtaatcctcgctcgcgagagcggccatctcgtggatcttggcatcgatctgttctttgctgaccagctcgtggtcaatatcttcctcaacgtcagcgattcgcatgcgctccatcttggcacacgcgaatgacgtgtttcttgcgattggctgaataacctctgggaagtgagacgccgccttggccatgccaatcgacgaccagccggtcgatggcggcaatctgggcggcactggcgttcacaccggcctggctcagcgcgtgagcgatgacccgcaaccgaatcgcctctggctcacgtgcaatacgtttgacgccgatcatcaggccgatgccatggcccgaatcgttggtatcgtctgcagcacaggctcgtggcgtatcggtcgataccgctgccgacgatgccggccggtcaactgccgtaaccgcctcccccatcacctcgtcggatcgctgatccagatactccttatccattctggccagctgtgcgctttcggcgaaatggcgggtgacattgaatccagcgaatcgttcgatggccggcagcaggtcgtgacgcacccgcgagcgcaacggatagtcgttcggcaactcgccgtctaccgcatcgccattggtggggtcatcccaatattccacacctaagtcttcacagatgccggtggtttcggctcgagtaagggtaagcagtggccgcgcaaaagtcgcgccactgcgtgtgaagacctgcggcatgccagccaacgcatccacgcctcgactgcgcagcaggccaatcaatacggtttccgcctgatcgtccatagtgtgggccaacagcacggcaatggcacctgattcacgcgccgcggcgcacagctcgttgtaccgggcctgccgtgcggccgcttcgaggccctcaccgcgtgcctgcacggttgcgttgcgcacgatgaccgggcccagtcccaacgcacggcaacgatccgcggcctcgccggcgacctgttcggaaccctcctgcaagccgtgatccacaatcacgacaccgcaacgcacgcccatggacgtgcatacgatatggcttaccgcggccagcgccatcgaatcgcgcccgcctgaacaggccacgagcacgagtggtgcatcggcggcaacggcatggtccccatgctgcgcgaattcgggagcctgcacatcgcatagttccacggcgctcagcgttgttcggaccgcgcctacggccttgcgcaatcgtgcggaatatgccatgtactcaccacccttttctggttataggcactcgtgcgtttatggacgtttacggcctttgtagcccttgatggcccttgatgcctcttttacagccccgcgagcttggtgatgaacgagtcgatggcgctacgcgcggcggcataatcctcaggattgttgaccaccacggcaaacgacaacgctcccccattggtacgggacacattgccggccatcgacgtgaccgtgccgaggctgccggttttgacgcgcagcagaccggccacggcatcatccgtataccgatcctgcgccgtgcccaccaaccccgcgatggatagaccttccgcaccagcagcaccgctctcggtggtcagattacgttgttggacggccgccagcgtgcgtacggtgagccgggagccgggagacaggccggagcaatcggccatggtcagaccggatgtgtcgagaccgagatcgttcagagtggatttgaccgcctccgtgccgccttcaggactgtttgtcgctgatttcgccaaggcggtgagtctgccgaactcctcggccagcgtattgtccgaatgccgcaacgtgtatgccatgatttcggacagtgttgccgaactcaccgaggccaaaggcgtttcgccggatggagcggtgtttgccgtcacgtctccggtaacggccacaccgttcgattggagcagttcggcgaatttcgtggccacgtcgctggcggtgtgctgggacagttccgggtatccggccgaatcatcagggtcggccggcgcaggcgtatcggcggtgtattggcggcctccatcaatcgccattgatgagaccggcgtgaagtagacggtgtagtcgcttaagaccgcgccgccttccgacagacctgcgggaatgcgtgagtcgccgaatagggtgtcgtcgtactcgagattgacggaagtgatgcctcgctgggcgagcgcggccacggtggccttggccaaggtgttcagaccggcacgtccgttggtatggtttgcgtcggaatcgcctgcagacagcagcatgtcgccattgcctttgagggtcaacgtattggtgccgtcatcggattgggtcaggaacacttgggtatccaaggtggatgccatgttcagggtggatgaggcggcgagcgcggtcagcgttttcagtgtggatgcaggctcgcgtggagtgttcgactcatgttcggcagcgacggtgccctgggcgtcttcaatgatcaccgacgcatcgtttcccacgccttgcgcggacagcaattcgttgaccagcgcagaagcggccgtggaatcaatggccttgttcgcgttcaaggtgccggcgacggtgccgcctgatttggcggtggctggatcggcaaaaacaggtgcggcgacgggcttcaacgtcaataatccgggggccacgtcggtgatgtcggcggcgcagtaccccgcgaacagggcgatggtggtcagtgcggaaatgatgacggtcagtgttcggcgatgcgatcgttgggtccgccgttgcgcttcacgccgctgacggcgtgataccgctgtagataccatcgtgctccttatgccaaggcgatcatttctgcaatgaggcgaacgagtcgagtgctgccacaatcgaaagcattcgcgcatccatcagcttaccgcccagccatgtcccgagtgccaggatgccgatgccgttggccagtgcgaccggaataatcgccagccatatgccgccttcggctcccgtcagcagcatgaccagcgccacgatgccggtgggcagcatcagcagcaggctgccaagcacgtagacgaacgggaagaagccttgggccatggcgcggccttgaggcgcggagaacggcttgtccattgaggcgaccgggtacatcagcacacaggacgtgacttcggccacgcccaggccgctcaaggcgacgcccatgcccacggcgaggaagatcaggccggtgacgaggtcatcgggctgcgcccagcggccggtcagtgcgccgaccagcacgatgccggcgagatagagcagcaccatgtagacgaccatgatgccgacgtagacgcgcacgcggccgattctgtcggtccggccacgcacgccggcgatgacttccatggtgaagccgcggccgtcatatgcgagcccgttgctttccaccactgacatgaaccagccacaccagatcagcgactgccagacgaccgcgctgatgccgtgcgcctggaaggcgaagatgatcaggaacaggaccggcatggcgaaggtcatggcttggcgggggtctcgtttgagataggtgatcaggcgtgcggacaccgcgccggatgccgaatcgggcatccatgcgaatgcgccgatgcctttggcggtctcggacggactgtttgcgccgatggtgagccgttcatgcctcagacaccaagtgcatacggcgaagcagacgatccatgtgacggcaaggatggcgatgcgggcgatcagcaccgcccaagctccggtaagcgcgtcgaacggcagttggaaggccgcaccgaacggcgtccatgcggcgatggcggtcgccgcgccccaggtctcggtgttgaggctgaaggctatgccggagttgaccagaatgttcggcaactggcagatgatgacgaaagtcagcacgatgaagatgtagaacgcgcctttgccgcgtttgccggtcaccagcgtggtggatagggcgatgaccagtttggagatgctcatcatggtgatgacggccagcactgcggcgaggagggaactgatgattacggctggtcccatatgccgataggccagtgtccagagcatcagtgaggccacgccagtaagggaggggatgccggacaggccggaaagcagcaagccgaattgcaggttgcggtcggcgatgccgtagatcgcgaatttgcgtgggttcatggtggagccttcgccaagcatcatgagctggatgaagccgatgaagatggtcatggtcgcgccgaccagcacgacgactatgttgacgatgcctccgggaccaaggatgttcagcggaaagccatccgcgttcacggtgaagggcggcagtatgccgatgaaccatgcgagcacgccggtgccgatgatggtgccggccgcgagtacagcggaaaagacataggcgacggtctgccacgccgattttcgcagggtggcgagcgtgagcgtccagcgcaggcggaccagggtgatggcggtcttgatcattggcgggcctcatcggtgggtgtggcgggcgtaggcagaatcggctgaatcgtctgggccgaagttggtgcttgggcttgggcctgcccgccatcgagccacgcgagatgggcggcttcgtggcggccaccgactagttgcaggaagcggtcttcgagttcttcgccagcagcgacctcgtccaccgtgccggccgcgcataccagaccgtcgttgattacggccacatgcgtacacatcttttcgaccaatgccatcacgtgtgaggagatgatcaccgtgccgccagtcttcgcgtattcgatgagaatgtctttgaggttggcgctggacaccgggtccacggattcaaacggctcatccaagaccagaatgcgcgggctgtgaatcatcgcggaggccaggcagatcttcttggtcatgccggccgagtaatcggtgaccatcgtgttggcggccccggccaagtcgaaagcattgagcaggtcctgggcgcgacgcgtggtctcctcgcggctcatgccgcgcagcatgccggagtagacgagcaattgcaaaccggtcagtcggtcgaagatctggtcgggctggggcatgacgccgatcatgcgcttggccgtgttcacgtcgctccacacgtcatggcccagaatcatggcggtgccggcgtccggcaccaatagaccggtcaccatattgagcgtggtggttttgccggcgccgttagggcccaccagtccgtagaacgagccgattggaatgtcaagcgcgagcccgttgacggcgatcttccggtcgaagtgcttgaacaggccgcgaatggacaccgccgtattcgggttcggcggccatgcttgcggctgtggctgttgcgactgcgaagacgcgggagcggcggctggcatcatcggcggctgaaatccgacattcctttgagtattgtctaagctcatgcatctactctagcccaccagtcaaccctcagcgcagcacccccgggttgctgttggattgccccgctgagcagctccggactagcggactcggtcagcccttatgtgcgatgggcttccactgggctttggcgaagatggcctggaaggaaatcggcacgtagctgagcatgtaaatcgggaagctgagcacataggcgagcagctccttgttcgtggcaccgatctggtcgtgctcgacaatgatggtcaatgcagccaatgccatcagacccaacaccgatgtgatgatgccgctggaccaaccggccagcgattgcagctggctcgaccaactcacgaagccacacgcggcgaacagcaagcccatcaccgcgcgaatcacgcccaacacggtaaacggacacagcatcaaggtgaagtcgatgcaggagaaatcacgttcgcgaaccgcgcgtttcagcaatgccgagccataataacggaatacctgcaggaatcccttgctccaacgcaaacgctgacgccaactttgcgagaaggtaaccggctgctcgtcgtagaggatcgcagtaccgcaatagccgatgcggtcgccatgcagaatcgaatccatagtgaattcaagatcttcagtgagcaggtggaacttccatcccttgttccgcttcatcacctcgcgggagaacatgaatcccgtaccgcccacatggcaagaggaaccgagaatcatacgcgagttagacaggaatcgcgattcacggatgaaccacagcgcagaaccagaagacacccagttatccgccagattcaccgaattacggtagctggtcagaatcttgaatccggagcagaacgccttgttcatttcctcgaagtaatgcttgtccagcttgttatcggcatcgaacacgaagtaggcctcataatcatcggccacaccgatgtcgagcatatgccccaacagatacgtcagcgcatatcccttgccaaccagttcaagattgtggcgttccaccacatggcagcccaaagaccgcaccacgtcggcggtgttgtcggtgcagttgtcggccaccagccagatgtcgatgaggtcggacgggtaggtctgatcgcgaatcgacccaataaggttgccgatcacgttttcttcgttgcgcgcggagatcagtacggcataccggttggtcatcggggcgtcggggaagcgcacgggcttggcgaacagggacatcacgatgcacagtccctgatatatcatgccggcaccaccgacgattaccagaagaatatcgagtacggaaagcagggtcatcagcgccaccccgccctaggattgctggaggcagattgatcagactgcttggtttgcttgcgttgcttgggctgctcagactgctgcgtatccgcggcaccacgctgcggaatcgccacggtggcggaatcgtccaaatcggattctttcgtctcgtgtggcggaatcgcatagatctgttcctgcagcaaacgcagttcctcattcatcggcacacggctggtggaccccttggccgcacgcggcatgtgctcgccgatcggctgcagcacatgctcgccgaacgcttcggacgcctcgacgatcttggacttcttctccggagtcggatcgttcatcagtggtgagtcaatcagctcatagcgcttggtgtacgcacggaagatggcctgcagcgatgcggtgaccggcagcgccaggaacgcgccaaacgcgccgaacagcgagccgaacgccagcaccgcgaggaaggcgacggccgcgttgatatccatcgtgcgctgcgaaatcctcggcgagagaatcaggttctcgatctgctggtagacgatgatgaacaccagcaccgccacggcgtacgtccatccgcggttgccccaagcgaacagcaccggcagcgcgccgccgatataggtgccgaccgtggggatgaactgggataccacgccgcagaacagggccaacggcagccagtagggcacatgcagaatctctaagaagatggcagtgcaggtggcgttgatcaacgccagaatcgaacgggagaacaggaaggacgaaatctggccttgggccacggtccacaccaacaggaatcggcgctgcgtgttgggagccagccactggcagaaggagcggcgcagtttggggccggcggcggagatgtaatacgtggtcatgaccacggtcatgaggttcagcaggaaggagaacaggccgcccaccgtactcatggcggtaccggcaaaatcggtgacccacgaggtctggatattgttgaagatttccatgccgagattgctgatttccggcatcttgaacgtggcatactggtccacgaactcacgaatctgctcatacatggccggcaaaccgcggaccatggcaatcatctgctgtacgaacatgttgccaaatagcgtgagcagcacacccacgaccacggccacgcccaccaagctgacggcggaagccacgccacgcttccagccatgagccaccagcgccaccaccaacggttcgacggccagcgccaggaacagcgagatgatgatgtcgagcaccagataggagatgtcgccccacgagcgccagcagaacatgaatacgatgacggcgagggccacatacagcagcgcgcggccgaaccattccggtggcctgcgggaatctcccttggcggggaacaaagtaccaaagtcgatacgattctcgtcgtccgggtctgccccggcctctgcggcaccggttctcgacgtgtcggtgctgtttacgtttcgcacgcgttcgctcatggctccccattgtagcgaggggtttgaagctcggatacgccggcggcgtacacccgcttttctattgttgatgttatgctcaacgtttcgatcatcatcccagcgtggaacgaagccgaacgcatccgcgactgcctactgaacgccacccgtcagaccatcatgccgcatgaggtgctggtggtggacaaccgttctacggacaacacctgtgcggttgtcgaacagttcattgccgaacatcccgaggccccggtcaaactgttgcaccagaacgatgaacaggggctgattcccacccgcaactttggcctgaacgccgcgaccggcgatgtgctgggccgtttcgacgccgactgtatgatccggcctgactgggtggaggtggtctccggtatcttcaccgaagacccggccgcgatgggtgccactggtccggtgatgtattacgacatgccctcacgccatttcgggttgaaaggcgacaattccttacgcaagcgaatctaccgtgccgatggcggccagccgctgctgttcggctcgaatatggccttgcgcgcttcggcctggcatcagattgtgaatgaggtctgccgggataaggccgatgtgatgcatgaggatatcgatatttccctgcatctgatgggcaaggatctgaaaaccgtgtactcgccgcgcatgatcgccgcgatgagtgcgcgacggatggatacgtcgttgagttcgttcctgagctacatgcgacgttttaagaatacgtttgatgcgcatccgcaacatacgcgcacgcataagccggaggtgttgttcaccgccatgtatccggcgatgcatatgttctacccggtgtggcagaaagtgctgaattccgcggatatcaatccggctgaagccgcgtggatcaacgagcagatggaactggcggaggcgcaaggcaagcagctgtacgacgagacccccaccgacgaagtctacgacgaaaagcacgaaaagtagctagatatacgagccccctctgcttatgcaagctccctctgataagggagctgtcgaatgaagtgagactgaggaagagactgcgacgcagtcgctaaaacattgaatcggacgcaggccgatacctattattcagcggctacgccgcaacttctctccctcagtcagctacgctgacagctccctcatcagagggagctaatgtttactgtcattgactgatcacatcagcgacttgtaaatcgcgaggatgtcctcttcggttgcctgacgcgggttgccgggggtgcacacgtcgttgaaggcatcgtgagccagcggctcaaggtcggcctcggtggcgcccacttcggaaatcgtggtcgggttcttcagatccacggtcagcttgtggacggcctgcacggcctcttcgcgcaccttctccaggtcgccggtgtaggcgtcctcaacaccgaacgcatcggcgatgtcgcggtacttctcaccggtgaagtccttgttgtattccatgaccggggccagcagaataccgttggccacaccgtgggccacgcccagacggccgcccagcgggtgagccatgccgtgcaccagaccgaggcccacgttggagtaggccataccggtgatgtaggacgcgtaggccatctgctcgccggccggaatgtcgccgtcggcggacttggccaggttcttggcaatcatgcggatggtctgcatggacaggcagtcggacaggctccaggcacccggggtaatgtaaccctcgatggcgtgggtcagggcgtcaagtccggtggcgaccttcaggccgcgcggcatcgagtcggtcagatccgggtccacgaaagcgacgatcgggatgtcgtgcgggtcgacagccacgaacttgcgcttgttggccgtgtcggtgaccacgtagttgatggtcgtctccgaggcggtgccggcggtggtcggcacgccgaagatcgggacggacgggttcttggtatccgcgacgccttccagagaaagcacgtcggcgaactccgggttggcggtgatgatgccgatgcccttgcaggtgtcttgcggggagccaccgcccaggccgatcaggaagtccgcaccggactcggcgaacttggcgacgccgtccttgatgcactcgaccggcgggttcggcttgacgttggagaacacctcgtacggcaggccggcctcatccagaaccttggtgaccttctcggcggtgccggtctccagcagcaccgggtcggtgacgataaatgccttggtgaagccgtgctgcttggcgacggccggaatctccttgatcgcgccacgtccgaa

SEQ ID NO: 893 - DNA, 99095 bp, Unknown
  gut microbiota DNA sequence
ttgacgaccatccacgcgatcgccagcgcggccgccaccgcggcaaccgcccacggcgcaatcagccacggggtctcgcgaatccgcgcatatatccaacgggacgcatccgtgccgtattcgatgccgagacggtatacgacaaccagcaatcctgaaaccagaccaatgactatgccggccgccgccatcttccacttcaagtggtcgaatcgcggaatcagccggcggatatcatgtgccgcgtcgttaccagtcaagccgggaaattcgttgcagacggtcagtcgaccagcgaattgatctggatgacatgatcgcgctgcggaccggtgccgatcgcggagatacggcagccgctcagctcttccaaacgcttgacgtaggcctggcaggtggcaggcagctcgtcgaaggagtggcagttggagatgtcttcatcccagccgggcatggtctcgtaaatcggcttggctgcggcgaaagcggcctgatcagtcggcatatcgtcgtgacgttcgccgtccacgtcgtaagccacgcagatcggaatctccttcaggccggcgagcacgtcgagcttggtgagcacgatgtcggtcaggccgttgacctgggaggcgtaccggttgacgactgcatcgaaccagccacagcgacgcgggcggccggtggtcacgccgaattcgtggccctgctgacgcagccattcgccggactcgtccagcagttcggtggggaatgggccttcgcccacgcgagtgacgtaggccttggagacgccgactacgcgggtgatcctggtggggcccacgccggtgccggtgcaggcgccgccggcggtcgggttggaagaggtgacgaacgggtaggtgccgtggtccacgtcaagcatggtggcctgagcgccttcgaacagtacggtcttgccttcgtcaagcgccttgttgagaatcaggccggtgttggccacgtacggcttgaggcgttcgccgagcttcagcagctcctcggtggtctggtccacgtcaatcggacgacggttgtagagcttgaccagcatctggttcttctggtgtaggctggcctccaccttgtcgtgcagatggtcggcgttgaacaggtcatgcacgcggatgccgacacggttgatcttgtccgcgtaggccgggccgatgccacggccggtggtgccgatcttgtgcttgccaaggaagcgttcggtcaccttgtcgagtgtgcggtggtagggcgcgatgatgtgtgcggcctcgctcaccttgaggtgggagcaatcgatgccgcgggattccaggccgtcaatctcctcgaagagcacttccgggtccacgaccacgccgttgccgatcaccggggtcaggttcgggttgataataccggaaggcagcaggtgcagggcgtacgactcatcgccgaccaccacgctatggcccgcgttgttgccgccgttgaagcgcgcgacgtaatcgaccttggtgccgatcaaatcggtagccttgcctttaccctcgtcgccccactgagcaccaataagaacaattccaggcatgatgcacctccgcattcgcacgattccgccggaaacagactaccgtacaccctctaccctgcgaagtttcgtctcacgcagggcgaggctggaggtgcgacaacccggaatgggtgacgaatttctactcgtacgaggcgatgctgtgaccaatcgcacagcgcacaggttgaagaacggggcctagagggcatgcctcgcgcgataatgaagccatgacgatcgcaacaccggaacgctatgccgaaatgctcgaggccgcccgccgaggcggttacgcctatccagccatcaacgtaaccagctcacagacactgaatgctgcgttgaagggcttcgcagacgccgagtccgacggcatcatccagatttccgtgggaggcgcggcctacgtctccggcaggggggtcaatgatcgcgttaccggctcgctggcgctggcggctttcgcacatgaagtggctgcgaaatacccgaacatcaccatcgctctgcacaccgatcactgcgccaagcagtatctggatgagtgggtgcgtcctctgctcgcgcatgaggccgatcaggtggcacgaggccaggagcctacattccagtcgcatatgtgggatggctccaccgtgccgctcaaggaaaatctggacatcgccgaggaactgctcgacaagtcgcagaaggcgcacaccgtgctcgaaatcgaaatcggcgcggtcggcggtgaggaagacggtcactccgccgaaatcaatgaaaagctgtattccactccggaagatggcctcgaagtcgcccgccgactgggtttgggcgaacgtggccggtacatggccgctttcacattcggcaatgtgcatggtgcctacaagcccggcgtggtcaagctgcgtccgtcgctactcggcgacattcaggcgcgtgcggcgcgcgcggtggccgaaggcgagttgcctagcgcggccggcatagtcgatttccccaacggcaagccgtttgagctggtgttccacggcggctccggttcacgcccggaagaaatcgccgaagctgtaagctacggcgtgatcaagatgaacatcgacaccgatacccagtacgccttcacccgtccaatcgccgaccacgtgttcgagaactacgacaaggtgctgaagatcgacggcgaagtgggcgagaagaagttctacgatccgcgttcttggggccgtaaggctgaggattccatgtccgcccgcgtggtcgaggcttgccggcagctgggttccgcgggcaaagcgctcaaatagcgcgtagttttgcgatcgtgcgcgacactttcccggaaataatgaaaatcattgaaaatcaatggagcggacaacgggagtcgaacccgcctctaaagcttgggaagctttcattctaccgatgaactatgtccgcatgccttacggctgctgcacctcacgtgacaagcatgctcagccaaacgaggcacgaatagttatcctagcacgtcacctgccgacgcgcgtggagtaggtgggcggagcgatcggcgtgccgttcatttcgttggccatctgcatgagacgcgctatgcgctcatcggtcggcgggtgcgtggagaacaagcgcgagaaaccgaccgcggagaacgggttggcgatcatcattgcggagacggactgggtgccggcggttttgcgcatcggcgcggtctgtgcgccgtaggaaatcttgttcagcgcggaagccagggcctcgggatcgccggtgagcaagctgccgtcttcatcggcgtcgtattcgcgggtgcgggagatggccatctggatcaaagacgcggcaatcggcgcgagaatcacgctcagcaatgcgccgatcaggccgaggccaccggaactatcgcggtcgtctcgcgagccgccaccgaaatacatcagcgaatagcccagataggagatgacagtggccatggcagaggcgatggcggaagtcaggatgtcgtggttgtacacgtgcataagttcgtggcccagcacaccacgcagttcacgggcgttgagaatctgcaggatgccttgggtgcagcagacagccgcgtgccgttcgttgcgtccggtggcgaaggcgttcgggctcatggtgggggcgatgtagatgcgcggcatcggcttgccggccttggcgctcagttcacgcacgatctggtagatttccggggcttcctgttcgctgacttcccgcgcacccatggaggcgatggcgagtttgtcggagaaccagtaggtgccgaacgtggtaatcaggccgatgacgatatagatgctcagggtttgccgactgccgcccgtggcccaccaaatcagcatgatgatggcccacatcagggcaaacagcagcgttgttttcaggccgttgaaatggccgtgcacccgtactttggcatccataatgcacacactaaaatcgcaggctgaatgattgctggatatacgccgcgagaaatgtcccatattcgcccggcccgtccggccccgagcccggccgcgtccgcacggggcgcggccgggtggacgaataccggacgggcgtgggcgaacgtcaggccagggcgagctcacgcatctggtcgggctcgatgaccttcttgtgctcgcgaccttccttggcgccctcggcgcgctcgaaggcgtcgaccttcttccagccggcgaagtcgatcgggcgaatgccgcgctcggccagcagtcgatcgatggattcgggggcgcggtcggctgccacgcggccaccttcagcggccttggccagatcctcgagcatgttggtcacgatggcgagcgcatcggacttggtggagccaatcagacccaccggtccgcgcttggcccaaccggtggcgtacaggcggtcgcgcacttcgccgccgtcggcctcggtggtgatgcggccgtcgccgttggcgttggccaggtgagcgccgtgctcgtcgtaggtgatgccgggggcttcggcgggcttgtagccgatggcgtggtagacggcctcgaccgggtagtcggtgaactcaccggtgcggtgcatcttgccgtcggcaccggtttcggtgcgctccacgcgaatggccttgaccttgccgtcctcgccgaggatctcggtgggggcggagttgaagtgcacgtagtactttcggtcggccgggttgccttcgaagtcgacgtcgccgtcgtcttccatgtcttcggccatctcgcggatggcgaacagctcctcgaccatctggcgggtgagcttgtccttgccggccacctcgatggtctcgtcgtccagatcgaagtcatcctcgttgatgatgagctgcacgccgggcagcttctccatctcgcgcagttcctgcacgctgaacttggcctgggccacgccacggcggatgaacaggtggagcaccttggccttgttctggccgatgccctcgtacacgttgtccggaatgtcggtcttgaccttgaggtcgtcggcgttgcgcatgagttcgcgggccacgtccatggccacgttgccgccgccgattacggcgacgttctcggccgtaagcggccattcgcgggcaccggtggggtagccgtcataccattcgacgaacttggcggcgccgtacacgccttcaaggtcggcaccgggcaggttcagcggcttgtccttgaccgcgccggtggcgaacagcacggcgtcgtaacgggccaacaggtcgtcaagagtcacgtccttgccgaattccacgtcgcagtagaggtggatgttcgggttgtcgagcgtcttctcaagcgcggaggcgatgaacttgatggacgggtggtccggggccacaccgtaacgcaccaggccgaacggcaccggcagcttctcgaacaggtcgatgcgcgcttcggtgccgaggccgagctcttcgcccagcttcttgagctggcgcaggaagatatcggatgagtagacgccggccggaccagcgccaattacagcaatgcggagttcagtattcacagattcagtcacgcgctctagcctaacgcaaagccttccgttgcaacagagggcgagtggtgggaattctgtgtattaggccatagtttgtgcgtttgggaaacctacgagcactgctaatgtcagattatgggtttccctattggtcaagttattgccgttctcattccaagaagcatgcaaggcggatcaggcccttactccggatacgtttatgctgcaaggcggttatccacgcatttatgacacgagaatgccgctcaatctgttcttctcgaactacatcgacacttatatcgaacgtgatgtttccgaatatcttgatgtacgcaatttggctgaattccgccgattcttgactctttgcgcactcagttccggagcactcataaactacaccaacatcgccaatgaacttggtgtaagtccgcgaaccgtaaaggcatggatgtcgattctggaatcaagttacatcgcattccatctcatgccgttctacacgaacgcacgcaaacaggtggtcaaaacgccgaaactctatttttatgacactggcttgctgtgtcatctcttgggcattcggacggtcgaagcactggttgcgcatcccaagttcggcgatatatttgaaaacctcatcattgcggaaaccatgaaacagcatttgaacgccaatcaggagccacaattattcttctaccgcgatgccagcaaggtcgaggtggatttgttggatttcaccgatcctaacaaccgtatgctcatagaaatcaaatccggacaaacctatcatgaccggttcgcccgccatctcactttaattggcaatgttctcggtataccgtgtgagcaacagtacgtaaccagtcgggttgagcatagttatgtctcacaaggaatccgcgtcacctccacccctcgattggctagaaggccgacggtaaagagccgccgcagagcagtaggaattctgtgcaatcagtgaatcccttgaggcattaaagacgtcacctccaacggctctttacgacctcgattgcattcattaggtcatttcttcgtccattaggtcggagggtgctgaagccatcccttggaacggcggggtttcaagggccgctccgaccaaggaccgacctaataaacgtcaaatcgacctaatgaataactccgatgctattgctgctttcgtgggtgggatttccgtttccgccacgtcaccaaccgtatcgccccgattatgtttcgatgcggtggactcgacatacgaccatcccggtcagtcaactgacctacaaaaacagcagaagcctcatattcttaatcagtcccgatcaattagggcagtgagggcccagaggatgctcaccacgtcgatggcctcctggaggaaggcaccgacgacgaccgggataaggttgaacgcggcggcaatcatgccgatggtggcaagcacaaggcccgcgattacggcttgaagcatcacgcgcttggtgcggcgtgcaatggcgatggcgcgcggcacggcggcgatattgtcattcataatgaccacctgagcgctttcggaagcggcggtggacgtgccatcggtcatggccacgccgatatcggcaacagcgagcaccggggcatcattcacaccgtcaccaaccatcatcgtgacggttttgccggctcctgtagcggccctgactgcggctaccttatcctccgggaacagttcggcgtgaacctcgtcaatgccgacttcgctggcaatgatattggcggaagcccgcttgtcaccggtaagcatggcgagctcggtgacgcccaactcatgcagtttggcgagcactgccttggcgttggcacgcggcacatcgcgcagcacgatgcgcgcgatcagccggccgtcaacggacacgtaggacgccatctcatccggctgcagcaggccaaagcgagtgcgcaggtcatctttttgctgagctccccctcttagggggagctggccgcttcgcgggctgaggggggcagcctcgccgaccgccaggaatccatcctccccagcagccgcgaaagacagccggccaacgcgcaccgcgtgtccgttcacctcgccggaaacgcccttgccggcgtcttcattgatgttcttgacgaccggatactcccggccatggccaggccagctggcctccggctctgggcacaggcgctggccatcctcgaaccgctggcgcagtcgggccagcgcctccgcgccggccttggcaatgcctttggacaggatgtgcaccgagtagctttccaccgcgccggccatcatcagcacatggtcttcgttgagacgggttgcagcgccgggcaacatctcgacgcgcaccacctgcggctgcttgacggtgagcgtaccggttttgtcgaagaacacctgcgtgacgcggccaaggttttccagcacgtcctgtgctttgataagcacgccggctgcggcgaggcgtccggttccggcgatgtatgccaccggtgcggcgatgagcagcgggcagggcgtggccagcaccagcacctgggcgaatcgcgtcggtaccccggacaccgcccatgcgacgccggcaatcaccaacgaaagcacggtaaagggcacggccaagcggtcagcggtttttaccacggccgggcgcgactcctgcgcggaggccacgagctcgaggatgcgctggtactgcgaatcggcggccacctgggtggcacgcatggtcaatgcagtcgagccgttcaccgccccggacatcacacgggcgccggcgaacacttcacgcggcaccggctcaccgttgatattgctcaggtcgagcgtggccgtgccggacagcagctcgccgtcaaccggcacagtttcgcccggcaacaccatgagtacgtcgcccagctgcacctgctcgaccggcaccgtgtcgaagcggtgcgcggcggcggcagccgatgccaagcccacacgccggaagccatcggacgaatcgcccttatcggcagcaaacccacgccccacgccaggcaggttgacgacgtgcgcggtttgcggcgcggcctccatcagcgcggtcaggctgcgctcggccttggcttgagcgtattcctcaatggcctcgccggacgtgatcatcagcgtcaccgcccaacttgcccagtattcggcgacggccacggtggagaggatcgcgaccacggccagcacatcgactccaacctgcccatgacgcaaatcgtcaatcatgccgcgcacagtgtcaatcacgataatcagcaccagtgcgataaccagccactggccgaagcccggattgccgagtaccggaatcgccatcgcattgccccacggacgccaatcgcctagtaaagccaacggaattgcggcgatgacgacgaccggaagcatcggcacaagcttgcagatgtcgagaattttggtgaagaatctgatgagtctgctcatcattgctccttacgctcgtatacggagtcgattgcggtacggcaagcgtggcccgcgcaatcggcgctacggtcacgccttgttaacccaccggcggctttgcctggggcttcgctttgctcggctcccgcgcaaccttccgatacacggcgtaaagaaatgtattcagttttgtattgaattatgcgctgtgttcaggacgtcgcccgaactcagtgcttggcctaccctatcaacgagcgttgcgcgacatgccggatatcgaaactgcgttggcggcatgggcgcggggcacaatcgcgcatacgaaaggcccgtggcaggagtttgctcactgtcacgggcctttgcttgtccgacacggtgttcagcggttaccgctcaacaccgtgtgacgttgtcgagtcggctttaccacaggccgaacgggtcggagaagccgccgccgtcaccggtgccgccatcgctgttgccattgccattaccgtaaccgttctggccattgccgttctggttgttctggttattctggctgttgccgttggaatcggagccggacgaaccgttcaccgacgactcctcctgatcgagcgtcacgtccacattcatggtcttgccgtcgcgcacgatggtcagcgtcaccttgtctcccaaagccgcggcacgaacgtaaccaagcagcgagtagttgttgttcacggcgttgccgttgaaggccacgatggtgtcgccctccttaaggccggccttgtcggccgggccgccggagacgaccgcgctgccggtggcgctggacttggtgatggtcgcgccgccgcgggtcacgccgtcggcttcaaccgtgtcggacttgatgaccacgccgagggcaacgtgcttgaccttgccgtccttgatgatttcgtcggccacacgcttgacgaggttggacgggatggcgaagccgatgccgatggagccggcggagtcggaggaggtggcggtggaggcgatcgaggagttgatgccgatcacctggccggccgcgttgaaggtcgggccgccggagttgccggggttgatggccgcgtcgatctggacggcgttggtgacgatctcgttgttgttgtcgtcggtcacggtcaccgggcggttcagggcggagacgataccggtggtggcggtgtcgtcgtagccgagcgggttgccgatggccatcacgttctcgccgacggcgagcttgtcggaatcggcgaattccacggccttgaggtcgctcggcgggttgtcgagcttgatgaccgcaagatcggtggtggcgtcagtgccgacgagcgtggcggaatacatgttgccgttggcaagcgtcacctgaatctgctgggcaccggagatcacgtggttgttggtgatgatgtggccttcggtgtcgatgatggcaccggagcccttggcggtgccgttgctcaacgcggtctggatggagaccacggagccggagacatcgctggcgacagtctgccagtcgggggcttcgccgctcttggcggtggcggacccggagccggacttattcgagctgacgttggtaagcgagttgctggtcggcaaggtgatcaggccgctggtgagggcaccgtagccgaggcccaggcagagggccgcagccagaacggcggcgaccacggcgatgaggatgttgctcgccgtcttggacatgccctgcttggcggggccgggctgaccgggctgaccgggctgtcccggctgggtcggaccttgaccgttcggcgtaccggtaccgggaacgccgaaaccgaacagaccgccctgctggggctgctggccattctggccattctgaccggactggctggcaaacgggttgccgttgttctgctgcggctgcgtgggcggattgaacggattgccgttaccctgcggctgcgggttattggtgtagtaggggttgcggttgccctgctggccctgtggggtttgctgtgcaggctggccgaacgggaattgctgcgtgggctgggcattgttgccggcctggccgccctgctggccctgtgcctgagtcggggtcggcccataagcgccgtattccggggccgggcggtacagcggagttgtggccgaggtctggtctgcggccggcgctgccggagaagccggcgaggaggagaccaccgtgctctcgcccttggcggaggcgtagtccgggatgggctcggtggcggcttgcgtaggctgctgatcggcagcgagggcggccgaggaaaccggggcttgctgctcgctggaatcgctggcgttgccggcatcaaccgagtcgccacccacaaacgggttcttcggctcggcgttgccggtatcggcagtactattggggttttcgttattccgcggggtctggtcgacgccctgcgggttaaattcgtcagccattgctgctccttttcctaaattcctatcacgtctgttcggcggctattcgggcacttgcccattgccacttctcgtgtgctacctcagtagtaaaggcagtcaatctggaggttttctgaacgttgattgaaagtctatgcgtaatcatcgcagagtcttatgggcatctcggcttcgaggggctgatttcctgtttcgggaacatctacttgcacttcaaggggctgttcgcgcggtcaattccgagtatcaagggccctcatttaacgccattccgccatttttgcagccggcctacttgaccgggagccccttgaagcggaagtagacgttcgggagcggcgaaatccgcccctcgaaaccgagttcttcacaatttccggcccttttctggcccttctgcctaaagtgaacatatgacgatcagccttcttgaacatccgttgggcgcacagcccggacagcccggcgaccgcagcgccttccatttcgaaacgatcacccgcctgccatccacggccagcgggcttgggcgagacggtgcccgatacggccgcaccggcatcattcacacgccccacggcgatattcgcacgcctgccttcgtgccggtgggcacgcaagccgcgatgaaggccgtgttgcccgagcagatgaaggatctaggcgcacagtgcctgctggccaacgccttccacctgttcgagcgcccgggcgaggacgtgctggacgcggccggcggcttggcgcgtttcatgaactgggatgggcccacgttcaccgattctggcggtttccaagtgatgtcgctgggcgtcggcttcaagaagacgctggcaatggacgtgaccggcatgaagtcggacgacatcatcgccaagggcaaggagcgcatggcctgggtggatgaggacggcgtgacgttcaagtcgcctttgaatggtgacgcacatcgtttctccgctgagatttcgatgggcatccagcacaaaatcggcgcagacatcatgttcgcgttcgacgaactcaccacgctgatgaacacccgctcctaccaggaggactcggtggagcgcaccttccgctgggcccgccgatgcgtggacgagcaccagcggctgacggctgagcggctgggcaagccctatcaggccttgtatggcgtggtgcagggcgcgaattacgaggatctacgccggcgcgcggcctcgcagatcgcctcgctggacttcgacggcgtgggaatcggcggcgcaatcgagaagcgcatcattggagacacctgcgcgtggatctgcgacgcgatgccggagaaccgcccgcgccatgtgctgggcatcgcctccgtggacgatatcttcgcctgcgtggagaacggcggcgacaccttcgactgcgtggcccccgcacgttgcgcccgaaacggcgcgatttacacgcgcgccggccggtacaacatcaagcgtgcccagcataagttcgatttcggaccgctggaggagggatgcgactgctacacatgccagcattattcgcgcgcgtacgtcgaccacctgctgcgcgcccgcgagttcaacgggtttacgttggccacgatccacaacgagcatttcttcgtgaagctgctagacgacatccgcgcctcgatcgacggcggatactttgatgagttccgcgacgaagcgctggcccacttctacggcaacggcgagcgccggccagggttgtgagtttttctccttcgttgcggcttgtgccgaacttctctctgctcccccgctgaggctgagacgttaagcaaacagcccagtgggctgtttgtagtcgaaggtgagacgatagtcgaaccagcaggttgcaggcaaggcccgtccttaattgcggacgagctgtcacgaagtgactgaggggagtgccgccaccctcaaagatcacggcgcccgcaggagacccacaagcgatatatccctgcctcccatgcgacacgccgaagattgcatgattacccagccgggtgtaagttagtcgattgtctgcgagtgtggcggaatggtagacgcgctgtcttcaggtggcagtgagtgtatgctcgtgggggttcaactccccccactcgcaccagcaactaaagggctggaaccggaaggttccagcccttttgctttgtccgggcaagcgccgtttttcaagttgcgatggccttgaggagggcttaggacttgagacttatggcccaactttcgtggcggaaaatgtcccggtacctgcatcaatcgtttgacgttcaagccaggccagaatccgctgtcccggttcgcgatttcgggcgatctttgcaaaccgggacaatttttgttgccccggtataaatgtcaatcgatttatgcgaaaaccgggacaacgtgccaattccagaatcggccttattccgccgattccgtctgccagacgatatgagttgaggaaaccggagtgtcccggttcacgaaaacaagccgaaatcgccgaccgggacagcggattctgccccggtcgacaggtcaaacgattgacatatgaaccgggacaaatacagatcagagagaagcccatgaagcagatttaactttcctcaactttccatccgccataaactagcattacataacatcatgaaccgagacgaaaccaacgaagtatctggagtcaccgacgaccagctcggccgaacggccgagccgtacgaatccggcaactggcggggcggcgtcgggagcatcattcgcagcaatccgaaatcaggaaccgacacaagtcggacccagcagacacgcataatacgagttcacagactcggcgatgtattccgcaaccgcaccaccgaataccacaccacggaagaactgtaagcattacgaaatcaaccttgattattgcgcgggcctatactaggttacggtagcgtaggttagtggtcgggagagcgtcgccggccatagcgaggtgatcagtatgagcgtttccatcagcacgccatctggacgaaccatggcttccgccgcaacagttgcgccttccgcaaccgcgagtcaaaaatccagcgcaagcgccaaccccaccgcactggaccgtgcatcggcccgatacagggccgcgcaatcgcgctaccgccaagccaaggccgcactgaaggcgatcaagcgccagatcgtccccgtggatgcattcggcaatcgcaagccgcgactgcgcggatggcttcacctcgccaccctgccgctgtgcatcgcggcgtccatcgtactcatctgcatcgcgccggccggctcggtcaaagcggcctgcgcagtgtacggtgcctcggccatgctgctgttcggcaacagcgcgctgctgcacgtcgtgccgtggcgcagcgcgaaggtgactcgcgtactgtgcggcatcgattattcgaacatcttcctcatcatcgccggcactaacacacctgtgctgttcgcgctcagcccggcgattcgccggccatatctcacggtgatttgggtgaccgcggcgatcggcacgatactgcatatcgtctggctgcgcaccccgaactgggtgttcaccactgtgtatgttgtgctgggattggcgccggtgacgcttattccgcaactatggacggctcccgcagtgggcccggctgcgaccattcttatcgcatgcggaggtgccgcgtatatcgccggcgctgtgtgctttgcgctgcgcaagccgaatccgattccaggctggttcgagttccacgaggtgtttcacctaggcacggtcatcgggtacgcctgccacgtcgtggcgatttatctgattgtttgcgcgctgtaggtttgcgaaccgtgcgggcagcccagcagaccacccgcacgccctcaattcatgagtattttcaggccgtacgcgcgatctgcacggcggtgccggacgcggtaaccatcagcataccgttgtcggcgccgagcacctcgtagtcgatgtccacgccgaccacggcgtgcgcacccatcgcctccgcgcgttgttgcatttcggcaatggcctcgttacgggcgcgcatcagctcttcctcatagccctggctgcggccgccgaacatgttacgcaggcccgcgccaagatccttgaacatgttcacaccggacaccacttcgccgaagacgatgccctggtagttggtgatggtgtatccgtcgacggacggggtggtagtgacgagaatcatggcgaggctcctttgatctagtcccgatccctcggaacaacttttaaacagttataatcaaacagaatctttaagtagcgcacgaaccaatgtatgggctacttgtcgcgaacgctcacgcagtaaaccattcactgactcgtaatcggatgcagtcagagcctgcatggctttctgcatctcgtcctcactaaaatactgcgactcctttataagttgagaataacggttatggtcgttaatctcatacaaggttttatccttcttcggattgttaatacctcgtggcaaatacatgcaattacctaacgaattacccaaaatatgtcgaggcctcgaagaatccgccgcgtcaatacgcttccgagcaatgatatgctccaactcaaaagtctctccgtttggcacggacgcagaaagatagcttaagttcgcatgaattgttatcagacatttaatatctttaccaaagtttattcctggagtctgatctgcgatccactgatcaaaggcctgatcaaattgttcttccgaaatacgcgtgccatagtcacgagaagaattacagtattccattaacctctgatcaccatgagatgaccatgctgatgtgatagcatcatacacatatgcagccttaatattagatagcgctgttgtgtattcttccgaagatggatctaaatcccacaatgccgcgaaataagataacgtcttaaacgtcgaagataggccgttttcataatcattgccagtagatttaaatcgacgcaataaggtctcaaacatactctgcaaattattgcatatgcgttcggtcttctggagaatatcttccagttcgtctctaattttctgaatatacttattgagtgaactcaacttacgattgtccaagttcatggccactccaagaagcccgaagccaatctctggagcggcactggttgtctcagggacaagagccgacaaatgatctacaacatactggcccaacgctgtaccaaattccggcaacgtgaccgtgcgattctgggtcagttcatcttcagaaaaatcatctacatcaaattcagcttgcttgcgcatatcaagatagtaatttttcacatactgcaacagctgatcttgcaacggagattcctcagcccctcgtagccgaatggcggcattaacccaagcagcgccaaacacttcatacttggtcagagggacaccacctttattgaggttagcaaaaacgtcagcaatatgagcagatccacccaaataaacaatcatcggcactttaaggtgctcaagattgacgaatgagcggatttgttgcttaagatcgtcaatgctttgcatagcagcttttacatcctctttgctgctcaacgaatccatagcccaatatgccactttattgggattgctattcaccagcttatcaaatatcggctctgtgaacttatccccttccggcaacatcttctttacagactgatagacgcttgtatacgattccctgttcaacggtttccaaaactgcaatggatcttgccgatacttcttaatagtagatagacgctgctgcccgtccaatagttggagcttcgcatctttatcgttatcgttctccggataaacaagtaaagtaccaaaggggtatccatcatgcagggtctgcacgaaatcttcctgcttcttttttgtccaaacaaaccctcgttggaattttggcaaacttatgcgatcgagttggtcaacggataattcgtcaatacggtatgaggacatcagcggctccttacgtcacgccaatgatctcaccaaacagttgatagatcaagcgtattaacagtcagactcagctttgtagccgaacggcggcggccattccgccgtcgccataggtggggtgggtcatgaaggcttggctggcggtggtgtcaccgcgcatcaacgattcccacatggctaggcggctcatggagatggcttcgacgccgaggatggcgtcggcgatgtgcgcggcgtagagatcgcgatgcttggcgatcaggaagcgcatgagatcgaggcgcttggtcatgctggtcacgtttgaggaggccggggccgtgcggtattcgatcaggggctcgggggcgatgccgatatgggccgcgcccttcccggcgtcgtctttcggttccaatccccgctccaacatcgacaaaaagagatcccaatcctcaaagccgctgcgcatcgactcgtcatatccgccgcaacgctcccacgccgagcggcgaatcatgcatgttgccgggcaacagttatgcgacacgaacgctcccgcgtcgccaccggtcggctggaccactgagtccagaaccccgaacgtacgcagccaaccagaggacgcaaccatcgaatcatcagcagtcagcaacggcaacgtacgctcaatgaaggtcggcatcaaacggtcatcgccatccagcaccaccacgaacggcgtcccggcagcggcgatgccgcggttgcgcgcggcggagggacctgcattcacctggtcgatgaaatcgacggcgacaccgcccgtatccaacgctccatgccggcaatcatcgagaattgcgctcaatacatcaacagatgtttgctcatcggaaccatcatccacgatgatgatgcgttccgggcgaactgtctgggacaatgccgactcgactgcttcgcgaatcaacggaccctggttgtagctggtaattacgactgtcactgctgccatgcggcaagtttatcgggttcgggcgcaggccacccaccggcgctgcgcgccacctcccgccaacgggaggtgagatttgagcaacaccatcatcaagggaataacaatccacttttctgcatcatctatcgttttttctgcatcatattgatagaatatgatgcagaaagctatttgatgatgcagaaagagactcacaatgaagcactttgactacatcaccgccgccaagggactgctcaccccacgaaccacaacgctgctatccgccatccacgaagccaaaggtcgccaaagcgtacaggctgcaatcaggcctgatttgttgaacacactcatcgcggttgcacgcattcaaagcaccaacgcatccaatcgtattgaaggtatctctaccagcgacaagcgactcaacgcactggttgcaggaaaaaccacgccacacaatcgtgccgaggaggaaatcaccggctatcgcgacgtactcgccaccatccacgaaagccacgactacattccaccgaccccaaatacaatcctccaactgcatcgcgatctgttccgatacaccggcctcgctttcggcggacatttcaaagacagcgacaatgccatcatcgagcgcgacgccaccggaaaacaaatcattcgtttcacgcccccaaacgcactcatcacaccggagctcatcgagcgcgcctgtgccgcctatacagaagccatccaagacggacatatcgatccattgctcgccacagcaatgttcaccttcgacttcacctgcatccacccattcaatgacggcaatggtcgaatgagccgactgctgaccttgctactgctctaccgcaatggttaccaagtaggtaaatatatcagcattgaacaccttatcgaacggaccaaagacacctattacgaggcacttgccgcgagcacatacggctggaacgacaacgtcaacgactatgcaccatttgtgaactatttactcggcgtcatcctcactgcctgtaaagagttcgacgaacggattggggaagtgtccgactggggcagcaatagaaaacccaccaaggagcagcgtatcggcaatctatttgagcgcacgttatcgccgctctcaaaagcggacatacttcaacaattgcccgatatcagcgccagcactgttgaacgtacactgaagacactgcttgacaacggcaccatcaccaaactgggcgccggccgcggcacccggtacgttaagaaccgttgagccgcaccacaaccgacatcccatccttgctgcaatgatgttatcgggcaccgatcacacctgcgcgcggcacggcagggtgctgatgcatgtgcgtgggcgcgggcttggcatggaccttggtggtgaagtaatcgacctcgatcttccacaccgtgacgctgcggacctgcgcatcagtgaattccacattcggcatatgcgcctgctgtgccatcagcgtctgcaagccgtggcggcattcatccagatcctcgaccagtgacgccgtgccattgccgacgatcgacttgaacgcctcaccccaattgcacgtggtgcggcccgccaccacctcgcagtcggtctgcatggtgaaagccacgggcagtcggccaccggcggcggcgcgaatcgcgtcgagcttgcggccgcgcggcgcggagtggaaccagagcgtcagcttgccagtcgcctcgtcgtaatcaaagccgaaattcagcggcacgatagtcaggccctcggcatccgcataggccacttcaacgatgtcgcaggcggcgatgatcgcggcgatccgctcgggatcggtcacctcgcggtccgcacggcgcatcatgcgatgctcgccggcgaccgtgtgctcatcctcacgcttggcgggcttgcgagcgcccgcgatattctccatgctcatgcctgatcatcccatccacaaccgcaatccagtcgccgtagccttcctcggccatgcgcgagcgcggcacgaagcgcagggcggcggaattcatgcagtagcgcaggccgccgcggtcggccgggccgtcggtgaacacgtggcccaagtgaatctgtgtgtccgacgtgcgcacttcgatgcggtcgcggcccggaatgcggtggtcctcatgctcggtcagcaagtcaccggcaatcgggcgggagaacgcgggccagccgcagccggaatcgaatttgtcttgcgacgagaacagcggttcgccactgacgatgtccacgtagatgccgggctcaaactcctcgtcatactcgttgacgaacgggcgctcggtagcggcgttctgcgtgaccgcgaactgctcaagcgtcagatcccagatgcgttccacgtacttctgacggcgttttacgttcgcgattgcggcgatcggcacatggcagtagccgccgggattgttcaccagatagtcctgatgatgtgcctcggccgggtagaagttgcgcagcggttcgaccagtacggccgggcgctgcggctggcggtcgaccagctgctccaaggccgccacatacacggcgcgctgcggctggcggtcgaccagctgctccaaggccgccacatacacggcgcgctgcgtctcgtccgtgtagaacatgccagtgcggtactgccggccgcggtcttcgccctgctggtccacggagaacgggtcaatgacctccagaaacagtaatgtcagcgtccgcaggctgacctgtgccgggttaaactcgactttcacggtttcggccgcatccgtgccgcccgcgcatacctgctcgtaggccggcgattcgacggtggattgcgcgtagccgaccgtggtgtccgtgacgccgtcgacgttctggaagtagcgctccagcccccagaagcagccgccggcgaagtatgcggtttgcgtattgccgtcattgtgttcgttacgttcgctcatgcgccccacgttactacgtcgaggcggctcgcgatgcagtcaacgacacctctgcaccggcaaaaccgctttcgaggggctgattcggccttcgcaggaggtctactcccgtttcaaggggctggtcggcagctagaccgcatgtaaaagcccatccgcgtcaacgccattccgccgattttggagcgtgaatactcggccatcagcccctcgaagcaggagtagacctcccggagaggccaaatcaacccctcgaaacggagatagcgccttctgcgcccttctcgctgggctttcgccgctcaaagaggtacattcgggcttctgcagaatgctttctccgttcaaagaggtaccgaatacgggaaatcccgagtacaaacgccgtcattgcaacgctcatactcgggatttcagagttcaggtacctctttgaaggcagttagttgtccgcaagaggccaaatgtacctcctgaaagcagatagccccatcttgggctcgaatcggtcagtctccgtgtccgtacgtgaacgaacaggcaaacggcctagagcctcaaccgcgagcacaattgtcagggtccgccccgcaccctacgaccgcagcgtactgagcatgccggccacttcggcgggcgtcacgctgggcacgtaggcgcgcaccaccgcgagcccgatctgcggcaacgccgccgggtccgggtagcacacgtagaccggcgcttcggcgggctggaacttgcgcttgaagttgaacagcgagtggaagccgtaggcgggctccatccagtcggccacgatctgcagcacgtgttggagcacctgcgtgccttcgccggccgccaccccaccttcccgggcattgtctcgctcgaggttcatgccggccaagggtgccgcggacaggctcatgaactccacggcatgctcaggatccgcaagcccctcgtcgcgcaggcgctcggccatgcgcgcgatcaggaactccataatgccgttgggactgtcggtgcgatggcgcatgaagtccagcgtccagccgacgatgcgcccgtcgcgccaggtgggcagccagctggtgacgcccagcacgcgcccgtccgcgtcgatggcgtaaagcagccgcacgcgcgggtcgcgcagttcctcgacaccgccgagcgtgaacttcatttccggcagcgccttgagctgcgcccactcctcggagatgtcctcgatctgctcgcgcacatcgagcgacgcttccaggaacgtggactgcacatcggtcacgccgtcgcgcttggccttgttgatggcggtgcgcacatcctgccatttcttgccggtcgtcttccagccgcgcgggtccacgaccatttcgctgccgacctcgatggagctccagccggcctccagcaacgcgtcgcgctgttcgcgatgcacgctgtagaacaccggcgaaagcgaccgctccacgcaatactgggtgaagccggtcaggtcgtccatccactcggagggctcgccgaacggcccggtgcaggtcaaggcgatgccgttgagcacgcgatatgccacggccgatttgcccgtgggcgagagccagtagctgttgccttcccacgtagtcatgaagctcatcgattcgccgccggtttcgaccagccgctcggcgcgtgcctgcgcccgctcgttcgattcgctcacgtcgctcatccagcggatcaccacgaccagcaccacgatccagaacaccaggccgacgccctgatacacgatcgaggccatcggggtacgcggcacgaacgacaacttcatatggctcaggaagccgatgggcaggaagcgccccggcagttcggccaacagcgacgaggccgtggcgcgcggcgagaaggcgtccggctgggcaatgccgtacatcaggtacacggcggcgcacgccagcagaaccagcacgatggcgccgacgccgccgatcagccggcgccagccgacgcgaatcgggaagtgcttcattgccgcagccaaggcgatggcgaagatcagcggtggcaaggtgttcgtcacgcaggcggtgattgcgccgtgctgcagcagggaggtcatgccatccggcgcaaagctcagcggcacgaccaggtaataggcgatggcaacgcccgccgtgaacaggttgatggccacggcgcaggtggccgcgaaccgacgtccgcgatacaggccccacgccagcaccagagtcacggcggtgggcagcagcgagcgcagtaccgcgccgggcatcgaggcgcgcatcaggtcgaattgcaggaagcagccgctgtgcgtggcgccggccaggcagcgcgcgagcgtgccgtcgtcgacggagaccggactcatgagcaggccgactgtgctgagcggccccgcgtgattatgcgaggtgatggcgatgaccggccccagcgccagcaccacggcgatggccgcgaacatgcgccgcgcctcgaaggaggtgctgcgcagccagtgccatccggtttcggcgtgcgcgggcgacccggccatcacgcggccgaccgcgtgtccgatcagcgcggcggcgagaatgcagtaatcgccaggattgccgctgtaaagcagcgcgaccagaatcgccacgtagccgatcagccgaatacgccgccgcaacagatggctgcagaacgcgctggccgccataagcgcgccgaccggcaacaccagcgggctcagggcgaactgcatgcgggagacgaattgggagtcctggaacagccatccggccgccgcacacaagatcaggcccacgatcacgccgccgagcgcgcaggcgagcgcggtgccgacggtacgtgcgcggccaagccacggctcggcgattgacagcatgacgagccacagcacggcatcaagaatgagctggatgacgccgcgcgccaagaacagcgtgcagaagagtttgccgaaatcgaattcggccatgctggtgtcgagccgcagcgggaacgcgaatccggccatcgcgaccaccagccacaccaccaagttcagcaccaccagcgccaccgtggcagtgatggccagtcgatgaccgtccgcccactgtcgcacgtcgccggccagttcgcgccagctttccgccgcatgactgttgtgcttacgcgattcttcgctcattgcaacacctccacttgtgggtactccttcaacgatttcgtcatctcgcccaagccggtccgttcgccgaaccagtcgagaccgggccgccagaccgcctgcaccgcgtgccagtcgtggccggtgccgggcacgatcagctcggtgacctccatgccggctttgcgcgcggcgtcggcgatcgtgcgcatgttgctaatcgattccttgtcccgttcgccagcaccggtgaacagcgcctgctcgggcgtaccggtggcggcgatggcgttgaccggcacctgttcgtcgtacgccttgcggtcgccggcgaaatactcctggaccatcttggcgacgctgccattggtcggcttgagttcgccgtccaccggcagcatcgcgccgtagatgtcggggtggcgcgggacgagctgcgtggtgcaggtgccgccttgcgagaacccgcccatcgcccacatgcgggccgatttggccacgggcagcatcttcttggcccagttcaccacgtctgtggtgaggtaggtttcggcgttgccttgcgtggtgtcggcgcacaggctgttgtgcgtggcctcgccgttctggtcgggcacgagcacgatcggcgcgagcccgtcatgtttggcggcgtacgcattcatcgtggcggcgatgttgccggcgtcgatgagacgactggggctaccgggctgcccggccaacagctccatcactggcaaggccggcggacggtcggacagcgcggcgggcggcaggtagatcatcgccttgcgggccgtgaagttggatttggcgttcggaatgtcgacggtgagcaccttgccttggctgggcatggacggcaggctgcccttctgcgccttgctacgccagtcgctgacgctcatcgcggccttgtgtacctcgattgagccgagcgaggcgtacggcgtgtagccgacgagggtgccgatggtctggtattcgccgtaaaacgagtccacgccgagcgcagtggacagcagcaccagcggcaccagcacgatggccagcacacggcgggctccgcgcatggttacggctgcggcgatcacgaagccgacgccggcgatgccgcccgcgatggtgaagatcaccggccagcccagcgatacgccaaacaccataaacacgtcggacaccagccatgcaaccagcagtccagccgcgccggcgagcacggcggcaatcagcgagacaatcagcgggtgcaggcggccgcgcttcttgctcttgctcaatgccagcccaataatcagtatgattgccgcgatcgcggtcagtccgaacacggtccgcggcacgattccgcggaccagagacaattccatgaacgttttccaaacggagttcttcatccttcacccccgcgctccaggctcctcgccttgtaagctcacgcaacactagcgcgcgattcatagagcgtcacccaatttcacaaaaattgtcgcgagttctcatggtttccccagactccgttcagcgcctgttcacatccggtctggcgcccgcagttcaaggccagtgtcggcgctggattagcggcgcgcaggcttgtcccagcttcagccggaagcagggaatatgctggtggatatgactcacgcaaacgaacaacgtccagcagcgaccggcaatgccgccgataacgtgtctgacgcccctactggccccgcgacgagcgcggcggcaaggcccacgaccgtcacggctgatggcacaacagccacaaacgccgcggccagttcaacagcaaagcccgcagccagcacctcttgggccagggaaaccaacccacgtcgagcactgttgacgattatcgtcacggtggtggttgtggtggccatcgtactggggctcggattcttcgtgaactggggattggcggcccttttggtgatcattatgattccgggggcgatttcgctggccgttctcgccaagcaccctgaatccaccggcgggcgcagcatgttcggcatctccgatccgaatacgctgcttgacccgattcgccgcccgtccgagcgccgcggcgagtaagttgctgctgcccatcgggcggtaatttatccatggggcggtaaaaggcccatggggcggtttgaagaaattgtgaaaccgcagaataaagtcattttgggataccgccccatgagggttttaccgccccatgggattattaccgccccatgagcaaagccaccccgctatttgcgcgcactgaccaagtaattaagcaccgatccgacggccaccagcagcgcgccacaccaaaacggcagcgacagcgctaaacccagcaacaccgcactggccccggtggacagcaccggcgtggcataggacgcaatagccagccgctccatagacccgtgcagaatgccatagccccagcaggcataaccaccgccaatcgccgccgcggcaatcaacacaaacagccatgcgaccagactcggcggctcggccggccacccctgcccggacgcgaagtggataatccacaacgccacggccacgcaggggaagaacaatgaagtgccgtccaccccatgactcatggctggcgtgaacaccgcgtacaccgaccaagcgagcgcgcccacgaacgccagcgcatagggcaaagggttggcggcgatatgctgcacggccgcatgccagtcgagcccggaattaccgccgaccgccaacaccacgccggcagtggccacgatcgcgcccggcagcaccttgacgaccgcgtgcttgcgatgggatacgcccgccgacagcagcaccatcatcgtgggccacagatagttgaccaggctcacttccaccgaggatgcgtcggtagaggccagacccagcgagagggatatcgacgattcgtaaaatacgaacaacaggccgccgataatcaggtatttcttggggaactcgcgaatcggggccgggcgccggaacatcagcagcaggatgccgccgaccgtgtagatcagggccgagccaagcgtggcgccgaagttttcggagacgatgcgcacggtgccggccatgaagctccacagcaggattgccatcaggccgatggtcgtggcgcgcgcggatacgacgtggccgccggaatggcttgccgccggtgccggtgtgccgcttgcgttctgtgcgccgttcgccatatgtccgcctctctcgcatcgtttcgaagtcactctacccatcggatgtgtacagcggcagaacggcacgcgaccggcgcgcgaacagggtggggttcggtgattgaaacagcaaaatgccgggtagggtaaatccctacccggcatttgcattggctatgtttcccgccgtctgtcaggttagtcggcgttgaaagcgtagggcagacggcgtgggaagcatggtttggttacgatttatctctcccccacccgcttcgcgggagccccctcgtcagagggggcaaagctactcgaagcgggacttcgggacgaatcaagtatcgtcagccctcaatcgcgatttggtgcttggactcgacttgcggctgggcctgcatcttcggaacctggatgcacagcgtgccgttccggtagctggcgtggatgtcggactccttcacgtcctcgccaacgtagaagctacgcgagcaggagcccatgtagcgttcgcgacgcagccacttgcccgaatcggacgcgcaagcacacttgctgtcggaagcctcgtcctcagcggccggagccttgtcctcatgctcgctgcaacgcgaggcggacacggtcagatagccgttgttgagctcaaggttgatatcttccttcttaaagccaggcatatcgatgtcgacgtcgtaacccttgtcggtctcgcgcacatcggtagtcatcatgttggcgggcatcacggcactcatcgtgttgtccgtgttgcgccaaccctcaaagaacggatcatcgaacagatccgagaacatcgtgtcattcatcaaagccggaaacattgccataatcggtactccttgattaggagagaatcggcttggctgccggccgccaacccgtatcgcggggctagcagcggttatcgtggccggttccggaaccctcccgggctctcaacctttaaccttcacttcatccaattcccgagcgcggcaatcattccgggattatgcccacagagaaattgcggcgggaatggctgccggtaaagccggccgagccgagcgccgtgaccaccctcagccagtcttacggctgccagctcccgccagcgggagcatatatacgcacaccagtaggcgtactcatatacctctgccaacgggagcatggttgcacgttcccgcaaactccgccaacgggagcatgctggcgcgcgaacggctcacatctgctgggcgttttcgagcaaggcgtttttgaggtcggactcgatttggcgcatcttgacctgggcggcctcgcggttggcctcgccttccttctggatctgcacggtctccttcagggtggcgatgagttcggcgttgatcttctccagcgtgtcgatttccaccacggaacgctggttggccttttccgcgtccactgcacccttgtgcagggcggccgcgttacgcgccagcagcttgttggtcacatcgtcggccttgttctgcaggtcgagaaccttgcgctggttggacaggcccagcgcgatcaccatctgactcttccacaccggaatcgtggtggagatggtggtgtcgatcttgtccacgatggtctggtccgcgttctggatgattttgatctgcggcgcggtctgcaaggtaaccacgctgatgcggtcgaggtcgtcgagtcgcttggcaaaacggtcgagcttggacttgaagttcttcagcacttgcgcctgcatggcgtcgccactggcggcggcctcggcctccagcgctggcagctggttggcgttgaagtcggcgagcgccttcttgccggccagtacggtcatttccagctcgcggtattgctgggcgttctgcgtgtacatcgtgtcgtacatggagatgtcggccacgagtttggcttgcgcggattggagggtggtgatgaggtgttgcatggcatcgttgttgggcagttcggatacggccgggatctggtcgagcgtgccggccacgccgaatcggctgatcgaatcggtgccggcgaagttggccgcgcggaagccatggcgctcccacgccagcttctgcaccgccggtgttttcaacaggttcagcagtgtgccgccttttctcggccaaggccatcagcgtgtgggtgctccacacggtcggcgtcgggtagacgatgaccacgtcgtccttgatctgcttgaacgcatccggctggttcacggccaaatcaagcagctgcgattcgtagcccaccatcatcggcttggagcccacgcccaaggtcaggaactggttgaacgaatcctcggaagaggtctccatccagccggatttggcgaagatggaggcgatggtcttgccgtcgcgcgccaccgaatcgaccatggccggctgcccgccgttgagcaccgtggcaagaagcgccgcgtattcgttgcctgagttcgacttcaccggatcggtcgagtcgatgcggaactgcccgtagcctgccgtgtatccgacgtcggcccaggttgtgttggcgaccatcgcgtccacggctttggccatatccatgtggtacgcgccagaatcgtccttggtcacaagtccgccgttcacgagcccgtccgccacggccttgtgcgtgtatagcacaatcggtgagttgaagacgatgtcgctttggggggccttgacgcctttcgcattgccgtattcgacggccgcgcgcgaggaggggaacaggtaacccatgcctttccggtccgtatccatcatggccggcgatccggccttgcgatagtcgatggcaatgccttgcttggcggcgagcgccttgaacttggcgtcatcgaacaggccgattttctcgccgcccaggtagccggtgatgctcacctgttcggtcggttcggccggtgctggttgcgattgccgccacaccagcgtgccgcagaccacgcccactaccgcaagcagggcgatcagtccgatgatttttgatttggagagtttcattgtgcgtccgttttctggtccgactggtgagccgggccgccagatggagtctgactgggtgcatgccgtccttcatcagcagccgaggaaggcacaggcgaaggtgcgacgtcgtcgtatccatccatgcgggccaaccgttggatggcgtcggagtcggccgtaatgcccaacgtcttggcgcttaccgcccggctgagttcgccggcggcggtctgttcgagcacttgcagcgcctcgatggtttcgattcgtgccgtggctatctgatcgcgtgcgccggaactttccacgtccacgtaggagcgcaacagtttctcggtctgctcgccgtacacggtgatgtagtggcgcaacgtcgggtaggcggaggtgtctcgggtcacgtattgcactaaatctttggtagcggcgatgaagtcgttggcttcggctttgacggctgggtcacgtacttgcttggtgagcatggcgatcgagttgagtcgagcgttcgccgcgtcgatcgtatcggcggtcttctgaccgttgggcaaggcggaaaccagcattttgccgatgcgtcgctccggctcggtgagcgtggaggcggcgatatacccaagtgcggccagtaccacggccacgatcaggccgggcactccgccgccgaccagtccgaaaccgagcccggcgagcagcagtccgacaacgaatccacagattacctggagcatcagttgaagcccttggcttggcggaagacggcggcgaggtcgccggagcggccgtcgaataccttggcgttgctcagggtggcgagagacttcagctggctgggatcggcatcgccgaacatgatggagaagatcggcagatcacggccgcgcgacttataggcgctttcgaattcatcctgatgatcggagttggagcggccgtcggtcatgagcacgatggcggtggtgtattgcgaggcttccgactcgctgggcagctcgtcgagcgcgctcagcaggccttcatagatatcggtgccgccgctggcatcggtggcatcggcctcatgcagcaggtcgctggtgcttgtgccagtggccttgaccgggcggtgggcctcggtttcaaacgggatgagaatgttcacgtcgccgctggcgggctcgatgtacgacttcttggcctggtccgggtcgagcgccgcgttcaggcctttgaccacgccgttcttgccctctccagacatcgaaccggagtaatcgaccacccaaatggtccagctgggcttcctgagcgcggtctggtagacgttgagcgcgctgtcgatcaccgtggcggaggtcatggagaacgtgagtttgccgtcgctgaccgcggcgaggatgtccgcggtggagacgggcttggcggcaccggtgtcgtcagcccagccgagtttgacggccttggatttggcgatgccgaacacgatcggcgtggtggaggtgctggccgcgtctttgacgatgtgcttggtgtctcccatcgaaatccacatcgaggaggcaggccagacggcgtcgtgatcctggccgccggccttgagcgcgttcataatctccagcgaacccatgtagtgcatcgtcacggctacgttggattggtcggccgctttctggatggcgacggcgacttccttgttttcggagccggaggcaatgctcagggtggcagtcggtttgccgccggacggctggaaggtctgcgtggtggcggacgtgccgttgccgtccgctgtgccgtcatcggaattattgaacgccgtgcaaccggtcaacgcgagcacgccggcacatgccgcggccgcaaccgcggcggcgcggcggcggagagaagacattatgcccataattccatggctctcccgccatctaaagcgggccgggccacaaggtgaccgcacggtgaacaatgggtgaagagctacatcagtacgcggcgcaggcaatcatggggtcgtcgtagaagccgaggatcttttcgaggtagggcttgtaagtgctgttgggcatggagaagatttcgtggcgcgattcggggaagcgcacgatgttcgcctcgccgccgccgtccttgaccagttggacgaagtgattctgcggcttattgagtacccagatgtcgcgtccggactggaagagcagcaccggcgtctccacttcggcgcaggcggacggattcagtatggcccggttgagcttcaacgcttggcgcacccattcgaacgccgcgcagtaggtctggtattcgctattctcgcaacgcagcttgaagtaccagcgttcacgcgcttcggaagcgccctcgttgccttccatcgagaattccggcgtgaagcccgactgcccgaacacgcgcttcttgccgaagccgagtccgcacagcgcgccgaccagcacacgggccacgcccagcggcatgccggtggcgggggcgatcatcggggcagagagcaccgctttgtcgaacagggtggggtatcgctccaacacggccgcgccgatgccgccgcccatcgaatggcagaacaggttcagcggcatgccggccgcgtactgctggccgatggtttcggcgaagccggccaaatcggccacgtagcgctgccagtcatcaatccacaccatgcagcggttgtccacgtcgcgcgcggacttgccgtggccgcgatgctcgagtacacacaccgagtagccggcaagcaggaagtaccagacgagctcgtcgtacttttcggcgaactcggtgaagccgtggctgatgacgatggccccgcggaaggtggcggtggcgccttgctcgcgaatcgcgtcgaatttggcggagtcgtagcacaggtagtgcagctggcccgagcggccgccggtgtccataatgccggacagcggctcgatcccggccgaacgttcggcggcggacggatcgaaccagccctcctcgcagcattgttcgagcgcgggcagcaccacgtcggtcatcgtttcggcgtacttgttttcgtcgatcatcgtcacctgcatggctcccatcttaggacaagcctcacgcccacacctcgcacccacaccacgacacattcccgggaatgcgtcgcaagcctgcgcgccactgaccgcacaggcgcgtaggttgtgaggtatgagcgaaaccaatgatgtcaatgacgcaatcaagcatttcccacgcctccgggcgcgcacgctgcgcttcggctgcggcgcaccgcgctccgcacagaccgtgggcgacggctcgcgggccctgttcctgcgctccgacggccccgaggatctggtgaccgcactgtggctgagctggttcgacgagtccggcgaacaccatgagaccaagctggccgacccgcgcgaactgctgggcgcaaccgccgacagcgaggacgtgccggccgaggagaaggcccgccgcgagcgtgcgcgcgaaggcggcaccggcatcgtcggatactccgcagatgacgacggcaatcgcatcgtgttcaccatcaacggccgcctgttcctgaccgacatcgattggaatgacgagaccggcgcacccgagccgcacacccgtgaactggccggcgaatggctcgatgaggacccggcgatgtacacgccggtgctgaacccgcgcatcgccccggatggcgaacatgtgctgtacaccacgggcagctacctgatgctggtcgatatcggcggcgaactaggtgaccgcatcaccgccgtctacggcgtgagcgtggaggatgaggacggcaatccggccgaaaacacgtggaaaatcggtctggccgagttcgtggccggcgaggagatggaccgatacgacggcttctggtgggccccggattcgcagcacgtgctgttcgagtccttcgacaccgccgacgagccgacctggcacatcagcgatccggctgaccccgagaagccggacgccggccgccgttacccgcgcgcgctgacccgcaatgccgacgtgtatctgaccgtgatcacgctggcgttcgatgagaacgaccggtacgcaggcatcaccggcaacgccgatgtggattgggatcgcgaggcgtacgagtatgtggccgccgtgaactggcgtcgcggccacgatccgctggtgctggtgcagaaccgccgtcagacccgcgatcaggtgcttgaggtggcagtcgcggcggatggggccgcgctgggtgccacgcgtgtgcttgaggagcacgcgaacgagcagtggatcgacctggttcacggcacgcccgcctacacgccggatggtcgtctggtgtgctcgctcaacgatatggccacggacaccaaccgtctgacaatggacggccgcccgttcacgccggctggctggaacgtgcgcacggtgctcgccgtgaccgacgaggatgtgctggccgtggtgcagcgcgcgcccgaaatcgcgcctgaggtgccggacgcttgggccgatgcggccgccaccgagtccgtattcggcgaccacgacgcccgcagtttcgacgtggtgagtatcgattacaacggcacgatcacgccggtcacgaccgatcccggccagtggaccgcctcgcgcggcgagcgcggcatcgtggtctccggccgcgatatgcgttccgcccgcgcccagatgcggcatattctgggagaacagagcgccactatcgcgtccacggcggccgaacccggctttacaccgaacgtcacgtttacgcgactgggcgagcaccagctgtacacggcgatcatcgcgccgagcccggaaagcccgtacgcgcacgccgagaagctgccggtgctgatgaagccgtacggcgggcccggcttccagcaggtcatcgcctcgcagtccttctactgggagggccagtggtgggccgaccaaggcttcctggtggtcacggcagacggccgtggcaccaccggccgcggcccggcatgggaccgcgagatcttcgaggatatgaaggacgtaacgctggccgatcaggtcgaggccgtcaacgccctgcccgaggccgtcgcccggctcaacgccgatgtggaatcacgtgcggcacagccggctgcgggcgatcaggcagacgccgagaaccacccaccggcgcttcgcgccacctcccgccagcgggaggcgattcccatgccggacctcgacaaggtgtgcatgatcggctggtcgtacggcggcttcctgtccgcactggccgtgctggacgcgccgaacgtgttcaagaccgcatgcgccggcgccccgcccaccgactggacgctgtacgacacgcactacaccgagcgctatctgggcctcgacccggatgtctactaccgcaatggcatcgtgcaggacgcaccgaaactcgagcgcccgcttatgctgatccacggtttcgccgacgacaacgtcaccatcgcccacagcctgcgcctctcgcaagccctgatggcggcgggtcgcccgcacaccttcctgccgttgacgggcatcacccatatgaccaatgacgagaccgtggccgaaaacctgctcaccctccagcgcgatttcctgcgcgacgcgctggcctgacaaatcgataacacgcgcatcccacccgaggtgctccaccggtaaagcacctcgggtggtgcgccgcacccatttccgccctgaatttttggatattttgcactcatcgtcacgtgaaagaccggttttttgtctcatattcccatcaccgcgtaggatgggtgaagattagaaagggaggactatgagcgttctcgaccgttttgaaaaaagcgtggagggtgcagtcaacggagtatttgccaagtttggctccaaagacctgcagcctgtcgatctttccagcgccttggagcgcgagattgacgccgaggccatgcccgtgggccgtgaccgcacggtggccccgaatgaataccgtttcaagctcagtactcctgacttcgaccgtatcgaggcatggggtagcgagaccctggccaacgaactggccgataacctcaccgagtacgcgaagagccagcattacgccttcgtgggcccggtgatcgtgatcttcgaggaagaccttgacctgtccaagggcaacttcaacctcacctccgaatccgtgcagggcaatgccgtgccggtcaccaccgatgcgcagaccgaggatagcccggtgctcgaggtgaacggcaaccagtacctgctcaccaaagacaagacggtaatcggccgcggttccggttgcgatatcgtcatcgacgatccgggcatctcccgcaagcacctggaaatcgacatcacggataacggcgtgatcgcccgcgacctgggttcgaccaacggcacgtacgtggagggccaccaagtgcccgccgccacgctgctcgacggcaacaccatcaccatcggccgtacccgcatcctgtactgggcttccgcccaagcccaggagtagtcgagcacacgcccgaaagtcgtccacttatgaccgaactgacattcgccctgctcaagtatggattcctgatcctgctgtggatattcatctggctggccgtacgttcgctgcgcaaggacatcgagacgttcagtccgcgaccttcgcgcgcgcgtcgtcgccgtgagcgtgaagtgcataaggccaaggccgaaacgccgcaggcagctgcgccgcgcccgcatcgccagcccagcgcttccgcgtcgtccgccgcctcggcgcagcctaccctgttggtcatcatcgatggtccgcttgccggcagctccgtgccgctggccgaagccgacatcacgcttggccgcgccgcctcgaacaccgtggtgctcgatgacgaattcgtgtcttcccaccatgcccgtgtctaccgtgacacgcgctccgggcagtgggccattgaagacctgaactccaccaatggcaccgtggtcaaccagcagcgcatcaaccgccccaccattctgcccgctcgtattcctgtgcgcatcggcgccaccaccttcgaactgaggtagccgcatgccaaaatccgccgcttcacaaccgctgttcctgtattccaccacggtgtccgatgtgggcaccgtgcgcgcgaacaatcaggattcctccttcgccggcgagcatctcatcgccatgtgcgacggcatgggcggtcacgccggcggcgatacggcatcctccatcgccatccggtcgctggcccacatcgagcaggatgacaccggtggcaacgtcgagacgatctcccgcatgatggaaacctccgttatggccgcgcatgacgccatcgtcggcaaggccaagcgcgaacgcaagcttgccggcatgggcaccaccgttaccgcagtggcattggtggccggctactgggtcatcgcccatatcggcgattcgcgcgcctacctgctgcgcgacggacgcctgagccgcatcacgtgcgaccacagctacgtgcagcacctcatcaacaccggtcgtatcaccccgtccgaagccaagaaccacccgcagcgcaacgtcgtgatgcgcgtgcttggcgactttgacattgacccgcgcccggatatttcggttcgccgagcccaccccgccgaccgttggctactgtgctcggacggcctgtgcggtgtgctggaagattccaccatcgaagagacgatgaccacgctgtccgatcagggcgaatgcgcgcagcgtctggtgcagatggcactgcgggcgggcagcaccgataatgtcacggccgttattgcggatgccacgttggcgttggatgccgatgcgttcgacctgccgcaccaaacgccgttggtcggcggtgccgccagccgtaatcttgagccgattgccgacatcgtcaacgagccggtggctaccgcgcccgcactgcgtgaggatgattcccccgcccagcgcgccgcagcattgattcagcccgccagcgcgcacgaggcggagaccacgcaaaccacggccaaaccgtcgtccacacgcgtggtgcagccgtccaccgtccgcgaggagaccggtgaacgagccaatcccgataccggtgagattccggtggtgcaaaagccggatgggcgcctgtccgccgaccccaacgacccggatgtggccaaagccatccgcgatgagcaggtcgagcagaagaaggccacgcgcaccaagaagcgccgcaataagcttgcggtgattattacctgcattcttgccgtgctggcattggccggcgccggctggggcgcgtacacgtggagccagacgcactactacgtgggagatagcaacggcaccgtggccatttatcgtggcgtgccgaccaatctctttggacttgagctttcgcacgaagtgcagaccaccaatatcgccaccgcggacctgcctcagacatggcgtgaccagctgagccaaggcatcacagtcggttcgttggacgaagcgcagtcgcatgtgggtattatccgcaccgaaatgcgcaaactggccaagcagcaggaagccgacgccgccaagaaggccgaggcgtccaattccccggacagttccaaagacagttcccagagcgattccaaggacggcaccaaggattcgtccagccagtccggctcctcgtcagacaagtccggttcgtcaagctcatccgattcctcggataaatccggtatcggagcggccgacaacgcggccacgggagattctcaatgatcgctacccgtctacgtcagatttctttgttgctgattgccatggcaatcagtgcgttggcgttcatccagatgttccagcgcaccgccggcgaattccctatgcaatacgccggcatgctggcattggtcgtagtgctgtttctggtgctgtgggggctgattgtgcgcttccagccgtacgccagccagtcgattctgccttgcgtgctactgctgaccgccaccggcgtgaccatgatcgctcgcattgaccagagcgaaggttgggcggttgcccaacgtcagctgatctggctgtgcatcgccatcgtgctttccgcgctgctcatcatcttcctgaaggactaccgcgtgctgcggcgcttctcctacgtgtcgatggtggtgggcttggtgctgctgctcgccccgatgctgccgtttgtcggccaggaagtgaacggcgcgcgcatttggatcaggattccgggactgggccagttccagccgggcgagttcgccaagctgttccttgcgttcttcttcgccgcctacctgttcgaccatcgcgaccagctggccgtgggcggtaagaagatgctcggtctgcagctgccgcgtatcaaggatctcggcccgatcatcgtggtgtggatcgcctcgatgggcgtgctcatcatgcagcatgatctgggcacctcgcttatgttcttcgccatgttcgtggccatgctgtacacggccaccggccgtaaaagctggatcatcatcggtctgatcgcgttcgccgcgggtgccgtgctggccgcaggcatgttcagccacgtgggtcagcgagtcgatgcctggctgcacccgttcagcaacgagcaatacaacaagacccccggcggctcctggcagctggtcaccggcattttcggcctggcatcaggcggcatgctcggcaccggtctcggccaaggccatccttcgctcgttacgtttgcgaactccgatttcatctacgcctctctgggcgaggaactcggtctgatgggcgtcctggccattttgatgctctacctgctcatcattgcctccggctttatcaccgccatgaaaatcaaggatggcttcggcaagctgctcgcttccggactggtgttcaccatggccttccaggtgttcaccgtggtcggcggcatcacgctggtgattcctctgaccggtctgaccctgccctatatggcggccggtggctccagtctgatcgccaactatattctcgcgaccctgctcatcatcatctcgaattcggccaatgcgcccgagccggagctgacctcggatacgttccagtacgaggctttggccgtgctgcgcaacaaggaacttgaggcccgggcccgcgccactgagccgatcgttcagcctcgcagcgcgtcggctacggcgtcgcagtccgagtcggaatcgtttgacgaccccatcgtggataccaccactccgtcgtatgccgaagccgatgaaccgtacacgcctaccggcacgattcccccgcttcctcccgttaacggaggcactcgcgtatgaacaaatatcttcgtcagcttttcaccgccgtggtagcgctgttcgtgattctcggcctgtcgtccaccatcatcatggcggtacgggccaacgcgctgaacaacgatccgcgcaacgcccgttcgctgtaccaccagctcggtgcctaccgcggtgccattctggcctcggacggcacggtcatggccaaatccgaaccggtcaacgacgcgttcaaatacctgcgcacctattccaacggtcctctgtatgctccggtcaccggcttcttctccatcaaccagaccgccgatcgcggcctggaagcctcccgcagcatgctgctcaacggtgaggccgattcattgatctggcagcgggccaaggccatgctcaccggcactacgaatcagggcgcgtccatcgaaacctccatcgaccccaagctgcagcaggttgcctacgatcagctcggtacgcgcgatggtgcggcggtggccatcgaagtcaacaccggccgtatcctcgccatggtgagcacgcccagttatgatccgaacaaactggcgacccatgacaccaaagccgcgtctcaggcctacaacgaactttctgcgggccaaaatagccctctaatcaaccgcgccacctcgcagctgtacccaccagggtccacgttcaagaccatcgtcgcctcggctgcgctggaaaccggcgattatcagacggacacgaagattcctgcgggcgccagctataccttgccgggaaccgccacacagttgccgaacgccgaggcacaggccgatggcgtcaacgggcagatctccctgcaagaggccgtcgcatggtcgtccaataccgcgttcgcccagcttggcgtgaaactcggcgcgagcaaggtttcggacatggccaccaagcttggtttcggcagcaccatcaccattgacggcaccgaatccacgggcaccccgatgacggccaccgcgtccacattcccctctgatccgaccgacgacaagcttgcgctggcgtccatcggccaaggcgacaccacggccacgccgttgcagatggcgatggtcgcgcaggcaatcgccaacaacggcaaactgatgcagcccacgctggtcgatcgtgtgcgcgccgccgatctcaccgtgctttcgcagaccaagccgcagaccatggccaatgcgttcagcaaggattccgcagacaagctcaccacgatgatggaaagcgtggtgtccgaggccaatccgcagctggccatcgacggcatcaaggtggcggccaaaaccggtaccgcacaaatcggtaccgacaactctgccatcgacggctgggtgatcggtttcgcgccggcggacgatccgcaaatcgccgtcgcggtgttggtgcataacacagatgtatacggttcgctcgccgctggcccgatcatgcgcgcgatgatgcaggaggctttgcagcagtgaaacttatcgaaggacagcttattcaccgccgatatcgtcttgattcgcgtcttgcgcaaggcggtatgggcgaggtctggaaaggctacgatattcagctcggccgtgaagtggccatcaaggcgctgcgctcggacatgaccaacgccgaggccaagctacgccgtctgcgtgccgaagcccataattccgccaatctggcgcatccgaatatcgctgcgttgttcgaatactacgagcatgacggcatcggctttctgattatggaatacgtcccctcgaaatcgttggcggacctgttccacagcaagggcgcgatggatcccatcgaactgctgcccatcctgattcagaccgcgcgaggcctgttcgtggcccactcgcacggcgtgattcatcgtgacgtcaagccggccaacatcatggtttccgacaccggcgaagtgaaaatcaccgatttcggtgtgagctactccacgggtcagggccagatcacccaggacggcatggtggtgggcaccgcacaatacatctcccccgagcaggcgcagggccagcaggccacgccgcaatcggacatctattcactgggcgtagtggcgtacgagggccttgccgggcatcgtccgttcaccggcaccactccggtcgatatcgccgcagcgcacgtgaacaatcccgtgcctccgctgccggactcggtggacgtccagttacgcgaatttgtcatgtcaatgctggccaaggacccgttggatcgcccgaaagacgcgctggtggtgtcccgtacgctggcacgcatcgaacgccgtctgctggatcagcagaccgaaatggccgacaccgccatggccacgtccggcaatcgactgccgcgccgagtgaccagcacgccacgcattgttttggaggccccggcctcaagattgggagggaataagcaatgagcaccagtatgcccaccgcattggccggcggacgctaccagcttggccagctcatcggtcgtggcggcatggccgaggtccacgtggctcttgacacccgtctgggccgtaccgtggccgtgaaaatcatgcgcgccgatctggccaacgacgacatcttcctggcccgtttccgccgcgaagcacacgccgtggcccagatgaacaacccgaacatcgtgaacatctacgattcgggagaagaactggtttcttccgaaagcggcgatgccgagcgtctgccatacatcgtcatggaatacgtcaagggccagaccctgcgcgacatcatcaaggtcaacggcgcactcagccagcgcgactgcgaacaggtgatgttgggcgtgcttaacgcgctcgactattcgcatcgcatgggcattatccaccgcgatatcaagcccggcaacatcatgatttccgagcagggcgtggtcaaggtcatggacttcggcatcgcccgcgctctggacgattccgcagccaccatgacccagtcgcagggcgtggtgggcaccgcacagtacctttctcccgagcaggcgcgcggcgagaccgtcgacatgcgttccgacctgtattccgccggctgcgtgctctacgagatgctcaccggccgcccgccgtttaccggcgattccgccgtggccatcgcctaccagcatgtttccgaagtcgccacgccgccatccgccgtggtgccggggctgccgaagatgtgggattcgatctgcgccaaggccatggccaaggaccgccagaatcgctatgccacggcctccgaattcaagaccgacatcctgacctacatgaacggcggcgtgccggtggcggccgcgttcaacccgttgacggacctgtcgaatatgaaggcccgcaaggaagccgaacgtgatttgcccaccacgccggtggaaccgcatcagcaacccacccaagcattcaacccggtgaccggtcagttcgagcagattccaccggccaatggtgccaactcagcggcgttgcagtcccgtgcgcagcagcgtgcggcggcggccaaggccaagaagcgcaagaagatcatcatcggttcggtgatcgcagcgattgttgcagtgcttgtcattgtgggcatcgtgttcgccatgaacggctccggcaacaagtcctcggaagacaccgtcaccatccctgaggtgtgcaacgcttccacatccaaggacagcatcgagctcaaactcaaggcatcgggtttgaagatgaccgaaaagcaagacaccgactccaccgagccggaaggcacctgcaccaagatgagcccggacgccggctccaaggtggccaagggatctgccgtgaaggtgtggttctccgcaggcccgcagtccactcaggttccggatgtcaaggaacgcagccaggaagaggcgcgcagcattctggaaagcgccgggttcaaggtgaacgccgccgtcaaaaccgaagacagcgccgacatcgccaaggatatggtgacgaaaaccgatcctgccgccggtcagtcggttcccaagggcaccaccatcaccatatatgtttcttccggcatgaccaccgtaccgagcaatttggtcggtcagtcgaaggacagcgtgctacagcagtatgagggcaagttcagcttcactgtggagcaggagagctccgatacggtggaggccggtctgattacccgtgtaagccctgattcgggctcttccatcgcacagggcgggttcatcaccatttgggtgtccacgggcaaggagaaggtcgctgtgccgaatatcaccgctggcactgactacgtcaccgccgaactcatgctcaaggccgtgggcctcaaggctcaggccaatggtccaaccggtagcaccgctgtggtagtcagcatcaatcctggcgctggcagccaggtagatgcgggatcgaccgtcaccattaccacgaaggccggcagcactggcggcggtaccggtaccggagacggtggcaacggtactggcaacgggggcggaaccggtgagtgaaccggtgagtagcaagtaagcgccgggcgtgtatgtgttgcgcatatgcaacgcaaatagcgcaacacatacacgcaacacaaaggggaagggcttctgcgcccctcccctttgctgtataaagagctatcccagcgcaacaatcccgggaagcgtcgcaaaaccagtacgcaagcctcgttctagcgacacattccggggagagtatcgccgcgcgcggaaaagctacttcgtaactttgggctggaggccggcggacttggccacggcgttgtcttggccgcagaccttaagccagttggccagcagacggtagccgtcctgggtcatcacggattcgggatggaattgcacggcgtacatcggcttgcccttgaccttgatgccctgaataatgtggtcgccctgcgtccacgcggtaaccaccagcgtatccggcaccgaatcgggctcgacggccaacgaatggtagcgggtggcggtcatggggttggccacgccctcgaaaatctcgtcatcgatatgttccaccaagctggtcttgccatgcatgatggtgggcgcatggcccacagtgcagccatacacctcggcgagcgcctgcaagcccaggcacacaccaaacatcggcacgccgctggccgcgcacaggcgaatcatatcctcactggcaccggattcggccggagcaccagggccgggagaaatcagcacgccatcgtaaccgtccagtacacccggcgcggctgggtcgatagcgtcgttacgcaccacatcaacagtggcgccaagggtttgcagatagcctacgatcgtgtagacgaaggaatcgtagttatccaccaccaaaatatgcgcggaatcggtcatagggctctccttgagggacgtgtactgcaagccatagtactaggctgccgtcagctcactgccacgaagttcgacatctgctgtaggaatgggatattggcggcggcccaagggaatccccactggaacagcgccgcggcggctgcgaacaacagcagagccagcagcagccatcgaatcggtgccacgccgggctgcagacgcaacagtccgccatagatgctggcatccgggcggcgacgctcacccgcgcgaatctcgcgcagcaccggccagcgccatgccaccgcagcggcgatgaacagaaccagccacactaccagcgcgccgaataccaccttgtccagcgagccaatgcgggaagcgatcgagggggtttcggtggtggagaacttcactgcaccggacgaatcagtagtagccagctctttgggcacaccgtcggacactttggcccagtacgccaactcaccatagctgatccatcgatgggtgggggtggagtatttcggctcacaggtggtcagtgtgatcatgcgtttggtgggattggcagtggagtcttccggattgggggcgatcacatgcacgtccgtgggcagcacaatctcgtaccgggtgtagtggtagacgtaccagtaatccttggtacgaacgatgatgggatcgccttcctgcaacttgtccacatcgcccaacggctgcccgtagccgttgcggtggccggcgacggcgaagttgccgacctgccccggcatctgggtggtgtcgtaatggcccagaccgtggcgattgagctgctcgagcgtggtgccttccacgatgttgcggtgccattgggagccgaagcgcggaatgtagatctgcgcaatcaagtcgccatatttcgcgtctttcggctgtaccggcgcatcgccctcctgggctttggcgatggtgaccgttcccccgttgttgctggggtcgctccagtcgacggactgggtggtttcgttctgggctcgctccgcctcgacaccggtccaccacatctgccagacgatgtacagggcgcaaatcacggcagcggtaatcagcagttcggcgcagatgccgagtgcctgccagaccgggctccgctggggcgaagacgcgccgcgtactgcggcacgacgggaccttgccctactggcgttggccgggtctgccgccattcgtgcggcatcgtcctcggggaagggctgtacgtccgacacggacgcgagatcaatgggcgccggtacgccgctgttgtgcctgccgtgtctcattgctgagtctgctcctcatctgtggtctttgacgtatcgaccgtggcatatttcaactgctgcagcaaggcggcggtagcggggaactgaaggtcctcggcattctccaccttgtagccaatgccaaacgcggtcacatattgcttaagaatggtaatggcttcggagtcgttcaacgctgcgcgaagtctttgagggtcaccaatcgcggaaatggtgaacggcggcgagtatttcttaccgtgcaacgacagcacgttgccggaacagatgaccgccgaattgaacagcacccgctgatccataatcatcagcgcatcggcaccgccggcccacaaggcattcaccaccgattcgacgtcctgctggtggatcacgtaatcgttgatattggcggtcgtgccgttgttgttgactgcgttctcccacaacggagaatcatccagcgttaccgttacgccgctgccgctgagcgcgggcagcatcaggctggaatccacattgctggagtccttgccttggttctgtgtgctgtcggtgccatcggtgccatcggccttgagcgcgtccgtaagattggcgacctgtttggtcagatcgctgacgtcctgctgcagctggttggcctcgtccacgccttgctccaccagatcggccgtatcgttggtggcggcaaccgtacgattgaccctcacgttggtgctcagcagaaaaccggtcaaggcaatgatgacgaataccgcgacaccaccccatagggagtgccgtgcaccgtgcttacctacatgtctggccatgaatttcctgtcttcttgccgactctggtcgccgctttcgagtgtagccactattatgacttttagcctattgaatggagactatgctgatggctgacgaagagctgcacgaaaccgactcgaacaaccagaaggactggcagagcgagacctcatccagcaccgttgctgacgagaccgccagcaaagacaccgagcagaacgcagagaacgcttctgccgaggaaggcgcggcttacggcgtgaatatggagcaggtgcaggccgtgctcaacgccactgccgataaggccacgctgaccccgcagatgcagcgtatgatgaaccgccaggcggagaacaccaagcgcgttgaagaaaccattaagggcaccaagtcgaacccgcgttggttcgtgccgctgttctgcgcgtttatgatcatcggcctgatttggtgcgtggtgtactacctctccccgtccggttcctggccgattccgaacatcggtgcgtggaacctcggcatcggcttcgccctgatcatgatcggattcctgatgacgatgggatggcgctgagttccgactcgttgcgcttatctatcggtagatcgtttttctatcgttaggttgttcttagttcttatacgaaaggccgacctcccgtatgcggaggccggcctttttcgtgccttagcctgttcatccacagctatccaccacttatccacgacttatccactacgttatccacagcctgtggatgaatcacacccatgtagttttccaccgaatgtggaaaaccatgtggataagtggtggataagcggcgtttctcggtgtatatctcgtgcataactttggcttggcatacatcgccacagcaagggaacagttatacacccgagttatccactgcaacaaacccagcaatgacgcggcattcctaacttatccacataagttatccacagtcttatgcacttttctacacacttgtgcacaagtcaccattgtggataactcgttatcgtggataactcgtcattgcgcgcatctcattactgtggataccttcatacggcacacacccactcaccgaacgacgatatccacatcgctaatatccacatcgccgctttccgcacatacactgatgccgggcactgcatgttccgcaatacccgacatcaatcgtttttttgcggccgtatcaagccatatcagtgcagggagccgaaactcatccacccgtaaggattggccatattgcacaacagaatcaacgcaatgaccagcaccaccatggcccagccgtacacctgcatgcgccatttcaggcttttaccgcgccacgccggcacaccacccaccagcagccatgtgagtattccacccactacaaagccgccgacatgcgcctgccacgccacgccaccgaccacgaacggcaaggcgaagttcaccgccatccagatcaacatggagcggatatcggcgccgatacggcgatataccaccagcaatgatgcaaacaggccaaataaggctccagaagccccataggctgccatctgccagccgatgcctcccggagccaccgcagcccacaccataagtcccagggagccgccaaggccggaaatcacatacagtcccaagaaccgccagtggccgatcattcgttccagcactgggcccacggaatacagagcaatcatgttgaacaggatatgcaatagcgagttcggcgcatgcaggaacatcgaggtgatgagcgtccacggctcagccaccagtctgaccggagccgccatgccgaggtacatcaaccaagccctcaggcccggggcaataaatcccaacaatacctccagtagccacactgccacgcacgcaacaatcagcgcccaggtcatcaccggaccaccgcgctcccactggtatcgaatctcccgttgtgtaggaatatgcatgcagcccactgtatcgaaggtctcggatgcgttccacgcgccgcgaagatgccgagccggccaagggcagacgggcgcggatgaatcgcccacgaatgtcattccacccaatcgtcacaaacagcggcctagaatagggagcagagtcggtctgaatgggcataccgaccagacgatccctagggaaaggagccgtcatggagaacaagtcttctaacggttggaagttcttcgcgctgctgttcggcggattgctcgccgcgcttgttggcctgtacatctacaagcagcagaacccggattacgatccgtgggaggagccgtgggagaacagctcctcgccggtcgacctaggtctgaataaggccgaggatgaggccgatgacgaggcgaaagccgccccggccgaagcctgatagggcggtctttcaacgcaagaagccccgcaaccgatggatgtcggttgcggggcttcttatgctccggcggccgtcaggccagaggagcagtgtgccagatacgcggagccgttaagcgggaagcccggtgggcttcccgtaggcgacgccgagcggcgacagccgcgaggtagaaaccagcacgtagctggcgcgccgctccggcggccgtcaggccagaggagcagtgtgccagatacgttccaaatagtcttccatggagcggtcggagctgaagtagccggagttggccacgttgagcagggccttgcggttccattcgagctcatcagcgtagagggcctcgatctcggactggatgtccatgtaggcggagaagtcggccaaggtcatgaaccagtccttggtcagccagtcggccacgagcggggagtaggcgttgcggtcgccgttggagaaggtgccgtcggccaccatatcgatggcgtgcttcaggcgcgggtcggcctcgtagtaggaggcgggattgtagccctcggcgtacttcttctcgacctcgtcgacggtcatgccgaacaggaagaagttctcggcgccgacgcgctcacggatctcgacgttcgcgccatcgagcgtaccgacggtcatcgcgccgttgagggcgaacttcatgttgccggtacccgaggcctccttgccggcctgcgagatctgctcgtcgaggtcggtggcgggaatcaggtgctgggcgaggcgcacattgtagttccacgggaagtacacggccagcttgcccttgacgtccggatcgttgttgaccacgcgggagacgttgttgatgagctggatggtcatcttggccaggtagtagcccggggcggccttggcaccgaagaacacggtgcgcggggtgacgtcctcggccttgaccttgccggacttgatgtcggcgtaggtggagatgacggacaggatcttcagggactggcgcttgtactcgtgcaggcgcttaaccatggtgttgaacatggtgttcgggtcgagctcgaagccgtactcgcgcttggcgtaggcggcgaagtcgaccttgttggccttcttgacggcggcgaacttcttgacgaattcatcgtccttggccagcggctcgaggcccttgagcatctccaggtcggagagccacttgtcggtgccgaggccctcggtgatgaggtcggacaggcgcgggttggcgagcttgacgaagcgacgcggagtcacgccgttggtcacgttggtgaacttgtccgggtagacgtcggagaagttcttgagggtgacgtccttcaggagctgggagtgcagctcggccacgccgttgacgtgggagccgccgtaggtggccaagtaggccatgcgcacggcgtcgccagtgtagatggccatgtccttgatggtgttcttgtcgacgcccttggacttgagctcgtcctcgaactgcgcgttgatcttctcgatgatctcaaggtgacgcggcagcagctcgccgatcaggctggccggccagacctcaagggcctccggcagcagggtgtggcaggtgtagttgaaggtcttggtggtgatggaccacgcggtatcccagtcgtagccgtactcatcgatgaggatgcgcatgagctcggggatgccgatcaccgggtgggtgtcgttgagctggaagacgatcttgttcgggaaagtcgtcagatccggcttgtcctggcccgggtagaagacgcggatggcgtcgtgcagggaggcggagacgaagaagtactgctgctcaaggcgcagttccttgccgaccttggtggagtcttccgggtagagaatcttggagatgttctcggccttgacctgcggggtcacggcttccatgtactcggagcggttgaaggcgagcagatcgaactcgtcgtagctcttggcgctccacaggcgcagggtgttcacgcggccggacttgtagccggggaccaggtagtccaccggcacggcgcgcacggaccatgcgggctgccaggtcttggtgccgtcggcgttctcgacgaccttgccgccgaaggaaaccttctggtcgcggttgtagtcgatgtggccccacggctcttcgttggccagccagtagtccggggtttcgacctgcttgccgtccttgtcgaactcctgcttgaagatgccgtacttgtactggatgccgtagccgaaggccggcacgcccagcgaggcgagggagtcgatgaagcaggcggccagacggccgaggccgccgttgccgaggcccggctcgtattcggcgtcgacgacgtcctggaccttgaagccgagggcttccacggccttgtcgaactgctcggtcagaccggcgttgagcagcgcgttgcgcagctgcttacccatcaggaattctgcggacaggtagccgacggccttggtgttgccgttcacggtgtcggcctgggtcttgaaccaggagtcggcaaggtggttgcgcacggccttggatgcggcgacatacacgtcagcaggggtagcctgctcggtggtgacgttctgagtgtatttcagttgttcacgaatctcgtcggcgaattgttccgccgtgacaggagacttcggtgcggtgatttcggtcattctgactttccttccgggataagtgcccgtgtttattatgccgcgcgataggtatcgtcgcacaaacgtaagcatgaactctccgtaacgacgatggcggagcgttcttgcatacgttctcatttagagcgtagcacatgccccgatattccgcatcacaccgtatgccatcgtttgcattatggaagatcttccggctccggtgccatgatgggatacatggcagtaattcttgaaaaagacctgaaacgcgggcatgacgcgctggtgcaatggcgtgccgcggcccgggagctggcggacaacacaccacatcgtctgaccgtctcccctgtcttgccacgcccggtgtgggcgatggccgtgcgctactcgctgtttctgctggagcggcgcgcacccggccctggcgtggaggtgcgtgtcgcgccgtggggggcggtcaaaatcttggacggcccggaatcggacccgcataacctgaccccgccggacgtcatcgagctggacccggaagtctggctgcggctggcctgcggcatcaccacatgggcagaggaaaaggacgccggccacatcagcgcggtcggcgagcgcgacgacctgagcgacctgctgccgctgtgaggcgcgaagcgtaagtaagccaccagcggcggcaccatcagccataaccacaaatccccttgtgctcaaccaagcacaaggggattattacgagaagaccggcgttcagctcttcttgggcttgagcgcggaaggcatgggcatcggaatcggcttgcgcggggccggcttcggtgcggcaggcgcggaggccgggaactcgccgctggtcgcctttgcggcggcttcggcagcccacttggcgtactcgtcgaggtcatcctcctgcgtagcgggagctgcctcggcggcaccggaagcgtggtcatcagcagcggaatccacatccttgtccgcatactggtcatcgatgtcggcgaacgggtcaggagagcccattcccggctcctgctcgctcagctcttttgccagctcatcgtagtcggtatcggtggtcaggtacttgagctttcgggcaattttctgctgttttgctttttgacgtccgcggcccatctgaccccctgcgattactgtgctgttcgattcatcaacaatagagagtaccactaatagtggcttgttcgttgtcggctcacacttttaccataaaaagcgtttatttagggcatattcaaaggattttcgcatgaccgacgagcagcaactgacagcggcaggcaatgagatgagcgcgagcttcctcgcggccaaaaagcgttcggacgaaacgctcgccaagctggaggccaagccgtcgtccttcaccatgttgaccggcgaccgcccgaccggccggctgcacctcggccactacttcggctcgatccgtgagcgtgtcgccatgcaggagcgcggcgtcaacacgaacatcatcatcgccgactaccaggtgatcaccgaccgcgacaccaccgagcacatccaagacaacgtgctgaacctggtgctcgactacatggccgccggcatcgatccgaacaagaccatgatgttcacccactccgccgtgccggccgagaaccagctactgctgccgttcctgtccttggtcaccgaggccgagctgcaccgcaacccgaccgtgaagtccgagatggaggcgtccggccacgcgctgaccggtctgctgctcacctacccggtgcatcaggcgtgcgacatcctcttctgcaaggccaatgtcgtgccgatcggcaaggacaacctgccgcacgtggaaatcacgcgcaccatcgcccgccgtttcaacgagcgttacgccaagaagaacccggtgttcccggagccggccgccattctgtctgaggcaccggagattccgggtctcgacggccgcaagatgagcaagtcgtacggcaactccatcatgctgggcgccaccgccgaggaaaccgccaagctcatcaagaagagcccgaccgattccgagcgccgcatcaccttcgacccggttgcccgcccgcaggtctccgccctgctgaccaccgccggcctggtgaccggccgcgacccgaaggacatcgccgaggagatcggtgattccggcgccggcgcgctcaaggcatacgtcatcgaatcagtcaacgagttcctggccccgcaccgcgagcgccgcgccgagctggccaaggacatggattccattcgtgacatcctgcacgacggcaacaagcgcgccaacgccatcgccgaggagaccctcgaccaggtgcgcgaggccatgggcatgaagtactgattttcccgccgctcgtagcaagacgccgtgtcagccccaactgggcaactgacacggcgtttttgtattgcggcgtctgctgtgtcctatcttcacttcgaggggcggatttcttgtttttccgtgcaacgcggctatcaagacggacctctgttcacttcatgccgatggcttgcatcaatacgtacgctccccgcacagcaatgtcattacgacgtgttgcggcatagcgcgcatggcttccggagtatcggcggcgtatgggtcggcgtccagcaacaccacatcggccgggtcgccggatgcaaggcggtcacggccagtggcggtcgaggctgccagcgaggtatgcacatcgaggcactgctcgggctggaacggctcgcggtcagagctttcggtgccgagcacggcggcggaaatggccagccacgggtccagcggggccacgggcgcatccgagcccatgcgcagcgtggtaccggcgtcgtggagggccctgaacggataagggatgccggccgggttggcccagaaacgggtgatgacgtcgcggtcatccatggcgtgctgcggctggatgctggccgtgagccccagctcggcgaaacgcgggatatcgacgggtttgagcatctgcgcatgctcgatcgatccatgtgcgtgcgtggcggcgactgcgttgagcgcaatggtgttcgcttcgtcgccaatggcgtggcaggcaatgtcgaagccatgctcggtggctaggcgcatatagtcttcgatttgctgcggcgtgtagctcagcgtgccatacgtcagcggctcgatgcccgaatacggcgtggagcagtaggcggagcgggtgttgagcgatccgtccgagatgagcttcatggcgcccacatggccaagcccggcgctgcccggcaattccttgccggtatgccaacccgcgtcaatggcggctcgcaaccgctcggggtatacaccggcgtccacgcgcaaaccgttaatgccggccgcgaaacgattgatccatgtatcgatgttttcggccatttcataatcgcggatgcccaccacgcccttgcttgcggcgtcctgttcggcctcgcgcagcagacggtcagtctcttcagcagcgcccggcgccttgtcgaaggcggtgtaggcgttgaaccattcgagttcaccgaccagaccggattcgtccacatgtacgccaagcctgcgggccgcggcggaattcacccatccgcagtgcatgtccgcgctggagagggccaccggctgttcgccggtcacggcgtcaattgcggccagtgtgggctgctcgtcgtcggcccacagcgagtgacggaatcgcatgcccaccacgaaggcatctgggtcaagcgtgtcggcggcgcggcgctcatccagatgacggcgcaacatgtccatcgcttcggcggcggaacgggcattgatgaggtccagtcggcccagcgtcttagcccattgcgtgaagtgcgtgtggcagtcccacaggccgggaataacccacaggccgtcggcgtcgatggtggtttcgtcggcgggtgcggcggccgacgttgggattgagacgctgccagaagcaatggcattcgtcgcgtattccaacgatgtcgtatgcgccttagtctgcatcgtgctgtccgaagccgagaccgttccagcagggccgacagacgcaacaaccccatcgcgaagcaccacatccacgcggtcctgagaccccggaacaccggcattgacaatacgcaccaagctactcataccggccatcatgccacctttgcatgaacgccatggagattcgtccaagttgaatcgcgccgtcgacggcgattcccgctggctgcctgcaaacccctacgttccatgtaattgcgggatggcctgcaactgcgatgaacacccatagtttatccaccgacttatccacatttatccaccgaaaaattggggcggtagacagggccggtagccggactctacactgcgaggacaaagcgaacatcacgaaggggtgatcatcatgggtagctcaacggcattgaccgagctgacaatgcagaagtaccaacgaatgcagacgtgcgcagatgttcaacgacgaagcgcatggcgcccaccctatgccctgacaacagcgttggagcttttgtcaattgaagtaccccgcatatcaagcaaacacagaggccttacaactacaaccattgttgcggttccacacgccaatgacaaacggcacattgtgggggtcaaagtggttgtatggccttttccactagacacggtcataatcgagggacaattcacatgcacttcaccagcttgcacatgggccatgttctccacgtatctcgaacttgaagaactcatcgttctcgctgattccatgatgcgacgagatcgaaggctctgcagaacaaccatcgacgccctttctctgtatctcgatgaggccgaggcccaggtgcgagccgacaaagagaatggcaccaattcgtatttgttccgcgggtataacaaatgccgtcgcgccctacttttggcgcgcgcgggcacagattcctccatggaaacacgaactcgtttggttctcttgaaatacggtctgaattgcccgcaggtgaattatccaatattcgtaggaaacaacaccagacccatatatctcgatcttgcataccctgaattcaagatatgtatcgaatacgaaggctctcatcatgccgggcaatggctgaatgacgcgagacgccgccagatgatcgaagatgctggctggaagtacattcaagtcaccaaattagatattggcgacgaagcgggagaagaggcccttgcccgaagagttgccgaaaggatacaggaggttacgggcaaaacggtccagctcacgatgcggcaaactacccagcaaattagcgatgtccgaaagctacgccgtattccactgtacaaacggctgaaattcgagcctctgctgccaattattccgacgacgcaggaataataagcccggtagagtcagtccgcaccgtccgcaccgcgctacggtattcaaaacccatttcaaggggctgatttggcctccgccggaggtctacttccgtttcaaggggctgatcatccggtagaccacgtgtatcaatgcccttacgtcaacgccattccgccgttttggagccgcgtctactcaggcatcagccccttgaaacggaagtagatctctccagaacgtcaaatcagcccctcgaagtccgttttggcctcaatggttcctgccgaaccacaaaaaagccactcctctgccatacgagccgaccgcacagcaggcacgtgtcatttgccgctgcggacctcggactccatggcttccatgggctcgtcgacgagcacggtgccggacggcagggtgccgggcagcggatcgtccatgtagtggtcgaattcgtagagcatgcgcttgttcggcttggcggtcagcaacgaaaccaccacgatgaacagcagcgaaatgatgaacgccggcagcagctcatagatggcgaatacgccgcccaagggcttgacgaggttgtgccagatcagcacggccgccgtgccggacagcatgccggccacggcgccggccttgttggcgcgacgccagtatagcgagcacagcatcaacgggccgaatgaggcaccaagcccggcccacgcgtaagacaccacctggaagatcgacgagttctggtcgtatgccaccagaatgccgaacaggaacatgaccaccagcgtgaccctggccacgatcatgacctgcttgtcggtggccttgcggtgcagcagcccgcggaagatgttctcgcccatggccgaagcgccgatgatcagatacgaggagctggagctcatcgaggccgcgaaaatgccggagaccaccacgccgcacatgaagctcggcagcagggtctgcgccagcacgatgaagatggtttccgcatcggtggaggtcagcagttcggtgggcatcatcgcgcgccccaccaagccgatgcacaccgcgcaacccagcgaaatcacgcaccaggaggtggcgatgattcgggacttgcgcacttcttccacgctgcggatggacaggaagcgcaccagcacctgcggcataccgaagtaacccaggccccacgccagcatggagatgatggtgatgatgccgtagtcggagggcgcgccgaacacggccttgcccgcctcgacgagctgctggccggtggccgggtccagcttgggcgcggccacctgcgtgccggacaggtagccggggatggcacgcaggaattccacggtgttgtcgacaccgcccgcgctggccacggtgccgatgaacaccaccgcgagcgcgaagaacatgagcatgccctgaatgaagtcggtcatcaccaccgacaagtagccgcccaccacggtgtagacgaacacgaccaccgcgccgatgatcatcatgacgtggtagtcgaaaccgaacaacgtggcgaacagcttgcccacggtcacgaagcagctgcccacgtacacgctgaagaacaccaggatgatcacggccgcgatggtggagatcacgcccttcttgtcatggaaacgcttggcgaagaagtcaggaatggtgatggcatcgtcggtcactaccgagtagcggcgcagtcgccgggccacaagcttccagttgagataggtgccgagcgccagtccgacggcggtccacatcgggtcggccgcaccagtgaagtaggccaggcccggcaggcccatcagcagccagccgctcatgtcggaggcttcggcgctcagggccgtgagccacggccccacgccgcgcccgcccgcaaagtattccttggaggaggagttggagcgtttggagtagatgaatccgatggacagcatggccgcaaaatagatgaccatggccagcagaatccagaaatcgttggccaactgcgcccctcctcaatcatgacgccaagcggctaccgccatggcagaactatgtgctgatatgcgattgacgccggagcggcgtcatacagaccgtcacagccgtgaatacggccgcaacgcacttcgcctgatggtagtggatacaagggctcaagcaccttccaccgtttccatactgagacgctgttttatccgagctcccccccacctgaggagagccaagatgacggtcagatgtcgtagcgccaggacttgtcggtcaccacgcgggccatcgccaagccgatcggcagacagataatcaccatgaacgcacggaacgcccagtccagcgcattcatggtctggaagctgccgaggtaccacatggcacgatacatatacagaccgggcaccatgatcacgatcgacggcacggtcaggcagatgcgcgggtagccgaggtgcggcggtagccagccacgtcgcacggatgaacgccacaccgatgccagaatgcccgccagaaacgcgccgatgaaggtagccatctcgggtgccacgttgaagtcttgcaattccaagcgcagcgtgtccgtgatcgcaccgatcagggcggcggtcaggcacatgcgctgcggcgaattgaacagcacggagaagccccacacgccgacgaacgccgccacgaatcgcagcaatccgttgacccacgggtcaagccccagtggctcaaagccttccgggtgcaggtgcaccatcacggccacggcccagcctgccagcgtggccatcaggatgatgcacagcacgtacgccacgcgctggatgcccgaggggaagtcgattttcgccatgtcgagtccgcctgtgatgagcgggaaaccggggatcacgaacagcatggcgccaatgtaggccgtatcgtgcgagagcgcgactgggtcgaaaatgccgatgagtcgcagggtgccggtgcaggcgagcgccgccgcggccacgcacacaaaggtgacgaagaactggttcagatggtatgcaaacagccggcgacgcatccactggccaaggcccgcgcccacgaacgcaccgatcatgtcgtatgggccgccgccgagcaggaacacgaaggccgcgcaggccagggcggaggccagaccggagaaccacggcttgtacagcggcttgcggcgctcaatcagatcgagtcgctcgtgcgcctgccgcacggtgataccgcccttggccttctcttcgtcggagcgctcgttgaagtgttcggcgtattccttgggcacgcgattcttgcgcttcgtactgcttgcagcagggctttcggcggttgcgccgttcgccgcgttcgccgattcaaccgactcattggagtcaccggtaaacacttcggcatcgtcgtaggccttctcttcggccgctttgtcttcgaccgaagtgacttccgcgctgtccgccaaaagtcggtgggcttcttcattgtcatcatccaaggacttggccacggaggtcacgagtaccttggttttcaacgcaagatccagcgcctcgtccacgctgccgttggccgcctcagcctcggccttggcacgttcgcgcaggcgcttggccagatcggccgaatactgcgaagcgtcacgttcgtccaaatgcttgaccacgccatcggacagttgcgaatcgacgtgatacatcgaccccttgccgagattcacggagaaccagtcggcgaaatgttccagcagccagatacgttcggtgttcacgccggtggtcggcaaatccacgacttcggtgatgcggttacgaccatccgtgcaggtggcctcgatatccgtcaggttcacgtcggcgcgtacgtgcacgcccagcgggtaggcgatgcggtgcatcatttcacgcacgcggaaggagccggtgccggctcccaagtccagcatgccgacccgtacaatcacgctggcttttgcggcgataccggcgtccaccaccggtttttcccaatcgcgcgcaatatcttccatgtccagcggaatggagtgggtgtggaatttacgtacagccgttgcgcctttcgcttcgggcgcactttttttcttctgttcgctcacatccctcattactactccctgcctcccccgccagcaatcgtaaggtgctcaaatcttccgcgaatcggacagtgtctcatatgctgtccgatattcggtctctataggtggacaacttggcgcactatatggactccgtaacgcaaatagcgatttcgcggggatacactattgcccacacaacaaccacgttgaatatgggctgtgggctcgcaacgactggcctcaacaactgcggaggagccgcagacgaccggtagaccgagcaacctgttattcggcaaaggaggttatatggcaacacctgaagaacagatcactcccgctgacgccgccatcgtcactaccgggaccggccgaaagggcccggaggagcatgatcttcccgaaagcctgaagtacgacatggatctgtgtcttgagatcctgcgtaacgtactgggcgaatacaaccccgaactgctgtctacgttcgacaccgtgcgtcattacgcggtggaggccagcgccgagcatttcgccgagctgaaggatccgaaccccgaccaggatggcctgaaggaggccgtgaacgtcatcgacaacatgacgctgcacgacgcccagctgctggcccgcgcattcgccacgtatttccatctggcaaacctgtccgaggagaactaccgtgtttccgtgctccacgagcgcgagaacaacgtgtccgttgaccaggcggtcgacccgatcaacgagctcaccgtcgcctaccaccagctcatcaatgagactggcccggccaaggccaaggaactgctcaaccagctcgaattccaccccgtcttcacggcgcaccccactgaggcccgtcgtaaggccgtggaaggcaagatccgccgcgtttccgaattgcttgaggagtacaagcgcctcggcggctcggataagaaggaatgcctgcgccgtctctacaacgagatcgacgccctgttccgcacctctccgatcgcgctgaagaagccgaccccggttgaggaagcggacacgattctcgacatcttcgacaacacgctgttcaacaccatccccaaggtctaccgtcgcttcgacgactgggtcctgggcgataaggccggtctcgtcgagcccgcttgccccgcgttcttccacccgggcagctggatcggctccgaccgcgacggtaacccgaacgtcaccgccaaggtgagccgcgccgtggcccgcaagttctccgatcacgtaatcgccgcccttgaggaagccacccgcaccgtgggccgcaacctcacgatggaagccgagaccacgccgccgagcgccgagctcaagagcctctggagccaccagaaggaaatgagcgagcgtctgaccgacaaggccgccctgatctccaccaaggagatgcaccgcgcggtcatgctggtgatggccgaccgtctgcactacaccatcgagcgcgacgccgacctcatgtaccactcctgcgacgacttcctcgccgacctcaaggtggtccagcgttcgctggccgccgccggtgccaagcgttccgcttacggcccgctgcaggatctgatctggcagaccgagaccttcggcttccacatggtggagatggagttccgtcagcactccgtggtgcacgcccgcgcccttgcggatatccgcgagcacggcctgcacggcgagcgcggcgaactgcagccgatgacgcacgaggtgctcgacaccttccgcgccctcggtgccatccagaagcgcaacggcctcaaggccgcccgccgttacatcatctccttcaccaagagtgcccagaacatcaaggatgtctacgagctcaaccgcttggccttctcccacccggaggacgtgcccaccatcgacgtgatcccgctgttcgagcagcttgaggatctgcagaactcggtggacgtgctcgaggaaatgatcaagatccccgaggttcaggctcgtctgaaggccaccggcaacaagctcgaggtcatgctcggttactccgactcctcgaaggacgccggcccgacctccgccacgctggccctgcactccgctcaggagcgcatcgccaaatgggctgagtcgcacgacatcgatctgaccctgttccatggccgtggcggcgccgtaggtcgtggcggcggccccgccaaccgtgcggtgctcgcccagccggtcggttccgtcaagtgccgcttcaagctcaccgagcagggcgaggtcatcttcgcccgttacggcaacccggtgctggccatccgccacgtcgagtccgtggctgcggcgaccttgctgcagtccgcgccgagcgtggagaagcgcaacaccgagatgaccgagaagtatgccgacatggccgctcagctcgacgaggccgcgcacaaccgcttcctcgacctgttgaacaccgacggctttgccccgtggttctcgatcgttacgccgctgaccgaaatcggcctgctgccgatcggctcccgcccggccaagcgtggcctcggcgccaagtcgctcgacgacctgcgcacgattccgtggatcttctcctgggcccaggcccgcatcaacctggccgcctggtacggtctcggcaccgcatgcgagaagttcggcgatctggagaccatgcgtcaggcttacgaggaatggccgctgttctccaccttcatcgacaacatcgagatgtccatcgccaagacggatgagcgcatcgccaggatgtaccttgccctcggcgaccgcgaggacctcaatgagaaggtgctcaacgagatggagctcacccgcaagtgggttctggccatcgtgggcgacaagtggccgctgcagcaccgccacgtgctcggccaggccatccgcatccgctccccgtacgtggacgcgctgtccgtcacccaggtgctcgccctcaggtcgctgcgcaagaaggtggacaaggaagagctctcgcaaagccaacaggcaggattcatctacctcatcctgtgcaccgtctccggcgtcgccgcgggcctgcagaacacgggctgattcccggccgaccgatcgggaaaagcgagcggggaggttccgtgccgataaacggcgcgggcctccccgttcgcgtcgcacggccctagactggccggcgacggcgcgcatagaacgggcgcgctggccgagtgacagtgtatttcgtcaagtcggtgtttcgtgtttagtcatgtatttttttcgggtttaggcagttgcatgcattttccttatttttccggttgcgcggaggtgttcctgccgaacatgagggcctcactgacgcggcggctctggccggtgaactcgaggagccgcccgtggtgcacgatgcggtcgatgatcgctgcggcgagtttgtcgtccgcgaagaccgtgccccatttactgaactcgatgttcgtggtgaatatgatgctccgtctttcgtagctgcccgcgatgatctggtagagcaggcgcgccccgtcgatgtcgaagggtacgtagccgaactcgtccagtatgatcaggtcggcacggccgatgtcccggagcatcgtctcgagcgtgccgtcgcgtttggccttgcccagctggaggacgagctcggcggtctgatggaaccgcacgcccagccccatgtcgatcgccttcatgcccagcccgatcgcgagatgtgtctttccgcgcccggtcttgccgtagaacaccaggtcctgcgcgcgcgggatgaaaccgagccctaggagctcatcgagcatgtagccgtcggggagcctgacgttcgtgaagtcgtagccgtcgagacccttgacgacggggaaccgggcgcggcgcaggagcctgtcgtgcttcgcgcgttccctgttcgccagttccgtgtcgagcaggcggtggacggcgtcgacctggcggggcgtggcccagccggcgaattcgtcgatgctcgccttggagatgaacagcttgcgggccttctcgtagagcccttcgtccgtcttcgtgttcatcgcccgccttcctgcacgccgacgtccgcggtgaacgcgatgtcgtattcactcagatccggcctgtcatcgtcgtattcgatacccgccacgccctcggcgagcctggccgcgagcagtgtgacaccggcgcggtccgccccgccggtcgattcgaggatggaaagcatcgcctcgaccgcgttcgcccacccggattccctgtcaacgcgtttgagggtctgcagcgcctcgttgcgtgtctgtctgtcctgccgatccagccattcccgcaacgggtccggcaacgcgtcacgtacccggctgttgggccaggacgcgggcttgttgcacagcagcgccaactgcatggacgggtcctcgctgttcgtgctggcctggccgtacgcccgaggatgggtcgccagatgcttgcccgacgagtcgaggaccccgggcctcgagcgcgcggaggcccacgatcacccctctgcccgcgttcgcccggtccgcggaacagcgatgccgtccccgggcgcggccacgccgtaccggtcggccttcatatgccgccacgtgaccacgtcgaaacgcttcccgggcaacggcagcagcgccgcacggtcctcggagaacaggccacgttcctccgtgtccttgcggtaatgcggtttcgtggccagctccaggcaccggtccggcagcccggcgttaaagttctccaggctccatacgctcggccggggcacgaacagcttgcgccgcaccatgccgaccttggactccaccgcgcccttctcatgaccggaatacgggttgcagaacgaacaatcgaacccgtaatgcgcctggaaggcctggaacaggtgcgtcaggcgcggctcgcgctccccgtaccccttatggcccacgccggcggcgttatcgaacacgatccgctccggcacaccgcccagccactcgaacaggttgcgcaacgccaggcacgtgcactcagcgttctcgcccggcatcaactgcaccagaccgacgttcgaatacgggaaatcaagcacgaaatgatgcatccgctgcaccacgccgcgcaacagcacgtcgacctcgccgaaatcggcctgcgcctcgcctggatgccataccagatccatgaacgcctcatcacgctccgccgcgaactcacgcctgagccgcgccaccgcccgcgtcaccgtggacagggagacctccgcgccatgctcgtccctcaaccgctcccagatcctggtcgcggtatgccgctgcttgcgccagttcgcgcgatcctccgcgagccactgctcgatcacgggcagatacgggtcgatcaccgacgcgcgcggctttctcaccgacggcacggccgacagatcctccttcgcgaggtacttacgcaccgtcggctcgctgacatgtgttttccgcgcgatcgacgcgacggattccccgttccgccgcaaacgacggatagactgtacttggggcatgctgatcataatcctttccggtcctttctggcggagatacaagcaccatccagttaagaccattccgtggtcggcatgctctgcctaaacccgaaaaatcatcgtgactaaacccgcaacaactaattgaacacaaacaagtgacagactcggatgatcggaggggacatggacaagccatcgaatgagcgcgggagcaccgggccaacggacggcatcaaggcggagggcgatgccggaaacgaacgccatatttgcaaagcgaatccggctatgatcgatgacattgggaaaaaacatggcctggaagatacgtcagaaaatttttccggcaagaaatatgctttggcaccgaaagcagctaccaaattccttaaggcgagtagatgctatgtggctttgggcaaagccagacgcgtgctatggtggctgggattactgctgctttcaccagcacttattttgtgggcggaatggggcgccaatggcgatgatgatactataatctgcagagtcttaacgttctcttcctcttcgtgcatgaatttaactacggcaactgagtatgtacgtagacttaccttagtattgattatgggggtagtctgctggattgcggcgcttgtcatctttggcgtgcgttcatatatgcgatctgtatatccggaacttcgtgatcattcctcttccgcctcgcatgtccttgtgggaatcatatcgtttctcgtgctggtcatggtctttcccgttcttgtgataacgctactttccgctctaatgactctatgacgttttaccagaggcgcattgcgtggaatggctgaatcattccacgcagtgcgatcacaatcatgattgattaacggttcggattttcaagagattcagcataggataatgccaatataccagcctccgcttgactcgggagtcggtctgcatgtgacgcaatgagcagtgcttttttacttccggatacgttatcgaatattccaagatcaattccatcaacgagttttcgaaatgcgatgaccaggttgtccgcacttcccttgaaccgggactgatagaaccgtttaattcgattcgtctcgctttgcgcgaacatgtcccgcatagcggtggacaaagacctttcggaagaattgctctgcatggaccgcgccagcaaccatgcatcacagtccgcgagaacatcgctgtaactgaatcccatacgagcgtcttgctcgccgagatgagcgtgcagccatgacgccaggtcctctttcggggtattcgccaggtagcttccccaaatctgcagcaaatccagagcccatccgcccagatcaccgagaccatagtccattggatcgttcgtaacgccccatgtcaagtatcccaaggatgtggcagccatatgggcgatgtcccgattgggcagcgtgcctttgatgacaggctgtgcatcacatgcgacaccgcatgcctgacgcgacaaggccaattcgctgggagtaaccggctccggtgtgtatgcatgccatagtgcctgcgtgccggaactaccttccgaccagtacgtaggtttgcggagccattgcaggatgagttgaccgatgctgtcctcataaaccgccacctgggtacccagagcggcaggggctttgtgacactcctgctcgggtgtcgccgccggcctgcggaacacgggctgatccgcggctgtccgaccgcttgatgaacggggaggttccgtgccgattgacggcgcgggcctccccgttcgcgtcgcacggccctagactggccggcgacggcgcgcacggaacgggcgcgcgggccgagcgacagactcggatgatcggagggggacatatggacgcggaaagggacacggacgggacgacggacgcgcacgagggggaccacacgcccgcggacggtgccgggacggagggcgaaggcggcaagccagacactaggccgggcgacaaactcgcgaccatccgacgcacgctgtggtggataggactggcgctacagctcccattcgctttgactctgatccattttgataccccttacctgatattggagcgtatcctatgcgctattccgccaagactggcaagcgacccgtcatcaatcgtcggcattcccgcacttgaaacggaatggtgtcgagaattcctggcactagtcctgggcgcagtttgctgggttacagctggagtaatgagattagttgcggacagcccatcaaaccatggaaaagaaacccttcctgtacgcatcttcgccggaatcatcaccatcatcgtattgatggccaccggtattacaggactcttcctcggcatagcggccttttagaagtttccccgtatctggcagaggaattccaaatcgaaagcacaacagcgaatgtgtgggcagacgacacatctgcccacacataatgcattatgcgagctaccgtcttggctgatcaatgaatgcagcgaacgcccgagcactcacttcagcttcctgcttatcaggaagcttgtctgtaccggcagccttttttaggatgctttcgctcattccaatatttgtcaaaccaagtgcatcaagaccgtccgccattgttgaatatgcactcaccacattatctgcgcttgatgcaaaacgttcgtcgtagaatcgaacgatacgatgggtctcactctgcttaaacgtttcacgcatagcagcagaaaacaagcggtttcacaacaaatcatcattatcgaaaacacgaatcacatggctggcattcctcttgacgataacatcaatatcgtcgaattctcgaaggacaagcacaacggacgatacggatacttggacgggatttacgatgtgtctgacgaaagttaacggcggtcccaaatcaagtcaccttgtcgaggagcgaacccgcgcagccgcactccccatgattttccaaagccattgaccggactaacttgagcgcatcgtgggcgacaagtggccgctgcagcaccgtcacgtgctcggccaggccatccgcatccgctccccatacgtggacgcgctgtccgtcacccaggtgctcgccctcaggtcgctgcgcaagaaggtggacaaggaagagctctcgcaaagccagcaggcaggattcatctacctcatcctgtgcaccgtctccggcgtcgctgccggcctgcagaacacaggctgatctacacaccagcgcatatggggaagccccgctcgatgtgagcggggcttccccgtttttgtgtgcatctttcatcatcttgcaataattcttacatgtaaacagagagttcttacatgaaagaattattgaaaggtgatgaaagaacttactttcacgcgcgccaatcatcccaacacgtatcgggatgacggcccattcccctcgcggcgcaacttgcccgcatcctctagcttcttcaacaaccggtatgcactgatatagctcaggccaaacaaatccatgacatccgccgtagtgacgacaccatcatttttttcggcgaactccagaacaaggccactgcgccgggtggcatcgatgtcacgctggcgcacgtaagacgccagcccctctgaacgtttgtacactcgggcactcagcatatacgaacgagagctcccgctaccgaccccctctaccaaaccagcttccaccagattctcaacagcggacacgatgcgtcgatgctccaaatgagaaaaatcacacaattggaccacggtaagcctacgatgctcacgcagcagcgagagcacaatcagtgaccagaccggcaatggagccccacgtcgacgttcctcgtcgccaatcatggttacgaatgcctcgtcaggtaccacgcggcgcaagaacaagataacttcctcagcactggactgtgaataatccgggaaagaaccacccgccgcaatcgacccggcatagatggtatccacgcctcgtccggtgcgttcaacatatccggcagctttcagaatcagggcaagctgcggattgcgggaacgcggttgtgcagtaagcaggttatcttcggaaacaccctctatgaatcctccgggattagctatggtcaacccatcatcatcaaccaggaatctcaccgaacccattcgtgcataatcgcgatggcaaaaagcgttaatcattgcctcacggaatgcccctcgatcgaagtctggcagatcgacacgaatcaagccgctcatgacttcgtggctgggattccatggctccatcagctcgcctacacgatcaaacatatccaccaaaggcaacacgaacggatccatattgacctttggagacatgcctttcatcacttgaaaaacagccgatgcggctggaaccgatcgatgaatagcatcaaccgaaccaatggtgagcagaccagcaacagatggctgcaatccatacgggccatcaacaaccagctcaagtgcccgatcgaaatcctcatcagtaaaagacaacaacgagttttgcgcattggcactgcgaatatggcttctcaacttgttccgtgagtctggattcaaatcgtccaaccgagcctctggtgcaggttgcgcgctgaaatcgtagaaccgttgttgagataaacggctaatgaattgggcaacaaacagcggaacgacctcaggcgagccgtctgctttcagccggcgctgcaatgtcttcccctgactggtagatacgatttgctgactgttatccacctcaatactgactattggcacctcgttctcatacaagagcgtcacgcgagcaggaagctgcggaacagtcttattgaaaattagtgccgcaagtccattgatattgcgatgctcttcacatacgccggtcacagtgccatcgtcttcaataccgagatacagtgtgccgccttcggtattggctagagccactacgttgtcaacaatttcatcatgcgattgaggacgcttctgctcactcttgaactcaactgtcaaactttctttagtcggcaacatgagcatcccctttcaccatcttgcaataattcttacatgttaacagagagttcttacatgtaagaattattgcaagatggtgaaaggggtaaagagcaatccatcctgtcatctccagcaacttaaatccgatcatcgctgctttcggcatatctgatatcagccgctggtgccagtccaatcacccaattgaagctcaacacggccaaagactctacgccgcagtggattcgcgctcgatgagcttatagcccacattcacggtctgcgggaagaactcgtcgtccaggttctcgatacgccgcataagcaaggtcagcgcggtatccgccatgcccttgaaatcggtggccacggtggtcaaagtcggcacgctgtacatgctctggctcaggccgtcgaagccgataacgcgcacatcgcccggcacacttacgccatcgtccgccagaccacgcagaataccgagcgcaataccgtcgttcaggcagtacagaccgtcgtacttgcacttgcctttcttggccaagccgcgcccggcctcgataccgccgtcaatcgaccacgaggatttgatgaaatcacggcgctcgtcaaacggcagtccggccgcgagaatcgtctccttggcggcccgcatacgaatatcacgcgagccgggaatgatgttgggattgttgggatcgtgattgtcgccgacgatgccgatgcgcgcacagccacgcgcgataaggtgttcgattgccgcccgtgagccggcgtcgctcggcgcgttcacggtgtcgatgggcaggctggtgtcgtagttttccagcatgacggccgggtgccgcttcaggatatcgaccgcacgtggcgcattgatggcgatgatgccgtccgaaaacgtgtacgacagatcgttgtcgtcggtaagataccgggacagttcgatgagcatgtgcgagtcgcgcttgtgcacttcctcagccacacacatggccagatgggagaaatagtcgccctcgaggcccgaggtaaggaaggtgatggtatcggaccgcccagaacgcagggaccggccagacaggttgattttgtagccgagtttgcgggcggcgtcacacacgcgttgcgtggtttcgggcttgacgtaatccttgcctcgcagggccgcggaggcggtggtggcggtcactccggccagttcgccgacatcctttaaggtcaccatcgttaccatctccgcatatcacgaaccttatcgataagaatccatagtaccgcccacatctcagccgaggatgagaccctcggtcgaggccctgcccggcgactcgaacgccgcggtcaccgtggtgagcaccgacgctgcaaacgaaaacatgtcaaaccaagaaatggacatgacggagtcattgttttccgagagggatatgccgcgtccacgggcagacgtcacgtatcaatcacgccgataccgtcatataactgttttcgatgtgagaaagctcatagcttccgaccacagaaatcagccacagcaaccccataacagcgttatagttctgtttgtcggcgtcgacaagagccagcagcgccgatgaaatgcacaccaaggatgtttagcgaattgttcgcagttcgcacgattcgatttgattcgattcgtgcagcccggatggttcacggggggcatgccgtcgtgatgtgcgtggatatgggcgatacgattctcgttcgggtcggcaggtcatcgtacaccagttacgaaaggatccgtccatatatggcaaggtttaccgagaatcgttggaccagcgcgattattcccgcactgctgattcatatcccaatcggtaccgtctattgctggagcgtgttcaagcagcttatcgctgaccgtctccacgccagccccgcctccgtggaatggggcttctcactcgccatcttcttcctcggcatgtccgccgcgtttgccgggccaatggtggagaaaaacatcaagaaatccgcactcgtatccatggtctgcttcgtggtcggcttcgccggcacgggcgtaagcatcgccctgaacttcctgccgggcgtgttcatctgttatggcgcgatcatgggcatcggcctgggcgtcggttatctgactccggtcaagaacctgatgctttggttcgccgacaacaagggcctcgccaccggcatcgccgtcgccggcttcggcctggccaaggccattgccagcccactgatggaatatctcatcggcacggttggcctggtcagcatgttcttcatcctcgccgcggtctacgcggtgatgatgttcgtcggcttcctgctcatcaagcgtccggccggctgggtgtacgatcccgcgacctcacacgtcagccgcaagacaatcctcaagaagcccgtgttctggggcatctggatagccttctatatcaacatcacctgcggcctggccctcatcagccaagagaaggacatcctgcacgatgtgctcagggccttcccgcagtatgccaacctgagccccgccaagtttgccgccgccatctccggcatcatcggactggtgctcgccgtggactccgtgttcaacacggctggccgcgtgggcttctccacactctccgaccacctgaagcgccgcgagaccgtctatcaggtaatcttcatcatgtcgattgccgtgtgcttgctgcagatcttcaccaacagcatcggcaacgctctgctgtgggccgtgctggccatgctgttcctcgtcaacgcgggctatggtggcggtttctcgacgctgcccgtgctgcttgatcagcacttcggcaccaaaaccgtctccaccacgcacggtctgacgctgagcgcctgggcgttcgccggtctgtccggcaaccagttggcctcgttcgtagttgcccacgcgcctgatcaggcccaccgctacgccgcgctgattccggtgctcaccggcctgttcgtcgtggccctgatcagcatcagcttggtcaagtacctcggcgacagaaacgtcacgaaggccgtcgaagaccgaggctgagctgccgcaaaacaacgattctgccggagtcgggcgcatcgatcgcatcaatcgatgtacgtcacgattttggcagaatcgttgttgttgctgttgagtacctgaggtcgtgcggcttacgcgccgaccagttcgagcatttgggggatgctctttttgccgaattcaacttgctgggtgccgtcggcgtgggtgatgacgatgcagggcacgctcatcgcgccgtactggtccttgagttcggggaagtgcgagacgtcgtaggcttcggcgcgcacggccgggctcagggaggcaatgcgctgggaagcaagcacggtttccggacacatcgtgcaggtgagcgagacgaggatcatgatgttcagcgggtctgtgatggacttcgcgcgttcgatcaggtcgtcgcccagcggctggccgggaccggccgcgttgtacaggccgagtacgaacgagttgaactcatggccggaaggtacgccgtggaaggccagaccggtgaagaccagtgaaccattgccgtccttgccggccttgccgtcgccctcagccggcacgcagatgcgcacggtcggacgggcgagcggcaggacgccggcgacgtcgaatgtggcgcggccggaatcgtccaacgaaccataagtgggcagttcggtgccgtccggcaaggtgacggacagcggttcgccgaccaccaaagaagtaggcacagaagcaccatccaccgccgtgatcagccctgcggcatcaacggcaaccgagttcagcttgccgccggacagcgcaaccatctcgccgatgaaaccctgcaattccgccgaaagcggagtgccgtccagctcgagagcgagcgtgaccgggcgggtcatgcgtccgaagaccacgccaagctgctgcttgacggcggcggagaacagttcgccgggcttcttggcggcgctggctgcggctgcggcatcggcgctgcgtttggcgggagccggggcgggcgtcgtgccagcggccgaggcggcggaggcggccttggcctcggactcctcataagcggaagcagtgggacgcggcggcaccaagccggttttctcgctcatctgcttggcgtaacgctccagttccacggcggcaatcgcaccgtcggcggtggcagtgaccacttggcgcaggttcttgacgcgcagatcgccggccgcgtacacgcccggcaccgaggttctgaggtagtcgtgcgtgaccacgtaaccgtggtcgtcgagctccaccacgccgcgcaccaaatcggtggcgggcacatagccggcgaacacgaagacgccgaaggtgccggcgtcggcgggcttccacgtttcggtctggccggtggcaaggttcaggattgaggcttctcgcaggcctccttggccggcggtgacgcccttcagctcgacctgataacgcacgtcgatcttcgggttgttcttggcttcggcggccactgcggcatcgcaggtgaagtccggttcgcgcacgagcacggtgactttggaggcgtatttggtcaggaacacggattcctcggctgcggcgaatccgccgccgaccaccagtacttccttgccggtgaagaactcgccgtcgcaggtggcgcagtaggccacgccgcggccggcgtactcggcctcgccctcgaagcccagcttgcgcgggctggcgccggtggcgatgaggatgccgaacgtcttgaggtcgccgcgtgaggtgtgcacggttttgatgtcaccatccacgtcgagaccggtggcttcggcggagaggaattcggcaccaaagtcctgagcctgctgacgcatggtctgggtgagcgcgcggcccgtggtgcggcccacgcccggatagttgacgacttcgttggtgatggtgatctggccgccgaaatcatctttttcaagaatcagcacacggtagcgagcgcgggccaagtacaggccggccgtcaggccagccggcccgccaccaatgacgacgacgtcatagagattgttggtctgagtcatgaaaactcccttacatacactggctcccctctctgaggggagctgtcgtagtgagactgaggggagcatatcggatcaggctagctctcgcgagcactccccccagtcgctttcagcgacagctcccctcagaaagggggccaagattaccgcctattcagtgtcgatcacagctggccgacgaggtcgaggctgggctcgatggtttcctcgccaggggtccagttggcggggcagacctggtcgccgtgctcgtagacgaactgggaggcctgcacgcggcgcagcagctcctcggcgttgcggcccacgttggaggagatgacctcgtaggccacgaccttgccctccgggctcacgatgaagtcgccacgctcagccacgccatcggcctcgttgtaggtgtcgagatccttggccagcagggcggtcgggtcggcaagcatcgggtactcgatcttggcgatcttctcgttggcgtcgtgccaagccttgtgcacgaagtgggtgtcgcaggagacggagtagatctcgcaaccgatttccttgaacttggcgtagttctcggccaggtcttcaagctcggtggggcacacgaaggtgaagtcggccgggtagaagaagaacagggaccagtggccgagcacatcgtccttggtcacttcgtggaactcattgttctggaatgcgttcaccttgaaatcggtcagttcatgctgcagaagagtcatcatcggtcctttcgggaattgttaatcttcaagcgtttaccaccacctatcgtaatgtggtgagccacggctcgcgcgggtgtaacgtatgagccttatcacaccacccgcaacccttgtgcccaaatggccgttgccccaatcacgactatgcgcgaatactcgctaatatggcaatcagcagcccgctgataatggaggtttcatggctcagtcagactttgaacaggaatcgaccgcaaacgcaacgtggagtcgcatgctgcaaggcaaccggcgctttgccgagggcaagcccgaccatccatggcaggatcaggagacccgtcaaacgttgcttgatggccagaacccggatgccgcggtgctctcctgctcggactcgcgcgtacctccggaaatcatttttgatcagggcctgggcgacctgttcaccgtgcgcaccgccgggcaactcatcgatagcgcggttatcgcctcgctggagtacgcggtcaagaaactgcacgtcagcctgatctgtgtgctcggtcacgagcactgcggcgcaatcgaggccgccgagcaggagctggacgacctgatgcacaccatcacttccgaagccgacggctcactggaggccgcggatgcgatggacgacctcgacgagcacatcgccgccgccgaatcgattattctgcgccaggccggcatgtccgtctggcaggcgcgcgaagccgagctcgacgcgcatgaagacatcgagcgcgtgcatgtggcccacattattgaaactttggtggagcagtctcctgtcatccagcaggccctcgccgctgacaagctcatgatcgtcggcgcccgctatcagctcgattccggcaaagtagaagtgctgagcttctgagcgtgcgatccgcaacatcgccaacctgcgtgggatttggcgaatccttggccatagccgcgagaaacagcctctctgcactagtaatgccgtccagcgctggagcgcatacggcatcgtcgaaggcgagcaacgcatcggaaacaccggtcgacacgtcggccgcagtaatgataagagtgcccttccctttgccgagtttcttactgcccagccagcacaccccaatttgacgtgccactcccctagagttgaagccatgtcacttggtttgaacatcctcctgatttttgtatttctcgttatcggttccgtgttctccggcaccgagttggcattggtctctctgcgcggctcgcagatcgagcaaatggagcaggaggacgctcgcggcgccaaagtcgccaaaatcgcacgtgacccgaacaccttcctgtccaccgtgcagatcggcgtgacgctctccggcttcctgtccgcctcgttcggcgcctcttccatcgccccctacctgattccggcggtcgaaagctggggcgtgcaccccggcatcgccggcggcctggtgaacatcatcctgaccctcatcatctcctactgttccatcgtgatctccgagatggtgcccaagcgcatcgccatgcagcgcaccgagcagatcgcgcgcgccgtggtgcccgccatcgacgccttcgccgccgtctgccgcccgatcatctggctcatcggcaagaacacgaacggcatcgtccgcctgctcggcttcgacccgcagcagaccgagtccgaggtgtccgacgacgagctgcgcgtgctggtcagctccaacaccaacctctccaaggacgaacgcacgattctggacgatgtgttcgacgcgtccgaaaccatcgtcgccgaggtgatgcgcccacgtgccgacgtggtcttcatcgagggcgaccagcccttggccgaggccgccgcgttcgtacgcgaccagccgtactcccgttacccggtgaccggcaaggatttcgacgacgtgatcggcttcgtgcatgtgcgcgatctgctggacgtgcgcgatccgaacgccaagatcgtgcgcgatgtggtgcgcgaaggcatctccctgcccggcacctccaagctgctgccaagcctggaactgctgcgtaagcgcggcatccatctggccgtggtcatcgacgagtacggcggcacggacggcatcgtgacgcttgaggatatgaccgaggagcttgtgggcgatattcgcgatgagtacgatctgcccagcgagaagggcggcgaacgcaccacccgcaccgcgttcgtcaatggcgtggccacgatcgaggccagcatgaccattgaggacttcgccgatctgaccggcatcgagctggaggacggcccgtacgagacggtcgccggctacttcctgtccaagaccggcaagatgggagcggtaggcgacgtgctgcattccgacgacggctacaacatggtcgtcaccaaggtggatggccgccgcatcgaaaccatcgaagtccgcaaagccggcgccccggaccatgcgccgctgccggccgaatcacaaagcgacgatgccaaatagtcgcgtgatattcaccacctattcgttcggcccggggcataaccaaaaaacgtagaatgaaagggcaacgttccacctactgaaagaaggaacattatgacacttgcatttgttgtgccgggccttgatgaagcggccagtgagaaggccatcgccatcctgcagaaccgactgagccaggagcaggaggccgctctggtcctgaagcacgcacactggaacgtgaccggcccgaacttcatcgccgttcacgagatgcttgaccccgaggtcgaggccgtgctggcccaggccgacgagaccgccgagcgcattgccactctgggcggcaccccggatggccgtgctgacgccatcgtgcgcaaccgcacgtggaaatcgttcgacgctgagggccgcgtgggcaccgaggagtatctcaaggcgctgatcgagtactacgacgccttcatcgccgacgaccgcaaggccatcgccgagctggacgagctggatgtgatcagctccaacatcatccaggaccacgtgcaggaactcgaaaagttccagtggttcatgcgctctcacctggcataagtaaaagccgtattccgtggctcccctcaaagaggggagccactttcgtctcacgtgaaatagagagtctccacatacataagttggaaaagtgtataaaactccccattttgaggttggaaaacgtagccaaaaccgcattcttatggttggaaaagtgtaaaatatgcgctataaacagttggaaaacgtgcccagcatagatgcaaggcctacaaatgactggagattctcatgctgcgaagaaaaatcgagacacagctggaagcttggagatccgcgccgaaacgcactgcactgctggtcaccggagcccgtcagattggcaaaacctatatcatcaggcactttgcccaacagcattacgaccatatcgccgagctcaatttcatcgagaaccctgacctcgttgcattattcgatcggccccgcgatgccaaaaacctactgatgaggctggaactggccgtaaatacgccattagtacccggcaaaaccctgattttctttgacgaggtccagcgttgcaaggaaatggtcaccgcaattaagttccttgtagatgatggtcggttcgattacgcgctttccggctcgctacttggagtcgagctcgaagatatacgctcggtaccggtcgggtacctgaccgagctggatatgtatccactggatttccaagagttctgctggtcgcagcatatcggcaacgacgtattcgatatgcttgccgaatgctttgccaagcaccaggaagtggatgagttcattcatcaaaggctcatggagctatactccaaatatctggtcatcggcggcatgcctgccgcagtcgactcgttcgtggcaaacggcagcgttgcggacgtgcgcactatacaagagaacataaagcgtgaatatcgccgcgatatcagccaatacgcgcgcaaagaagaccggctgcatatccgcgctatctacgatttggtgcccagcgagttaaataacccaaacaagcgctttaccttcgccaaaatcgaaaagaacatgagattccaatcggttgcttccgatttcgattggctggtcaatgcggatgtagccgtcgccgcgtacaacgtggacgaaccgtgcacaccgttggagatgagcaaggaacgtaacctcttcaaactcttttacaacgacgtgggtctgcttaccggctcgtttctcaagaaaaccgcgctcgacgtactcgacggcaaccctgatatcaactacggttcaatctatgaaaatgcggtggcccaagagctacgcgctcacggatttgacctgtactactacaacagtaagaagcttggcgagctcgatttcctcatccaagaccgcaacgatcacgtgctgccgattgaggtgaagtccggcaaatcctacaaacgccatcgcgcaatggacaacgtgctcgcccaccctgaataccatctcaatacaggctatgtgcttggcccgtgcaacgtctcagtcgaagggaatgtaacctacctgcctgtatacatggccggcatgttccataacgaatgacgggccgcacacttagtcaacaagtacatgtcggtcagatggttcggactggtcagagggcccgctctgatcagttaggtcggtctgaacggactggctgggctggtcggcctgagtagcccgtttggaccgatccggttcgcccttgctggccttcacactgcttcagctccagctgaagttcgctgatgcgccgttcgagttcgtcgatgcgccgcacgtgtggcgaagtgagactaaggggagccgagagatggctcacaggccgagggcaccggccacggccatggcctcgtgttcgggatcggcctggccgatgtgtacgttgacgtgaatttcgtcatcgcccggctcttcgagaatgtcggactgggattgcagcatgctcggcttcatgaagtggccttggcggtgggaaaggcgttccatcacctcgtcgaatgtgccctgcatgtagacgaacaccacgccttgacggcgcagcttgtcgcggtagatcttcttcaacgccgagcaggtgaccacggcgggctcgccggcggccacgcgctcgtcgatccacgcggcgatggtgtcgagccaaggccagcggtcttcgtcggtgagcgggtgtccggcggccatcgagatggtggcgcattcggaccatgcgaacgaatccgatcaggccatcagccacatcgccggcactgaagcctgacccgtcatcgtcacagcaccacgcggcggttgaggtcgcggcgcagcgtcttccagccgggtaggtaggcggtcatgcggcgctggaatccggcaccgtggccgctttcccacaaatgcgtcatctcatggaccaagacgtattccaggaattgcggttccatcagtcccaattgaaggttcagacggatgcggccggttcgcggtgtacacgatccccagcgcgaggtcatgacccgtagcgtgatatgcgtgggctgccggccgacgaccggcccccacttggccagcagctgtggcaacgcggcgttgatcgcggccgccgcttgtcgtttgcgttcgtcggtccagatttgggagcggtcaaaatacggttggacattcgtaccggcttggcctggcccggcgtcaccaattcccggacgactgatatcaccggttttcggacgaccggcaacgcctccatcatggccgctggcaccagctacaccacgacctccgttctcgaagccggcgccctcgttcaatgccatgatggagcgccgttgcgcctcagccatgcgctgctgctgggcgagaatccacgaatgtcgctctttgacgaaatccgcaatgcgactctcgctcatccgcatcggtgcggagatttcgacgcggccgctcggcggtttgatgcgcagatacaggtttttgatgggtttgcgcgtcaggtgcagatggatgccatcaatatccaacgactgcccggcggcagcggaccgaacggatttcggcgcaccggacttcggagcggtggattgacgacggcgataaggcacgcaagtcattctcgcacaacggcggacaacgatggcggcccgcccggaacctaacgttccgaacgggccgccatcagcaatgaacggtgctgtcggcaacggctacaaaccgtcaccgagccattgagtcacccaatcagcaaccggccgcggtcagcacctggtcgaggatctcgacgccctgggtcgcctcgtcggcggagatgacgcaaggaggagtgacgtggatgcggttgttgtgcacgccgagaatcaggccgcgcttgtcgccttcggccacgatctgcttcatcgtggcgtcgtccagcggctccttggtggtgcggtcggcaaccatttccacggcccagaacacgcccttgccgcgaacctcgccgatcttcgggtgcttgtcgtacagagcggtgagctgcgggccgagcacgtccttgccgatggtgtaggcgttgtcgacgatgtgctcctcttccatggcttcctgggtggccacgatggcgcccatggccagcgggtgaccggagtaggtcaggccgccggggaagacgatgtcgtcgaagcggtgggccaccgggtcgctcataatcacgccgccggcgggcacgtaaccggagttgcagcccttggcgaaggagatgatgtccggcgtgtagtcgtagtcgtcgagtgcgaaccagaagccggtgcggccgaagccggccatgacctcgtcggtgatcatcaggatgctgtacttcttggtgatctcgcgcacgcccttgaagtagtccttgggcggaatgatgatgcctgcggtgcccggcacggattcgagcagcacggcggcgatggtgtccgggccctcgaactggatcacgtgctcgaggtgagccagcgcacgctcgcactcctcttcctgggtggttgcggagaactcggagcgatacaggtacggggtgaagaagtgcacgtggccgcgagagtagtcgttgggcttacggcgccagtcaccggtggcgctgatggccgcaccggtgttgccgtggtagcagcggtaggaagacagaatcttgtcgcggccagtgaacaggcgggcggcgcgcatcgcgttttcattggcgtcggcgccagcgttggtgaagaacaccttgtcgaagccttccggagcgcggcgggccaccagggaggcggcgcggccacgggctaggttcgcgtagtcaggtccgacggtgcacaggagttccgcttgcttcttgatgccctcgatcaccttcgggtgctggtagccgatgttgacgttgacctgctggctggtgaagtcgagcatttcacggccgtcgccgtacttcagccacacgccgtgaccggttaccacttcagtgggatccaggttgcgctgtgcgtgccacgaatggaatacgtgtgcgcggtccagcttgtaagcgtcgtcccagatttccgcatcctgcgaaagatcacgccccatgatgtgtcctttcctcgatattttctcgaagtgcccgatgccgtctcccgtggatcgggtcagggcagcaacgcgctgtgaatgtcattatgagagttgaacatttcgcgtcaaactcgaacatttaataatgttacagtagtggcgaatacgaaatcattttgaaacataggaacaagaacaataattgtatccagattatgtaatgtttatgttattcaaaaacatactcattgcacaatgcggcgctaacatttgactaccgttgccacagtgaccgttactatcggcagtcaagcagccagcaacaagccggcaaccgccatcgatcatcagccggcggcaatcggcaacattcacgcagacgcgcgctcatcacgctcgccgccaagatccgggaggcagatcatggatacgccatcgccatcaaccgcatcaacaaccgcacatgccgtcggctacaacgatgagccaagcattacggccgctcccctgcgttccaccgacgacctggccgttgatgccggccagttatcctcactcatcctcaccaccgaggcgacggccaccccgcaacgcatcgtcgaatcggtcacctcgctgacctcctccggcatacttgcggaaggccagcgcatgcccaccgtacgcgatctcgcccgactgctacgcaccagtccggccaccgtctccagtgcctaccatgccctcgccaggtccggcatactgcgctcccgcgggcgcgccggaacattcgtactgcggcagtcgcgcacgcatcgctacgatgccggcgacttgctggccgaagccccggccaccgcgccggaccgaccgattatcgacctgtccaagggcacgccggacctttcgctgctgccggacatccgcccgtttctcggcaagctcggcacgcacaaggcattcgtcaattcatacgacgggccgaccatcctgcccatgctggaacagattttgcgacgcaactggccgtatgagccggaggcgatgactatggcatccggcgcgggcgacggtttggcgcacaccatgaacgcttttgttcagccgggtgattttgtgattaccgaggcaccggaatatccgctgattctcgacatgatcgaggcacatggcgcgatggcgttcggcgtgccgatggacgggttcggtatgctgcccgacgcactcgaccgtgcgctgaccatgctggaatcgcagcgtctggcggtgccgcacggcggccatcaggtcagtatgatcctgctgcagccgcgcgcccagaaccctaccggggccagcttcagcccgcaacgcatcgacgctttggcggacgtgctgctcgcgcactacccgaatggcgttggtatgccgctgattgtggaagacgatcacagtggcgatgtggccaatgcgtatgcgacatcgttggcgcaacgattgccgcaacacgtggtgcatatccgcagtttttcgaagtcgcacgggccggatctgcgcttggctgcgctgtctgggccggaggatgccgtggaggcgattatcgcccaacgacgcttgggatcgggatgggtgagccggttcctgcaagagattctgtatgaaatgctggccgacaaagaggcgttccacacggtgaccaacgcccggcatatctacgccacccggcaaaagacgatgcacgcgctgctgctgcgtcaaagtttggacgtgcataccggtgacggactgaatctgtggattccggtgcgcgacgagccggcggcgctgcgactgctggccgaacagggcatccgtgtggccgccggcaagccgttcctgccgagcctgcgtatcagcgccgacgccaccggagccgacgcgggggccggtgcgggcgtggacgcgcatgccagtcgaggcatccgcgtcaccatcgcacagcagggagccgtcaacgaacaagtggccgccgccctggctcaggcggcggccgtaacgccgaagacttcgacgaatcactcgtaattcttcatgaactgcgttcgtacgcgcggcgaggagccgccccgtctgtacggggtgatcaacgggctgctgcgcatgcgcaacgggctgcgcaggtcgcaggagctcgacgacctggtcgacgtgctggcctcctccatcggcgccctgaccaatccgcgtaccaactgcccacaccggagaaggtcgcgcaggagaagcctcgctgctcgagatcgacgacagcttccagaagatcgtcctcgtacgcgacgtggtcaaacccgtccgcgacgagcacggcatcctcacgatgagcgtctacgatttcctcctcgacccggacagcctgacgatgtgacgccgtggattggctacaacgtattagacagtccgatgagggacgaatgacatgagattggaggccgacgatggccgacccgaaacatccccgccactacgacgaggcgttcaaacggcagatcgtgcagttgtacgagagcggcaagccatcccggaagatccgccgtcgtggcccgacatcctcaggaccatcgagctgggctactccaacgccaggctcgaggcgtccgacaacaggatcaaggtcaccatccgcatggcctacggcttccaccacgcgaacagcctcatcgcactcgtcatgctccgctgcgccggcaatcatggcgcaagcgacaatcgcgacacgccgttattgacataccgccgttcaatggtattgtaatcacttgtgcgcttttgaagcgtatggatcgggcccgtagctcagctggttagagcgcatccctgataaggatgaggtcggaggttcaagtcctcccgggcccacaggaaaaatgaagcggccgcgagccgctctttttttctcacggggctatagcgcagctggtagcgcatctgctttgcaagcagagggtcgccggttcgaacccggctagctccacagacacaacaaaacccttggaatcagtccgattccaagggtttttgttcttgcattttctgcgtattgcaacaaaaagatgacgacacgccgatagcgtatctcacgagaaaagtcttattgcctcacgactgtcgaggccaccggaagtcggcataggcattccaatcggccactaaatcgaccgatgcccgatccctgagccaaacggacccgaatgccgttcatcatcgacaaagcagtccgcgcctcgcgacgaggatctgccaaaccgtcacgctcgactgctcgggttaaggtgtccatcacgcgatgttctcgtttttggtaatactcataggcaggatgatgctcgttcaacgattcgccttgtagcacggtatatacaaccgcaccatctctggctgagccgcattgcgctccataagggcagcacagatatcacgaatgccgaactgcgcgttgccgctccacatatcctcaggttcaacgccaagagaatgggcaaaacgtagccatgtcttcccgatcacgatgctccagcacggcaatcagcaagccgactttgttcttgaaatggtatatgaccgccggctcggtcaatccgcatgcttcggctacctgacggacggaaaagccccaaaacccgttctgtgaatcacatgcgacgtcacgtcgatgatctgttcacggcgttccgcacattctgattctgctcaagacagatccagctcgttgttgtccttggctttgctcaccgtatcagtcaaatcggggtcgtccacagacaccgcgttctgctggctgagcgtcaacgacagcgaacctttgtaggagtcgccgtattcgtccttgccggacacgcttacggcaatcgagctcatcagatgcttcctgccgtagttcagatccacggtgatagtcggcatatccggctcttcatccgtgccgaagtcccagttgcgcacattgtcgagcgcctgacggtactcgccttcagcatcgcccacaccggtatcctcgatctgctgaatcacccatgatttcagatgcggatactgcgcttcatggctgatccagtaattcacaaagtgctgggccaatgccttgacatcgatttgatacgagagctgcgtgttgccggcagacttggcagacgatgtattcgggaacagctggctgcgcacattcttatcttccagctccacgccgagatattgttggatgaatttgctggcctcggccttcacctcggcagacgttttcgtgcccttggcccggtcgatgtcgttcgagtacccatcgtcgttcatcttgtccagctgatcgtagaacgttcgctccgcgccggtgatgtcccaagcaccgttcttgaccaacgcatccttgacgttcaatatcaagtccgccacatcactaccaacgccgttccttaagtcatcttcatattggtcggccgggtagtagatgtagtaggggtcgtcatcataccaaacgtttttcccggcgaatgcgcctttgtgccaagcgagggttgttgcctgttcatctgtcttgatggtcacagacgcggaggagtcattggtggttttgccccagcgaatacatgccagacatccgcgcgtcaagggagtcgtcagtgctgctgtgggttctgagttcgtatttggtgctgcgcagagtggacagcgagttgatcgcgtcgaaggtgacgaccagcggattggtgggctggaagcccagcatcgctttgacggcggtgaagttggggacgatgaatgccaaggccgccaccagaatcgtcgcaagcaatgcgcagagaacggcgatcagcttcttgctggatttgcgcggcggtgccaggacggcggttgcatcagtcgcctgatatgcggcaggagcgggaatcggcaaagctggcaagggagcagttggtgccggctgtggggcagcgggcgcggcgtaaaccgatggggcaaccggcgcggctggtatcgatggtggtactgaaggcgctggcacagcaggtgccggtatcgacgcagtcggtacggctgacgatgcggccggcactggtacagacgcaaccggtgcgctgtctacagacgctccacatgccgggcaaaatcgtgccggcctatcaactctatttccgcagtggccgcagtacgccatcgtgtgcttctcttcctcaaatcggcttgattgccattgcttcaatgttactcttcagcattacgcctcagccagcccctacgcgtaacgatacgaaacgcggcagccttaatgcggttgttttgacgcgatgccaacatcgagctctggccaacgttctggtactcggctacatcttgctgcgagccaagaagcaggccatcgctcgcgccgacgaggccgaatggcggcctagcctcgctttaagcctcaggccaacacctccatggggtgataagtggcggtgtggtggccggtgatggggttccatacccgttcggcgaatgcgcgcagacgggcgacgccctcacgcagctcgccggcatctccggcgtaggagaggcgcacgaagccgcgcccctcctcgccgaaggcctcgccggggaccacggccacgtgctcttcgtccagcagacggtctgcgaattcaccggagtcaaggccagtcaggcgtacgtccacaaaggcgtagaacgcaccttgcggttcaatcaagcgcaataccgggcatccggccagaccgtccagcacgatctggcgcttggcgcggtattcctcgcgcatggcggccacatgatcctgcggaccggccagtgctgccacgcctgcgtattgcgccaaggagttcaccgaggagtgcatgagttcggcgattttaccggtctgttcgatgaccgcttcgggtgccagcaggtagccgatgcgccagccggtcatcgcgtaggttttcgacaggctttccaccacaatggtgcggtctttcatgcccggcaccgcggcaatcgatggtgccacggctgcctctcccccaagcgtttccccgaacgtttccccaaacacgaacggatggtaaacctcgtcggagatggcccaaatattgtgctgcttgcatacttcggcaatacgcgccagttcagcggcagaagttaccgcgccggtcggattgccgggtgagttgatgattacggcgcgggtgcgcggggtgatcgccgcttcgatgtccgccgcgttcacgcgcatgccgtgctccggacgcagcgccacggtgaccgggcggccgccgcacagcatcacttcggcgtcataggaagtgaagaacggcgagggaataatcacttcatcgccggtgcctaccacggctttcagcgccagaaacaggccaatcgtggcaccgtcaacggcttgaatctcggtttcgggatcataagtgagtcccttcacacgggcggagtaatcggccacggccttgcggtattcggggacgccgagcacgttggtgtaccgagtgcggccagcctgtacggcctcgcaagcggccgccacgatatgcggcgcggccgtggcgctgggctcccccacggtcagtgaaatcgcgtcaggcacgcgctctacacggtcgaatacgtctcggatgccggagcgcgggatattcagggcttcggcggacaagctcgcgggcttggcggtcggcacagcaacccgtctggcagcaggcacagcagcagatgcaacttcggacagaggcatgttggaaaacttctgcatatcatccctcctcaatggaattatttcgtcgttctcttatttcagaaggaattattacattcaattaggactttaggcataaacattccaccacacaacagaaaacacaggaagaactactgaaattaccaggcaaaatcggaaagccatcgcattccggcaacaggtacagtgaacacagagcacaacgaacggagaagacaccatgaccgcgattgacgagaccgaccagcgcatcctcaccatgctggaggccgacggccgcgccacgctcgcgcaactggcccaggcgaccggactgtccgtctccgccgcccagtcgcgcgtgcagaagctggagaagcgcggcatcatcaagggatacaaggccatcatcgaccaagagcagcgcggcttgcccatcagcgcgttcgtcaacgtgaccccgctcgactactcagccgaatcctcgattccggacaagctgaacaatatcgacggcatcgtctcctgctattcggtggccggcgcccccagcttcgtactggtggtacgcgtggcctcccccaccgcccttgaggaattgctcaatctcatccaccgcacggtgccggtaagcaccgagaccacgatgattctgcagacctacttcgcgcactgaccgcgaacccggtaacctgcgcgccgaagacctcggcccctacggcgcacgattcccaacgggcacatccgacatcacccaagtccacctttatgtccactatatgaacgcaccttcggtgtgatgcagcttccatttcgacccgattcacgcacagacagacatccagcaatcgccgaaaaatctaacaaacggaaacttgaaccaccccataaccacgccgatagctttcccgttatccgagcgagactctatgcagcaagggcctgcgcgcatagaataaaaccgtcttaattccctagcaaatcgaggagaatcatgctcactgacgagtacatcaagcgtgtctacgaccaggtcgttgcccgtgacggcgatcagccggagttcctgcaagccgttcgcgaggtcttcgagaccctgcagccggttgtcgagaagcacccggagtacgagaaggccggtgtactggagcgcatcgtcgagccggagcgcaccatcaagttccgcgtggcctgggttgacgacgagggcaaggttcaggtgaaccgcggctaccgtatccagttcaactccgccattggcccgtacaagggcggactacgcttccacccgaccgtgaccgagtccgtcgtcaagttccttggcttcgagcagattctcaagaactccctgaccacgctgccgatgggcggcggcaagggcggttccgacttcaacccgaagggcaagtccgacgctgaggtcatgcgcttctgccaggccttcatgactgagctgagccgccacatcggccagttcaccgacgttcccgccggcgacatcaacgtcggtggtcgtgagatcggctacctgttcggccagtacaagcgcatccgcgacgagtactccggcgtcctgaccggtaagggtctggaattcggcggttccctggcccgcaccgaggccaccggttacggcgtgtgctactacacccaggaagccctgcgcgtgctgcgcaacgactccttcgagggcaagaccgtcgtgatctccggctccggcaacgtggccacctacgccgctcagaaggctgagcagttgggcgccaaggtcgtcaccgtctccgactccaacggctacatctacgacccgaacggcatcaacgtcgaggtcgtcaagcagatcaaggaagtcgagcgcggccgcatcaaggaatacgccgagcgcgttccgggctccgagtaccacgagggcagcaagggcgtgtggaccgtcaagggcgacatcgctctgccgtgcgccacccagaacgaggttgatggcgaatccgcacagaagctcgtggacaacggcgtgaccgtggtcgtcgagggtgcgaacatgccgtccaccccggaggccatcgaggtctaccagaagaacggcgtgctgtacggcccggccaaggctgccaacgccggtggcgtggccgtctccggcctggagatgagccagaacagctaccgcctgtcttggaccttcgaagaggtcgacgccaagctcaagtccatcatggaagaaatcgtcgccaactccctggccgccgccaaggaatacggtcacgagggtgacctgatgctcggtgccaacgccgcaggcttcgtcaaggtcgccaacgccatggttgcccagggcgtgctgtgacgcttgccgctgagcaatcgctgagcagtgctgagcaatactaagcagtactaagcagtagcgtaatgcccttgcttccccgtgaggaggcaagggcattgctatatgtacaacgagcaacaagtgctatcccaaatacgtaagcattacgcaccactatacgagtgaattcttggatatgatcatcgatccaagctaactgcattcagaggggtactgaatatgggaaaccccgagtataaacgccgtcattgcaacgcttatactcgaggtttcgtggttcaggtacccctttgaaagcagttggctttctgcaaagccatcaatgtacctctttcaacggagatagccccccgtctacaaggtcaccaggtccggttcgcagcaacgctttcaatcactgctggcgattgcggcgcactgctaccagcgccaagccagcaacgagcagcggcacggcgactacaaccaccgcaatgatggccgagccggtttccggcatggtgtcggccttggccgccgaatccgcgttaggcgaggcgttgccgcccggctgagtcggctgcacatcagtgccggtcgagtagttcgggtcgtaagcgaatggccacgcgccatccggcacaacccactgaccagccgccgagccgaagcccagtgccgcgagcaattcagcacgcttcgcctgcacctgagcctcatccaaagcagacatcgagccgagcacgacgttcttataatcagccggatcaagcagcgcgccggtttcatcgtggctggcgtattccgcgaatcgcacatcatcgtggaaggtcacgtccacgcttttgccgctctggttcttgctggtccacacattccaacgattcttggtgatcttgctggacatcgtgctgtcgaggtaggtcacggccgaggaagtgtccgtatacgccgagttcttcgtacccaaatccacgccggtcacatagctgctgccgtcgcccttacgcacctgcgtgtactgcgcgaacgtctgccacgggcggcccagcgaaagcttggcatcgtcgtcatatgctgcggcaacggtcaagttgcagcggtcaaacaccaggcccacgccggacttcttggtgttggcggcggtgaagtagccgttgttcttgccggcgaacgcggccatgtgcagctcggtgccggcgaagtaggcgttggcgtcgccgaacacgaaatcaaccgtgccttcgatgtagccgccgtccacgtacacgcggttgccggcgccctgcacgtacagagtgtcctgacggccgatgatgcggctgttcttcaggtacaccttgtctgcctgggtgttcagcgccacggccggcgtctgctcgcccgccgccgtgtgatccaccacgttgtaatcgttctggaaggtgatgccgtaggcggagaaacctgtggcacccgcgccaatggtcacggtggcgcacttgttggtgccaaggtcgaattcatcctgcggcacaaacttgccgtcggcatcgaatgtgttggacgaatagtagctggcgcgaatcgtcaccgcgcgcttggcggtcacgtcggcgttggcgaaggtgacgcccggcttggtcacggtgatcttctcgcgatagtcgcccggagtgatcttcagcactagtcggtcggtttcggaagagtcgttagcatccagagcggcttgaatggtccggtactggccgttcgggcccacggtgaccgtgtggctggtggcggcgggggagccggccgcgtagtcgatggcgatgccggtcaggtacaggctgcccgtgccttcaacggagagcggcacgtagcgcgtgctgtcggttgcgatggttacagcagtgccggtggtgatgtccgtaccgtcgagcttgagcgtaggaccgtacagctggcccttcacggtgactgtagcgccgccctcggcctgtgcgaccggaatgtacaggatggttccagcgttcacctgagtatcgctgccgccgcttgccgcggtagtacgcgggttgaacttggcgccttgcgcccgagcgtcgatggcgacgccttggtagttgtcggtaggccctgcacggccggtcgatcgatgccggtttccgtgaagtcccagttcgtgtctttggccgcgaccgtgggcgtaccggggaactcgggttccggctgctgttcagcaagggcgatgccgttgagataggtctgggcagtgaaggtgacgtttaccgtacgagccgactccgcagcaggcaaggcgataactgtgttgtcgctgctcacttcaccggcatccgcggtaatagtggtggtgccgccggacaacgcaagggtgatggtggctgtattggtgtgggctggcaccgggatgctgatgatggttccggcgttgatctgggtgtcattggcgcgcggcgcaaacttggcaccgtttgcagtggcatcgatggtcagcccgtcgaacgtctgggatccgccttgtatagtgccgagagccgccagctcagtgttgttcgcaggattcagcacccattcgcgattgatggattccgcggcttgcgtgctgctggtggtgccggtgctcggcgacgttgcttccgcggccgatgcagtggctgccgcaccgccaaatatcatgcttgcagccaacagcacaccggcagcacgaataatggtgtttttcatgggtgttctctcttatgtatcgatgtacaacaacgaaagccgctttcggaacacccgagtcggttttgcagcctgaaagcagggcttcacctgctgaggggaacacgactatcgggcatttcccagcctgtcttcgcgttcaaaatatcaccgaaaaaaatgcgactggaaccccgtagcacaacaagaaaaaaggggtgcaccccatgtgttgggatgcacccctaagtggtcaataagggggagttggaatgggactcatgaccccccccagcggcgccaagctgccaggcgggttctagtgatcgttgcaacacctgacctaccgcaaggagggtcaggtgaccagaagccaccgaaacgaagaccgtggcggggaacaccgtt

SEQ ID NO: 894 - DNA, 67717 bp, Unknown
  gut microbiota DNA sequence
atcgcgaagcttgcctcatatcgcgagaataatcggattgaggcgaaggcagcaaagggcggtctcccgcgcagtatgtgggagacctattccgccttcgccaacacctatggcggcgtcattctgctcggcgtcaaggaacgtgaagacggtaccttcgaaacagtcgggcttacgtcagccgaggtggagcaccttcgtcaggatttttggaatacggtcagcaatcgatccaaggtaagcgccgtgctgcccatcgaatcggaagtcgaagtgctcgaagcggatgatggcatggtggtggctattcatgttccgcgtgctccacgcgacgaacgtcccgtgcatatcaacgacaatctctttgagggaacctaccgccggcgcggtgaaggtgactatcgttgcacgcggcaggagatttcggcaatgctccgagatcagggaaccgagacgatggattccaaggtgctggacgatctcactgttgccgatttcaatgcggatacggtgcgggcgtatcgcacccgtttccgtgcggcacgtcagggcagttcctggactgatcttgatgacgagcgtttcctgcgtgcggttggtgcggcaatggtgagccgtgaagatggtaagctccatcccacattcggcggtttgctcatgttcggcaacgactatgacatcgtgcgcgaatgtccccattactttcttgactatcaggagaccctagacccggcgattcgttggaccgatcgtgttcattccggcgatggcatgtggtcgggcaacctctttgatttctttttccgtgtgaatcgtaagcttgccgagtctctgaagacccccttcaaacttaacggtatctttcgtgttgacgacactcccatgcataaggcggttcgcgaggcgctggccaactgcttgttcaacgccgattattatggcgtgcgtggagtggtggtcagacgcacacccgataaattggttttcgagaatcctggtgatatccgaacgggcgttgagcaaatgcgccttggcggagtatctgatccgcgcaacggactgattatgaagatgttcagcctcatcgatgtgggggagcgagccggtactggtgttcctgatgtgtttgccacatgggcgaatgcaggacttcccgaaccacggattgaggaaaaattcggcgaggctgatcgtacgatactcacgcttatgctggaatcggatgccaagtccgctcacaatgagcagataattgacaataatgagcagttaaacggtccaagtgagcagataactgacaataatgagcagttaaacggtccaagtgagcagataaccgagagacagcgaactgttcttcgtttcgtggaaaggaatcccagtacaacatacgaggatatggctcgtgctgcgggagtttcatcagcgactgtgcgaagagatgctgaaatactcattgggcgtggattactcaagcgcgtcggctcgcgaaaagcaggacactgggaagtccgagggagagaagaatcgtgatattcgatagcgaatcggtgttcgaggacaacgtcattaccgtgcttaagcagcatggatggaaggatggcgtcttgcgctatccaaccgaacaggatctgctcgacaattggaaaggcatcctgtaccgcaacaacaacgacatagacaggcttggcaaatacccgctgacagacggggaaatggcacagataatcgagcagattgagaccctacgaaccccgcttgcgctcaattcgttcgtcaatgggcgtaccgtgtccatcacgcgtgacaacaaagaagatgtggcgcatttcggcaaggaaatcagcctctacatctatgaccgcaaggaaatcgcaggcggcaaaagcacctatcagattgctcagcaaccggtctatcccgccaagaacaagatgttgaactcgcggcgcggcgacctcgtgcttctcatcaatggcatgccattgattcatatcgagcttaagaaaagtggcataccggtcagccaagcaaccaatcagattgaaaagtacacacacgaaggcgtattcaccggcctgttccgactcgtacagatttttgtagccatgaaccccgatgacgccgtctacttcgccaatccgggcgtagacaaattcaatccaagctattacttccattgggctgactacaacaacgagcctatctgcggcgggcaaaaccccggcaaagacgaatggaagctgttcatcggcggtacttccggcactgcggggctgttgtccattcccatggcgcatcagctcatcggcttctacaccatcgccgactcggcagacggatgcctcaaggtgctgcgcagctaccagtacatcgctgcgaacgccatctctgacgtggtgcgcaaatgcgattgggaacagcggccaactactccgggacgaccaggcggctatgtatggcacactaccggttccggaaaaaccatgaccagcttcaaatcggcacaactcatagctgattcgcatgacgccgataaagtcgtgttccttatggaccgcatcgagctaggcacccaatcactgaaggaataccgcagttttgctgacagtgagacggaagtacaaggtactgagaacaccggcgttttgcgggacaaactcaacagcaccaatgtcaacgacaccctgatcgtcacctcaatccagaagatgagcaacgtgaaagcaggggagcggggcgtcacccaggcgtggctggatcagctggctgcacgacgtatcgtttttattgtggacgaatgccatcgttccacattcggcgacatgttgcaggacatccgtcgttccttcccgaatgcgctgttcttcggcttcaccggcacacccattctggatgagaaccaaaagaagaattccaccactgccatggtattcggccgctgtttgcaccgatacagcattgccgacggcattcgcgaccataatgtgctcgggttcgacccgtacatggtgaccacgtacaaggattctgaagtcagacgtgccgtggctctcgacaaggcgaaggcggagagtgcggaagatgcgctcgccgactcggtcaaggccaaagtattccagcattacatggataagtctgaggtccccatgggtccgatggttgatggtgccgggaaccgcatcagtggcatcgaggatttcctgggacgagaccaatatggtatcgactctccgcacccgagtatggtggtctcggacattcttgaacagttcccggtgctcagccatgcgggcaaattccatgcgatgctcgctgccagttccattcctgaagctgtcaactattatcacttgttcaagcagcaggcacccaagttgcatgtgacggcgttgttcgatcccaatatcgacaacaacgaaggagcgacagacaaagaggatgcgctgaccgaaatcatcaccgattacaacgaggcgttcggcaaagaattcgtcattcctacatggccggcgatgaagaaggatatttcttcgcgactgtcgcacaagagtccgtatggtggtatagcaacgaaccgcagccagcagcttgatttgctcattgtcgtagaccagatgctcactgggttcgactcgaaatgggtgaatacgctgtatctcgataagattatcgactacgaaagcatcattcaggcgttcagtcgtacgaatcgtctgtttggcccagataagccgtttggcgtcatccgctattaccgtaagccgtacaccatgcatggtttcatcgaggcagctgtgaaactgtattcgggtgatcgaccgctcgacctgttcgtacagaaattgccagcgaatgtgaaatccatggatactcggtaccgtgagattctcgacgtattctcagacagcggagaatcggaccttatgcagctgccggagtcggtagaggctagacgtaagtttgccaaggagttcgtggaactgaatcggtaccttgaagcggcgaaagtgcagggctttgactggagcaccacggaatacaaggtcgatagcacggatactgacgatacgaatgaggacaatgatgagcatggcgagtctgaagtggtgcgtcctcaaattgacgaacgtacgtacctcattcttgcgcaacgctataaagaactgttcgatggcaatagcgatcgcggtagtgacccagatgatgatgtgaacgataatcctgaagcgccatatgaactggatggttacctcaccgaaattgataccggactcatcgataccgattacatgaatgccaacttcgataaatggctgaaggcgctcaaggagaatagcccggagttggcagagatgtctgcgcagctgcaccggtcctttgccgcgctctcgcgggatgaacaacgactcgctgaactgttcctgcatgacgtggagcgtggcgacgtggaggtcgaagccggtatgacgctacgtgattacatcacgcgctatgctgcacgcgagaagaatgagcaagtcgacaaactggtcgatcgattgggtgtcaacagatcggtggtcgaggaattccttgccaaacgtatagacgaggcgaacatcaacgagttcggacgtttcgatgcactgcgttcctcgcttgacgtgcaacgggcaaaagccttctttgagcagcatgatcacaaggcattgccggtgttcaaggtgcgtatgcgcgccaccaatatgttgaagcgtttcgtactcatgggcggattcgacatcgatgataccgacaatacggatggacaaagcgagacgaagaacgagcactagactcatatacaagaaggggtgtttccgctggcatcagcggaaacaccccttcttggactagtcgatatcactccccagcaatcgcggccttgagctcctcgaccttgtcggtcttctcccacgggaactcaacgtccgtgcggccgaagtggccgtaagcggcggtcttcaagtagatcgggcgcttcaggtcgagttcgtcgatgatggcggcgggacgcaggtcgaagaccttgcgtacggcggcggcgatctggccgcgcgtcacgccctgctcggtgccgaaggtctccacgttgacggataccgggtcggcaacaccaatagcgtaggcgatttggatctcgaccttgtgggccaggccggcagccacgatgttcttggcaacccaacgggtggcgtacgcggcggaacgatcgaccttggacgggtccttgccggagaacgcgccaccgccgtggtgggcggcgccaccgtaggtgtcgacgatgatcttgcggccggtcagaccggcgtcggccgccgggccgcctaggatgaacgaaccggtcgggttgaccagctggcggtagttgtcatgcggcaccttggaacccagcacctcatcaagcaccgggtcaatcacgtgcttcttcagctcaaccgcaagccaatcctgcgtaacctcaggatcatgctgggtggagatcagcacggtgtccagacgaacgggcttatcgttatcgtcatactcaatggttacctgggtcttgccgtccgggcgcaggtgcggcacttcgccggacttacgaacctcggtcagacggaaggcgaggcgatgtgccaagtagatcggaagcggcatcagcgtcggggtctcgtcggtggcgtagccgaacatcacgccctgatcgccggcaccctgtgcttcgtaacgttcttcgcggctggcggcggtctcctgatcgccagtcagacgggcaacgccctggttgatttcggcgctttgctcggtgatggccacgaccacgccgcaggaatcggcgtcaaggccgacctcggaggaggtgtagccgatgttgcgcagggtttcgcggaccttggactgcacgtcgcagtacccctcggatgtgacttcgccgaagaccaggaacacgccggtggcggcggaggtctccacggccacatggctggacgaatcctgggccagcaaatcatcaagaatggcgtcggagatttgatcgcagaccttgtcagggtggccttcggtcacggattcggcggaaataagccgatgttcttctgtcatatcatccctttcttcaggacttatcgccccgcgggatgcgaggcacaatgatacggtgtcaatttttacttgtcactgtggaagcgggcataaataaaggctcgtgccaaccagcgcggtggcgcgagccttacgtcttattcgctcctgatgttgagttatagccgattgcgataactcaggcaagcgtgtcgctcaaaatcagttgtgagagaactctcacaccatcattcggcgacgaactgtccaaacaatccaaacgaattgtcggaatcgatcagttgccctcgttggcgtcgtcctcgcccaaggtctcctcaagcaggccctcgtcgatttcgcggaaggcgatggacaggggcttctcattgttctggtattcgaccagcgggccgatgttctgcagcaggccctcgttgagctgcgtgaagtaggagttgatctggcgtgcgcgcttggcggcgaaaatggccagcgcgtacttggaatcggcgtgcttcatcaggtcgtcgatcggcgggttcgcaagaccgtcgggtgtcgggtcagtaccaaaagccattgttcttatctccagacattggaaaatctatctcaaccgaagcaagtgtagccgtttggggggacttctgccggacctccgccagacttccagtggaggaatgtattccaaaaatatgtgtgagaaacgttacgtttttgcaaattccattattcgactcttgacaagtggcgtgtccctcacaagggcttgaatagaaccatgactgaaatgcgatctgcaaaaattatgtcagggcgcgtctttgcaggcgcccgagccctctaccgtgctgcgggcgtcagcggagacgacatgggcaagaagcccatcatcgccatcgccaactcgttcgatgagttcctgcccggccacgtccacctcaacaaggtcggccgcatcgtttccgaggctatcaaggaagctggcggcatcccgcgcgagttcaacacgatggccgtggacgacggcatcgccatgggtcacaccggcatgctctactccctgccctcccgcgacatcatcgccgacaccgtcgaataccagtgcaacgcgcactgtgccgacgcactcatctgcatcccgaactgcgacaaggtcgtgccgggcatgctgatggccgccctgcgcctcaacatcccgaccgtgttcgtctccggtggcccgatggaggccggcaccacggtgctcgccgacggcaccgtcaagagcaccgaccttatcgacgtgatgtacgccaccgccgacgacagcgtctccgatgaggaactgctcaactatgagaagaccgtctgcccgacctgcggctcctgcgccggcatgttcaccgccaactcgatgaactgcctgaccgaggccatcggcctggccctgcccggcaacggcaccatcctcgcctcccactcctaccgcaaggacctgttcgagcgtgccgccaagcaggtcgtcaagatcgcccaccagtactatgacgattccgacgattccgtgctgccgcgctccatcgccaccaaggaagccttcgagaacgccatgaccatggatgtggccatgggcggttccaccaacaccgtgttgcacatcctcgccatggcccaatccgccgacgtggacttcaccctggacgacatcgagcgtatttcccacaccgtgccgtgcatctgcaaggcctcgccgtccggcaagtgggagatttccgacgtgcaccgcgccggcggcatcaccggcatcctcggcgagctcgaccgcgccggcaagctgcacaccaacgtgcactccatcgactacccgacgctggaagccaagctggccgattgggacatcatgcgcccgacctgcaccgaggaagcccaacagatgtacaaggccgctcctggccacatcatctccccggagccgtggacccacaccaccctgttcgattcgctcgaccgtgaccgcgccaacggcgccatccacgacatcaaccacccggagattcacgaaggcggcctcgccgtgctgcgcggcaacctggcccccgacggctgcgtggtcaagaccgccggtgttccgccggagatctggaagttccgtggaccggctctggtggtcgactcccaggagcaggccatcgaggtcattctgaacgacaccctgaagcccggcatggcgcttgtgattcgttacgaaggcccgaagggtggcccgggcatgcaggaaatgctgtacccgacctccttcgtcaagggcaagggcatcggcaagcaggtcgccatgctcaccgacggtcgctactccggcggttcctccggtctggccatcggccacatggcgcctgaggctgccaacaagggcccggtggcgctcatcaagaacggcgacatcatcgatatcgatatcgaagcccgttccgtgaacgttgaactgactgacgagcagctggacgagcgtcgtcgcgagcttgaggctggcgacggctacgtggctcaccgcaaccgccacgtctcccaggcgctgaaggcgtacgccgccttcgcccgctcggccgacaagggtgcgacgcgtgacccggagctaatcaacaagctctccggtctcaactgatcgccgattgcatagctgaaaagcccggtatcttcctcgcgaagatgccgggctttttgctgtgcttccgggcgggagcgatattgcttgttatcgcacgcaggcggcgggggagaggcgcgcgcctcgggcccagtcggcggcgcgcatggccttcttgccctgcgccttgacttgggtgagttccagcggcgtgctgccggtaccaacccacacgttcttcttgcccaccttcagttcgccgggctgaagctcggccggagtgttgggattggactggtcggccggttgcgcggcgaggatatgcagggtgaggggtttggcggccggctcgtcattatcggcgattggcccctccgcaaacagttcggtccatgccccaggatgtggcgtgcaggcgcgaacctgacggtcgatggcctcggcctcgtccgtccagctgatacgagcatcttccaccgtgattttgtgcgcgtattccaggccttcggccggttgcgcggtgaatgtggcagtgccctcacccacggcggccaaggcatccacatacatgggcgcgccttcctcggccagacggtcgaggagttcgccggaggtctcacggccggtcagctcgatggtcagggaagcgacgatcgggccatcgtccagaccctcgccgaccttgaacacgtcggcgccggtggtcgggtcgcccgcccaaatcgcacgctgggcgggagcggcgccacgccacttcggcaagttggagaaatgcaggttgtaccagcccatgggcactgcgtcgagtacgttcttaggcaggatattgccataggcgatgaccgcggcgatatccgcatgcaggttgttcagcgcttccatgaattcgggggagcggggtttgagatcgatgacgggcaacccgagttccagagccgtcgccttgaccgggctgggcgtgagcttgcggccgcggccggtaggcgcgtcggggcgggtgatgacgcctaccacatcaaaacgtggatcggcggcaaaggccttgagtgagggcaccgctacatcgggggtgccggcgaacacgagtttgagcatggtcctccttaaaacgtcgatgctcactgcacggccggaatgttcacgccattggcgatgagcagttcacgcagcttgaccggatcctggaaacgcacgccacggatgccggccgcattcgaaccgacgatgttcatggccttgtcgtcgatgaacaacgcgccatcggccttgataccgaactgattgagcgcggcctcgtagatttccttgtgcggcttgcgcagcttgacgaaaccggagacgagcttgccatcaagctgctgcagaatatcgcactgttcctcggccacgtggaaaaggctggattcccagttgctcaggccccacacgccaataccggcggccttcaggtcattgaccagcacgcgtgcgcccggcacgatgccggtcagggagtcgcggaagttcttgatgtagtagtcgaggatgtccgcccacttatcgcccctgtcacggcgtatgatggcgatggcctcgtcggtgctggtgccgccgtccatcaggtcgttgacatcgtagaagccggagatgtcgttgtcgaggaattcgtcgatggtcttctggctgtagcgggggatgagcacggccgctggatcccagtaaatcagcacgttgccgaaatcgaagatcacgtcggtgatcggcttgccggcgttcgcggcggcttcgccgtccgcgaccagcacgtcgtaatccatatccggctctccgggccaacccttcatggtgtcctccttatagcgatgttcgttctgtaatcatcgtttcacgtgttggagacgattagatcagatctttgggatctactcggaagcgaagctcgccgggctcgcgggacgctacatgacgagcggtttcccggtgcagtcgggccgccagttcggctcgccgactctgtggcacacggattactgccttcacccggtcggccgtggcttcgagctccctggcatcaaccgtgtccggttgcgcgatcggcaccggtcccaacatgccgggcagctcgccgcaggccgtccaatcgccgcccagggcgccgatacgctgcatcagcgtcatcaccgcatcacggcggccccacacgcaggcggcggccacggccggcggcataccggtctccacacgctcctcgagatccttggctgcaagaatcctcgaatcccagagcatcagcgattgggcgatggccgggtcggtctcgccgagaatcaacgcctggccgccacgggaacgcggcgcgcacaacgacatcgcacgcatccacgcggtcaacgtatccaaccgagcatccacgcccaacgcatacaagctggtccaagcgtcgagcacggccacggcacgatactcatggccagccgatccctgctcggcactgaccggacgcacgcgcggttcgaaaccgggagtggcgatgacaatcatcggctggcaagctacatcgcgcaccagaccctgcgtcttgctggacaaaactactggcacgccgcggaacaacccggccagttcagccgcagtgcctgcagcacccacgcgcaccacacgcatacgttcatgcccacagcccgggcacttccaattgatggcagcagccccacaccagcggcatcgcggtgtggaatcccggcggtcggccggtagttgcaacggtccagaacacttggcacaacgcgcctgacgatggcatttcgcacaactcagagtctcactgacgctgtcttgcggaatggacagcagcacggggccgctctccaaagccttagatagcacgcggacggccgtatgcggcacgcgcgccccgatggacgggtcggcaagacgcgcaagttcatcgcgattgagccaacgcacccaaggagtggcgtccttcagcggcgaggcgagcggatgaattgtggtggaatagccgctcactggggtctccactgtacctggaccggtgttttcccactggctttgcggggtgcgcgcattggccatggccacgaacacgccgccatgggacttggcgcgcagccgcatcacgccacgggcctgtggatatggcatcataccgtccatgttctgataggcggcatcctccaaaatggcgaacagcgccgggccttcaaccggcgcatacatcaccgcacgggtgccgatcaccaccttcacctgtcccaacgccacagccagataggtgcgataccggtcggccgcgggcatggtctccgcgttaagcacggcgacgtcgcccacccagccgccggccggagcaggggcgaacggtttgagcccataattgcgcagcataggcatcaggtcttcgacctcgcgcatggtgggcaattcaaccacggcagctttaccggcactcagcgcagtggccaccatccaggccatgttccgttgccactcctgtgcaccgggcagcgaatcaaacacaaaagattggaaacgctgaccggtaagcgcatcatgaagcacattgacgtcggcgtaattggcggtcagacgacgatacccctgcgcagccccctccgaaacggtactggcaacggcaaaggtagagccagcaggtttggtcccatcgggattggtgccacgcccggcaaaaccgccttgcgtattatctggtagggagccgccgaccggtcggcggaacgacgcggccaaccgctgttcggcctccaccttggccacgcgcggtggcacagcgaaacgcagaatattggcccgtgtgccgccataggctttggcaatcagaccgatatcctcacgcatcgatgcgggaaccagcacatcggggctcaacacccgttcgatatagcgaatcgaagagcgcggggtatcgctggtatcggtgcgtgcccagatcacgccgctgaccctctgaccgccaaaccgcacgcgcaccagcacacccggttgtgcggcctcgctgtctttttcatcaatgaagtaatcgaatgtctggccgaggtggagcgcctgcacatccaacacgacttgcgctatgggatgctgctcggccggcgtatgctccgcaggcgcacgtttacgccgcttgcggggagccagccccgcaagcgtcaactgttctgcgcctgaagtagtcatggctcaactataagtgccggagccgaggtcggtaaaattttaccggcgcaggtaatcgagtacgtgggttaggtcgcggtcgttgatggctttgtcggcggcgagctgggtctttggcttggcacagaacgcgagacccagaccggcggcctgaatcatcggaatatcgttggcgccatcgcccacagccacggtctggctcatcggaatacccaaacggtccgcccatgtctgcaaggcgtgcaacttcacggtcttgctcacgatttcgccgagcaccttgccggtcaagcacccatcggcaacctcaagccggttggcgatccaatagtcgatatggccctcggccgccagcatatcgaccacttcatggaagccgccggacaccacgccgaccttccaaccgtgttcatgcagcgtgtcgataagctccagcgcacccttggtgaaatgcagcttgtcatgcaccgtatcgaacgcggaaaccggcagccccttcagcagcgccacacgagcgcgcaaggcgtcgcagaactccagttcgccgcgcatggcgcgtgcggtcactccggcaatctcctcaccgcagccagccaccacgcccaactcgtcgataacctcttcgtcaatgagcgtggagtccacatccataaccagcaggccgggcttgctcagcgtcggcacagaaaccgcagaatcagccgggctcccaacttcgctctcggcggacttgtcaacaaaatgcacatcttcttgcgtcatgcttctgattctgggaaaaccttgggacaatgccctctatgagtttttccatggcagccgccactattcttgcgaccgaccccacacccatctgcaccaccaccgaacccggcctgatcggcaccatcaccgactggctgatcatgctgatggaaaccatcggcggtatcggcgtggccttggccatcgccctcgaatccatcttcccgcccatcccgtccgaagtcatccttccgctctccggcttcaccgccgcacgcggcaccctgagtctgccgggcgcaatcatctgggccaccatcggctccgtactgggtgcctggaccttgtacggcatctcccgctgggtgggcctgcatcgcatcaatctcgcggcagacaaaatccccggcgtcagccgcaaagacgtgagcaaagccaacgactggttcaccaaatacggcacatggtcggtgctcatcggccgcgtgattcccgtggtacgctcgctgatttcgattcccgccgggttcaaccgcatgaacttcctgcacttcaccggctggaccctgctcggctcggccgtgtggaacaccatcctcgtttccgccggttacctactcggcgaccagtggtgctcgattcaaggcgcgctcggcgtgttcgaggacgtggtcatcgcggccgtgattgtggtcatcgtatggttcgtggtgcgaaaagtgcgtactgttatacgtaacaggaaatccgccgacggcaacgaatagggtctgccgactgccataagttgccgaaaatcccggatagaagggaagcgaagaacccgcatgagcgacaccgaagatctcgccgcgctgaacgatcgcctgatggccaagaaccatgcgcttgccgaagcgctgagccgcgccggcaaggaactgaccaaggcgaagtcacagctcgcccagctcgctcagccgccgctcaccttcgccaccatggtcaaggtcgattccacccgcaccgatgaagacggcatccagcacgcgtcggccgaagtcatttccggcacccgccgcatggtggtgcctgtggcctccaacgtcaacgccgcccgcctgaccgccggggccaccgtgatgctcaacgagaagctcgtgctggtcgagcagcgcgatgctgacaccgtgggccagattcgcagtgtcaagcaggtacttgacgacggtcgactgatcgttaccgacgcctccggcaatcccgtgctcatccgccgttccggcgcgctcgcgtatgcgggcatcaatcagggcgaccgtattatcgtcgatccgtccgtccgcctcgccatcgaagcgctgcccgccgagggcgacaaggatctggtgctggaggagaccccggatgtcacgttcgccgacatcggcggcctggatagtgagatcggtcgtatcagggacgccgtccaactgccgttccagcatcgtgcgctgtttgagcgctacgatttgaagccgccaaagggcgtgctgctgtacggtccgcccggcaacggcaagacgatgattgccaaggccgtggcgaacgccctgtgcgagggtggttacgattcgaatggcgacggctcgatcagtccggtcgaaacccatgtcaagggcgtgttcctgtccgtcaagggcccggaactgctcaacaaatacgtcggtgaatccgaacgactgattcgcctgattttccagcgcgcccgtgaacgcgccgcagacggcaatccggtggtcgtgttcatcgatgagatggattcgctgctacgcacccgcggctccggcgtctcctccgatgtggagaccacgattgtgccccagttcctctccgaactcgacggcgtggaatcactcgacaatgtgatggtaatcggtgcctccaaccgcgtggacatgatcgatccggctgtgttgcgaccggggcgtctcgacgtcaagattcgcgtcggccggcccaaaaccaatcaggccatcgccatcgtggaccattacctcaccgacgacctgcctctggaagatggcgtcgacgcgcacgccttgtccgccgtgctggtgcatgacatctacggaacctccgaacgccgccatctatgcgacgtgcaggaggagaacggccagtggcatgcgttgttcctggccgacgtggtctccggcgcgatgctcaagaacatcgtggaccgggccaagacccgagcggtcaaggaatccatcgaaaccggcttggacgtggcactcaccgtgccgctgctcgctgccgccgtggaagacgaataccgcgagacccgcgattccatggccgacgtggaccccgaacaatggtcgcgcatcaacggcatggacccgatccgccgcatccgcaccgccgaatagctcaagctcaaggagcactacatgaccgttaaacgagtgatgggcaccgaaaccgaatacgcggtatccctgaacatcccggaccgctacaatccggtgcaactgtccttcgacgtggtgaacggcgccgcggacagccacagcaaatccatccgctgggactaccggcaggaggacccggtcaacgacgcgcgcggcacccgtctcgaacgcgccgccgcccgcccggacatgctcaccgacgccccgcagctcaacatcaccaacgtgatcgcccccaacggcggccgcgtctatgtggaccacgcccaccccgaatactcggcgccggaaaccaccgacccgttcgaagcggtccgatacgaccacgccggagacctcatcatgcaggccgccaccgaacgcgcccgcaaacagactggcactcccattgccctgcatcgcaacaatgtggatggcaagggctcctgctggggcacgcacgagaactatatgatggcccgcgcggtgccattcgacttggtcacacgcctgatgaccctccacttcgtcacccgccagatctacgccggctccggccgcgtagggattggcgagaacagcgagatcccgggctaccagctcagccagcgcgccgactacatccacgccaaagtcggcctgcaaaccaccttcgaacgcccgatcatcaatacgcgcgacgaatcccactccaccgatgcataccgccgtctgcacgtcatcgtcggcgacgccaatcgcatggaggtgccgcaggcactgaaactcggcaccacgagcatgctgctgtggctgctcgaacatgcggacgaggccggattcgacctgaacgccttcctcgacgaactcgaactgtctgacccagtcgaggccatacacaccgtttcccgcgacctgacgctgggggcaatcttgccgctggccaacggcggcgaaaccaacgcatggcttatccagctcaaactgcgccaagccgtctaccaggttgccgcactggtcgaaggtaccgacaccgccggcgaacccgcctggccggacaaatccaccacatccattatggcgatgtggcagcaggcgctcatcgactgcgcctccatccgccatgccgccgacgatgacgaacgtctggccatgaccggcgaggccagccgcatcgaatggctgctcaaatggcagctgctcgaaaaactgcgccgcaaaatcaccacaacgtccgcacccggcgtggccaacggatggaatgatccgcgactgaaggtcatcgacctgaaatgggcggcgctcgaccccgcggacagcatcttcaccaaactcgaaccccgcaccgaacgggtggtgagcgccgccgacatcgcacgcgccaccaccgaaccgccggaagacacccgcgcctggctcagggcaaaactcgtggcgcaattcggcgatgaggtggccgccgccagctggtcccgactcactgttcgcgacccgcgcgccgcagacgagggcgaggcggtcgaattctacggcaatgccggccatatggccgctaccgaccatcacctgttctccctcgacatctccgatccgctcgccttcaccaaggcgcactgcgaaaccgaactcaattcagccgaacacgccatcgatctgctgaagtcgctggccatcaacgccgaacgatagacttggtagctatggaagaaacacgcgaagagaccccacaggacctgcgcaaccttgcgctcaaagtcgccggcctgctcgaagaagccggccagcatgccctccacgaccaactcaatccgcgtaacctcgcccagccgagcaccgagaacgcggaccgtggcccccgctacaagcttgaagtggacaacaagatcatgcgcttcatgagcgccagaatcgccgacatcgcccacttcgacggcttctggaccacccgccccgccgaaagccgccctggccagcgttactggtacatcggcaagatcgacggtgtgatcaactacgtacgtcgcatgagcgaatggacggtgaccgccgccctgttcgaattcggcccggacaacgagcccaagccgatcatcggcatcgtgcacgccccggccctcggcctgacctacctggccgccaggggagcgggtgccgtgcgcatccacaaaaccgcggtcggcgagaagcgcgacaaggtcgtgccgtcgatgacctcctcgctggatggttctgtgctgagctacggcatgtccttcatccccagcgaatcgcagcgtgcgctcgacgtggcctcctcgctcgccggacgcccggccgacatcaagcgcgtgggccccgtctcgctcgacctgtgcaaagtggccgacggcacctatgacgcctacttcgagccgatgctgcacgtgtgggatatcgcgggcatcgccgccggcaccgtagtggtctgggaggcacagggcacgctgagccgttgggacggcgaacgcatccactggcgtcacgataacgatgtagtggcctccaatggactcatcatccgcgaactgcagcattacctgcagcagtatccgtggctcgactccatcaaccagcgataattttttgactcctccggctcccctcgggtgaggggagccgtcggccgaaggctgactgaggggagtttgacagcccaaaaagaagacaacatgccacaacaattcgaacaacctcaagcacagcaggccgcgacccaggaagacgacgccctcgccaccacgcaggccgccgcccaaaccgagtccaccgaccaagccgacgtgttggacgacatcctcgacgacatcgaatccgccttggaaaccaacgccgaggaatacgtcaacagcttcgtgcaaaaaggcggcgagtgatgccccaactgcgtgacagcggcacccgctccctgcacgccacggaacccgtaccatccgccgagatggacgggttctgccgtattttcggcgtcgaaaccgaatacggcgtggcggtcaccggtgccgaacgccccgtggacgccggccaggtggcgatgaccatgttccagcccatcgtctcccgttcccgctccaccaacacgtatctggccaatggctcacgtctgtatctggacgtcggatcccaccccgaatacgccaccgccgaagcgcgcgatccgcgcgaggccctggcccaggacctcgccggcgaacacgtgatgcgcaacctagccctgaaggcccagcgcaagctgcgcgaatcctacggcgcacacgccacgatccatgtgttcaaaaacaacgtcgactccgccggccacgccttcggctgccacgaaaactacctggtccgccgcttcgtgccgttggagaccatcgaacaccagctgctgccgttcctcatcacccgccagctgtacaccggtgccggccgcatgaccccggacggcttccagatcacccagcgcgcggacttcctggacgaggccgtctcctcggccaccacccgctcccgcccgatggtcaacacgcgcgacgaaccgcacgccgaccccgactccttccgccggctgcatgtgatcatcggcgactcgaaccgttcgcaatggtccacatggatgaagcttgccgtcacgcaccttgtgctgtgcgcgatcgaagacgccttccgccatggcgttccgtccggattcgagcagtatgcctttgctgatccggctgccgccaatcgcacggtcagtcgattccttgacaatccgcgcgccgaactgacgttcgaatcaggcgaatccgtgtccgcactgggtctgcagcgccggtattatgcggcggtcaaggccttcatcgaaacccatggcgatgcgctggcaagttcgctgccggccaccacgatcgacacgattatgggggagtggagccgcgttctggacgcgctggagcgtggtacatacgatgcgctcgccgaccgcgtggactgggccgccaagaagcgtctgttcgacgcgctcaaacgccgtcgcccggacgtcaccttcgcccagatggaacagcttgagctcgactaccacgacatcgccaacggtcgcctgtacggttcgctcgtagcccgcaaccagatgcgtgagctgctgacaggagacaacgtggaatacgccgtgcacaatccgccgaccgacacccgtgccgccctgcgtggccggttcgtggacgcggccctgaacgtcggggcccagttctccgccgactggacccacctgaccctgaccgcccccgaacgccgggaagccatactcctcgatcccttcgaggccgagcccaccctgggattcgagcagcttatggaagcgctgaactagtccggaataatacggttggacaacacgtcacagcaccacaacaaaaagaccccgaccatctcggtcggggtctttgtcgtcagtaatgctcgaagtaatcgctacgagcagaaggtcactcggtgacggccttcttcagcagggagccagcggagatacgaacgccgtaggaagccggaatgtcaatctgctcgccagtgcgcgggttgcggccggtgcgagcggcgcgcttgacgcgctcagcggagaacaggccggtgagcttcaggccttcgccggacttcatagcctcgacgaacacatcctggaaggcgttaacagcagcctcggcctgagccttggtcaggttggacttctgggcgatcttcgaaacgaggtcagacttgttgtatgccataaagcatccttcttgggtcaggggacaagcacttttgcttagtccatgttgtcatcaatgatactagcgcatgtttctgcgaaaacccgcgttttataagggttttcacatctatttccccgaagggggtatgaaaatagacgaatcagacaagattatgcttgtcaagccacttcatggccgccgcgcccagcggaatgcgcagccagtagaacaccacgcggtgcagcaaagtggcggaaagcgccacgccctgcggcactccgaccgccacgaacgcgaatgtcagcgccgcttccacaccgcccagaccgcctggagtgggcactgcggaacccaatgcataggccagcaggaagacgaacgtcgtttcaatcggattcgatgaatggccgaacgcttgcagggccgcccagaaagcgagcccagtggtcgcgttctggaacagcgcgcccaggcagctgactgtgagctgtcggggctgggaaagcacgtccagcagctggttgatatacgtcttggccagcggcataagacgacgggtcacccagtggcgcaacggcggaatcatcatcgcaatggacagcaccacgaccacaacgcccagcacgataaccaacgtgtttgtcgggattgcgccggagaacatgttgcggccggtgaacaggccgatgatgaccagcatggagaagtacacggcgtaatacaccacgagcgcggcgctcataattgcggtcgcctgggtgttgcgatagccggatttgcgcaggaactgcaggttgacgaacgaggggcccacgccggctggcatggatacggtggcgaagccgcctgccacctggctcatgaagacgcccatattgtcacgcttgtgccgcgccatcagggaaccgagcgaaatcgacgagccgatccagccgcagacaccgaacgcgagcgtcaccaccgccatcaacgggttggcgttggtcagcgcggtgatgatctcctcgggcttcagttgggtgaagaccacgaccacggccacgatgaccagcagcatggtgatcatcgaacgccaggagaatcgggccagcgtcaccggttcggcggattccaccgtctcctcgtcagccagcgcggtgatacgactcctcaggcccttgagcagctgcttgtcccaggattccagcgcgcgcgtgggggaggggaccgcgaccttctgaatgaacggggccaaggccgtcagagtcgtgtctccccacgcctcgtgggcggcctccaccgccggttccacgccgatcagcgcggcgaacagcactagcagctgaactttgtcgagcgcggtgttggccggaccggaagcgttgtcgccgttgagccagccggcaatcacggcggtgccgtcttcaagccgggcgagcgtgtccggcgtgatgcgccggtgcgtatagccgcgccggctcgccacggacaggtagcgcatgtaggccacggcatccgccttggtaagcgtgttcaggttggcgggcagctcgatggtgtgtgcatccagcaccagaatcgcggattcgtcggtatcggcgatgccgtagggtgcgggcgcgggcagtttgatattgtgcagacccagcagcatggcgaaatgatgctggacggcgtcacgcacggaacggtcacgtcggatggacacactggtgaaacgcacccagtcccacaactgcttcagatagccgacggtatgggtctgcgcgtcgatgacggaaacgatgaaacgacggttgtccgtggtatccagatcgtagatgcgcgagccttcggccagatcgtcgtccagcgtgacggccagtgaaccgtggccgacgccgggctcctgatgccgaatcagcgaggcggtgtccagtccgatgcctttcagggcggcgaccagatcttggccccacacgcccttgttctgcgtgccgaccacgaatcggatcagcatgcccactgtgcggccggcggccatcgacaccagcatgccggtgaccgaatgccacgacagcaccaccattaccgcagcgatggcatacaggatattccagctccatttgaccgtggagcgggtgcggcgtggcccggcggcggtcaggaaggacgccatgccggcgtagatgtcgggcaacagcccggagccgtatgaggtggcggctgagactagtgccattggcagggtgaaatcgttcagactgctgattgccgtcgatacgacccacaccatgccgtagccggcgaacatggccagcgcggacaccgcggcctgcagccattcccgggccagtagcaattgagcgagcacgatgatcacgatgacgatggtggccagctgcgtcagcacggtggaggggaagtcagccagccagttgatggcttgggcggcggtatgcgcgtcggattcgacgccgcgcgtcatgccgcccagatacacggcgaacaccatgaccacggcggccatcaatagcgacagaccggctcgggtcaggtcgccgaagtcgcgcgtgcggcgcggagcgatgtcgtcgatgtatggtccggaatcgttgctgtcgtcggttgccgggctgtccggtccgctgacagcaaaactggccgaccggccgtcaccagaggcgatcggccggtcggtagtggaggaggtcgccttgttcgggcgatcttccgtagtggactgatcctgttcagtagtcatgaaatggtcacctgacgcctgtccttgttcggttcagtttgcggttcggtttgtgactcagcgcagtagtgtggtggatgcgaaggattcgagggactcgagggactcgagagactcgcatcgcgcctatctcagcggccgaaagcgacgagctggctggccacaccggtgtaggtggcgggggtcagagccttcaagcgagcggcggtttccgggtcgaaggactgctggtcgatgaactgctcgacctgttccttgttgatggtgtggccgcgcataagctccttgaccttctcgtacggcttatccatgcccggcaggcccttgagctcgcaggcgcgcatggcggtctggatcggctcgccaagcacctcccagttctcatccagctcacgctcgatgacgtgggtgttcgggtggatggactcaaggccacccatgaggttggtcagggcgagcaaggagtagccgagcgcggaaccgatgttgcgctgggtggtcgaatcggtcagatcgcgctgccaacgggattccaccagcgtggcggagagggtgtcgagcagcgagcagctgatctcgaagttggcttcggcgttctcgaaacgaatcgggttgaccttgtgcggcatggtggaggaaccagtggcacccttgaccggcacctgggcgaacacgccgcgggagatgtacatccacacgtccacgcacaggttgtgcatgatgcggttggcgtgggagacggtggagtacagctcggcctgccagtcgtggctttcgatctgcgtggtcagcgggttccaggtcaggcccatgcggttcgtgacgaactcgcgggagacagcgatccagtcgacatccgggcatgcggccaagtgggcaccgaacgtgccggtcgcgccgttgatcttgcccaggtactcctggttttcgatgtgcttgagctgacggttcagacggtagacgtagacggcgagctccttgccgagtgtggtcggcgtggccggctggccgtgggtgagagagagcagcggcatatccttgaattcctcggccttgccggcgaggtggtcgatgatgcgcttgaactccggggtccacacgttttccatcgcgttcttgacgcaacgggcgatggagaggttgttgatgtcttcggacgtgcaggcgaagtgcacgagggtcttcagctcgtcgttgatgttggtcagctcggccggagccttgtcgatctgatcatcgatgtagtactccacggccttcacatcgtggtgggtgatggcctcatgagcggcgtgctgcttgatgccttcggcgccgaagtcctcgggaatggcgcgcaggaaggcctgctcttcggcagtgaacggcttgacgccgtcaacgatcggctggttgccgttgccctcaaagccgttggccagaagaatcatccattcgacttcgacacgcatgcgttcgcggttcagggcaggttcgctcatgtattcgacgagcggggcggtggccttgtgataacggccgtcgagtggggtcaatgcgattgcgggggaaatatcggtaagcttcataacctccaagggtacttccagccgtgaaccgagcggctatactgtggtgcggcgttcccgcccgagccgcacaggtcaaggaacgcccgtggttcgattactgtgtgcggcctttaaggctaggagatcaccatgcctgcaaccaccattcatactcttccgaaacgtccgattgccgtatcgtcactgaaatggcagccgttggatatcgcggtcggtgccacgctgggtgcggcctgcggcgtgatcttctggggattcaacttcgcgtacatgccgatctcttcggtattcggcgcgattctgcccggtttcgccagcatcgtgcacgccgtctggtacttctccggtacgctggcggtgctgattctgcgcaaacccggagcggcgctgtacgtgaaccttatcggcacgctggtcgaaacggtgattggtagccagttcgatttgggcttcgtgattatctcggcgctgttgcaaggtgttttcgctgagattccgttcgccttgacccgttaccgcatgttcaatctgccgatttccattgcatccggtgcgttggtcgccttggaatacggcacatatctgatgctgtttcgctacgtgggtgtgtcattcgtcagcccgcgtggcattgtgcacatgatttccgaggtcaccggcggcgtgcttatcagcggcgtgatggcctggtatctgatgctggccatcgccaaaaccggtgtgctcgaccgcctcgcatccggccgcgcactcatcgagcgacgcgcctgacactctttgcgcgccactttcccgggaatgttgcgctgatagagggggtttcgggcatgctagcgcaacaatcccgggaaagtggcgctagccgcgtctctgcggtgattgcattgtggggtagccgattgatgctaagcattgacaagttgatgtgcccgttgccgtgagaccccgagtatatcgcctatttgctgtagggcgagacccatgccatgtagttcttgtgctgcggcgcgagtttcccgcgctgcgttcgatctgcattccgcttcttccttgcgcagtcgccgagcttcatcaagatgctcctgcacggattgcggcagctttgtctctacggtgagtgcgaaatcagcatcttgtgtcatgacggtgataaggtcgcgtgccatactttcaatctctgctgttgttcttgcctgcgtgaaaccgataccgggaatctcaagaatccagtttttttcgccaggacgaacgatgacctgatatgttttcactgctgataccagcctttcccgagtttggcttctgcttctttgcaaataatgtccgcgaggttgttgtcgatttcgttatgacgtgggatggggaatcataagtccatcgagttggaatatctcatgactccctccttgcctgatactttcaaacgtgacattcttgcgttctgccgcttgcttcatcagtttgatgagccatctcctactcgtcattatattgttaactcctttcttgacaactctgtcaagtgtggtatttacttttaaccgccgaacgtgctgaactcggtggttcgctcgctaggggcaatggtcgcggactgggtcatgcggccttggtagtagcgggtttccttgagctctccgttgataacttcctggaaatgggcttcgtggcgttgcacggcgggggagccgaggtcggtggcgttctgataggcggcctgatggtatttgatccagtgcgacaactccctgccgttggtcgaaccagccacgggtgcggcgtcatatggggtcagaccggtgatgggcgttgcgccgggagtgcatgagccgtccgaatgcactgtggatggtgttgccgcgggcgcgggcgatacatgcccttgtacggtgagccagttatcggtgaccgggttggcggcaccatccagtgcggcgaccagttcatcatcgatttccacgctggtgacccacgtgcgttgcggaatcggatgattggccaccggcgatccggctgtcaccacatgctcgatggtatattcctccgcccaatccgaggcaagcgtggcggcaacgataccaccctgggaatggccgatcagcgccacgggctcatccttgccgatgcctgcctgacgcatcgcctcggcaaccatgcgagcgctgtccgctttcctgcggcgctcctgatcggcgctcatcagttccacgttctgcgcccagccaaatggtgagtcaggctgtccatcggtacccgggatggtgaccagccaggagttggttccatcagatcgttcatagcgttgaatggcgatggtcccatattcgagtccgctgttcagctcgattttgccgagccgctcttcggcgagcctgcgcagattctccattgactcggccaccgatccgcttgcgcggacaacgtcggcattcgcctgcacctcgcgcacgttcagatgattgccttggacgacgtctttcgccgggccggagaaattggcgattttccccgcagccttgttgacctcatcggtgtgcgcaatgctcttgccgataggtacgccgccaatgattccgcccgcgccgctaagcactccttcctggaacggataggtgaacgtggacatccatgccgggttcggtttgccgtcaatagtccagccggccagaaagccgcccgccgccacagcggcaacacccgccgcggcatatcccggtttggcctgtgtgccggcctgcaataattcggtaaacatgcgccgagccgtcatctccgcctgagaatacagagagtgtgcgcgaatcagcagatcggccgcgccacgcagatcatcgctcaaccgctgacatgccgttgcatggtcataacaccgattgcccagcgcggcatatggtgcagtgacatggccgggaacaacggcgctcggatcgcccgactgcaaggtgacgcacatcggcgcactatgccgatgtgactgcaactgtaatgcggccgattcccaagccgtggctatggccgcaaatcctgccgcctcgtcatcgagagccttggctatggcggcatattcttcaagagtggctggcgcatatcccactccgccgtaaacggacgattccacttgccagtaatcgtgctcgctcatgacgacccccaagccaatcggtgggtggtctccatgtcttgcgcgagactggccgaatactgtgcggtgcgactgagccgcgatcggaatagatcggcggctttaccggtccacacgatgttgctggagcggttcacggccaccgccgtctggtccgattgcgccagtgtggccgcacgctggacggacacgaggtcgcgactacgctgtaccgccgcatggcaagggcaagtgccgtaatcgaacggcgtcaccgtattgccggcaaagccgccggtgggatcgatgggtgctgggttgctggtgtaggtattcatatatccagctaaaaggacaagactcatgcttgtccagccggaacgaccaatgtggttctagcttgccgattttgggtgaagttatccccaagtgttgtgcatagtcgtaacgattatccacaaatagcctgtttgggcacaccttggatcagccatggcctatcgaaaattggataaatgccaaagccgacagccgaaaccgggaaacagccgcgataaggccatgacccgtgagggtgtgagaaaaaagaacaactgtgaacgactgcttaccacggcttggtagccccggtacccttgttctgcgtcgctttctgctcggattgggtggtgttcgactgggtatcggtggattgctgattggccttcatcagctcctcgacctgcttcttctgttcgtcggtcaacgcgccgccctttttggcattggatgaagaattctcggattgctgtgccgactgggcttgcccggaatcggaaccgctgttctgcgcctcggcctgtttcagggtgatctttgtcagctcggaagaaatcgaagcattggtgtcgatggcgtccttgacttgcggcaacagaagcgtgcgcattcgcccggcctcgtcgaattgcgcgtcggtctgctgctgttgcgccttgagcgtggtgatatccgtggactcgtcctgagccgctttgatattggcgttcaatgatgcggtggcctgattgaacgtaatcgaagcggacaggtttactgccgccacgccggcaaccagcaacagcaatacggcgccacaagccaggacgatacgtgcccaaagcggacacttcgcccgcatccgagtattcgccgagccatcgttctcgtggatttcgttactgtttctcacagcagtctccttgaggttgcgatccatgcaccgacttccgtggcaagcaatatcgccaacgcaatggccaacggccataccaccggcgtggtgcgtgtgcgttccctgaccgtggtggtcatgcgccactgcttcgacgacttggccgaaaccgaatccgccaaagtctgtgaagcgttcacggccacatacgtgccactgatctcgtcggcaatgtctttaaggttcttctcatccatcttggagatgccgggttcgccggtatccgggtcgaccacccagtggtccgtggtgttggaatcgccggcactgacgccatcggcgatgacgggaatcttgccgccctcggtcgagccgacgcccacggtaaacccatcattgagatactggcgcagtgacgagaacgtacgacgcgtcacattcgaggtctgttcgccgtcagtgatgaggtacagcacaatcgcatcatccgggtgcgcttcacgaatcgacttcacggtcagcagcaattgatcgatcggagcatccagactggagcccgccgacacggatgtggcttccaccgccaacgtgttggcccaattatcgatggccggcgcatccggggtcagcggcacatcaagcgtccccgaagcaccgaaccgtaacgccgcgaaactggcgtccggataagcggcggtcacatcatgcacggcctggcgtgcggcatcgatgcgggtaatggtcttctcggacccgtatgtggcgtcggccaccgccatcgacccggtggtatccaccgccacaatgacgtcggtggcattgatggcctgtgaggtggtagacgataccacgctgggagtcagtaccatcaccgcgacgatgagcagcataagcgtacgtcgtatgcaagcccacacggtctcgtcactggaagcacggcgacgaacaaataatgcgatttcgagaatggccagtacggcgagcccggccgccagcagtccgccggcgacccagcccaaggcgggggagaaggtgaatccgttcatcgcctcaacctccatgcacatacgatccagataatgagtatcacggccagagcaagcgtccacagaccgggagcgtccaccatcgaggatttcgccttgttctccacatccgtatctctacgcgactgaatatcccgtaccagctcatctatcgacgcgccattcgattgggtgaggaagatgcctccatgcgactcgatcgcggacttcatatccgttgtggtttggtccgattcactggctttcggcccggaatacaggccgtccacggtgattttggtctgctgggtcaaatccaacgcttcggtcagcgaataggtgggcttgcccgacacgacgttgtcggtggccagcacgatggatgccgcacgctgacggtcggcattcgcatgattggcttcgccataagcgaaaccggggagcatcgccgcgcaagacaccacgccgtcgccaatcaaggaggtggcgtccttgcggttctgcgtgccttcgagccaattggcgatgtcctgatattcggcatcggacatcttatcgatgtcatcctgcgactcgacgcctttcagcgccttgctggcggaggtcaactgtttggtgaccagttcgtagtcgtcggtcagcgggaacaccgtgcgtgaggtcgagttgaagatactcaaaccgatacgttccccctcgaaatgcttgaccagttccaaataggtgtcgatgacctcgcgatcataggggagcgtggaccccgacacatccagacacaggacgatatctcggctggaagcgcgttcgtcaccggcatccacttggctggggcgagccaccagcacaatggccagcgccagcgcaagcaccagcacgctgatggcgagacggcccaaagcgcgccattgacggaacaggcgggaagcgtgctcggtattgagatcgtcgtccatcgagaatacaggggtgtcgtcggcggcgttacggcgggcgaacacgacaatcagcacgataatcgccagcgtcgccaagacgccggccagagcggcccaaggccaatgccatgccagcatcatgaacgccacctttccaccagattcgccacccactcggcggcctgctgcacgctggtcgtctgggcgattcggttgcgggcatcatcggcaaattccggtggatacaacgcgccaatggtctgcttcaatgcgtccaatccttggcgattcgcgggcgtgcgattcaggtacgccaaatcggtcagcgtactggaactaagctccttgcctgatgcggcaccggcgaaatcacgggcgatgacggacaattcgacgaaagcctcatgccggggcagtgctccggattcatgacgggccaccacatcgtcgatgcgggcacgccactcggccttggagctggcattgctatgagcgccacgcgcgcggtcgctgttccgaggtttgcgtgcggggcgagacagcatgatgatcaacgcgatcagacctaccgccagcaacaggcatgcgacgatggccaccaccaggggagtggtcaaggccaacgactccacgggcctgagatcgccgggatcagtggcgagcgggatgatggggaacatgctgtgcatcatagatcaccagccaaagtcagtccgaccagttcgggtgcagtacccagtctattgcgtgtggtgcgggccaatgcccgggacaccagggcgacgaaacgatcgaacatggattcgctggatgcggatcgaatgatatgggaaccggcacgggtgagctcctgttccaaagccgcggccatatacgcgcgatgagtatcgacctcggccgctgccttggcgttgcgcaggaatgccggcacacgccgtgcactcaagccgtcggtgggagcgtggcgggatgagacggccttgaacggattcatcgtcgccacatcgatcagcaccatcggatgggtgcgggtaatacgacggatcgtggtgatatgccgctcctccatcgcatgctcatcggtggccaatacgatcaatgcctcgcgatccttgatacggcgcgcatattccagcagcgcgtcgatattacggtgatgatcccaatcacggtcaagcgccttgtccagcgtgcgttcgaactgcgcgaacccaccgttgaacggcacgcgggtgatactggactcatcgccgaacaccagcgaaatatcgtccgaccggcgcaacgacagtgcggcgaacatacgcagcgcattggcggcaacctgccatgcgcgttctccggaagggcatacgccagtcatctccaggcccacgtccatcagcaaccagacccgtgacgtcgacaggcgctcgcgctcgaccaccatggggcggccttggcgggcgctggtcttccaatcgataagacgggattcgtcgcctggctcataggcatgcacatccatcgcatcgccgctgccgccgcgacgcccggatgcgtgttcgccctccagcgcgcccaaagccttccttacggtaggcaggctcagctgagtgccaagggcctcgatcttcttgcgaacggaatcggaactcacggaacaggaaccgtttcgacgatcttgtcgacgatctgatcgctgaccacgccatcggccagtgcctcgaacgtcagcataatacggtggcgcagcacctcatgagcgaacgccttgaggtcctcgggtaccacatagtcgcgcccggacagcaacgccttcgcctggccgatacgggtcaaggcgatggtggcgcgcggcgaggcgcccaaacgcaccaaggacgacagtcccttgatggggcgggagccggcacctcgtgacgtggcggtgatatcgaccgcataacgcatgatcgcgtcggaaacatgcacgcggcgtgccgccttgcgcaaaaaatcaacgtcggacacggaaatgcgttcgccggtgatggtgtcgggaccgatcatatcggagccgcggcgggtgagcatggccagcatccgagcctcttcgtcgggcgaaggataggtcatgacggccttcatcatgaaacgatccatctgggcttcgggcaggttgaacgtgccctcctcctcgaccggattctcggtggcgatcaccatgaacggcttgggcaaggcgatacgctgcccgccgatggtcgtggcaccctcggccatggcctcaagcatggcggactgggttttggcattcgaacggttgatctcgtccagcagtacgaaattggcgtgaatcggaccgatctgcgtggtgaacttctgcgacgcaaaatcgaagacctgcgtgcccaccagatcagatggcatgagatcaggagtgcactgcacgcgcttgaacgagccggatacgcaggtggcgagcgtctgggcggccgtggtcttggccaagcccggcacggattcgataagaatatgcccgccggccaccaaggtcacgataagcgattcgcgtagattatcctgacccaccagtgtctgggcgaacctcgcccgaatggcgtcggccaggatacgtgcgcgtttggcgtcatcggcacccagcggagccgacacgccgggcgcgggaacggcgaccggtcgtgcggcggtggtcggcgaaggtatgttcggttgcgtggggaacaaagtcatgccccccactgtaactactcacaatgactgttggcctgcctaaagagtccaatccaccgggtcggcacccatggtgactagggcttgattggctctggagaatggtttggagccgaagaatccgcgggaagcggacagcggactcggatgaggcgatttgataatgaaggcattggtcagcaatggctcgaggctttgcgcattacgcccccagagaatcgccaccagcggctggggcttgccgtcggcgtccgtgcgcgcgttcaacgcacgaatcgcggcctcggtgacttcctcccagcctttgccctgatgcgaattcggccgcccgacgccgacagtcagacatctgttgagcaacatcaccccacgttccgtccacggtgtcagatcgccgttggtgggcatgggcaccccaaggtcgtcaaccaattccttataaatattgatcaggcttttcggcagcgggtgaacatttggcgccacgcagaagctcaaacccaccgggtgacccggggtcgggtaggggtcctggccgacaatcagcaccttgatggaatcgaacgggatggtgaacgcgcgcagaatattgtggcttgccggcagccacgggcgcccggcggcgttttccgcacgaagaaaatcgcccatatggtggatggtgggctccacgtcggccaaggcatgggcccaccctggctctaccagttcgctcaatggtttgatcatgactcaccactgtagtcaaacgtgcatatccggtgcatggggcgtggtgtggtggactgatgagttgtttgccgattacactcatgggtagttttgataggaagaaagggcgattatggcacgcgacacgatgacctacgaatcctatgaaccggattccttcgacaatcctccgaagggaccggtgggagttcaccgtggcgctcgttcggtaatggcccgcctctgcccgttcatcgtcgttattctggtggccgcgctgtgtggtgtcggggcctgggcatggatttccggagaatacaagaatgtagtgggaggatcgtcccagacggcgaccacgtccaagtccgattcgtccagcaaggctgagaccaagaacagcaccaaggatgattcctcgtccacttcgaccgattcgtccaaggactcgacttcggattcggcaaagtccgataccgacagtgacacgacatcctcgaatgagaatcaaaactccgatcagcagtctcagcagtccgaagccatcgcgactgtgaataaggccacgcaggtgcgtgtggtcaacgccacaggaatccaaggatatgcgggtcagcaggccgatgtgctgcagaccgccggttacaccagtgtcgaggcgaccaatccgagcggcacattgccggcttcttccgtggtgtggtatcagaatgagaccgataaggccaccgctgaggatgtggcgaccacgcttggcatttcggctgtggagcaggtgcaaggactcgccgttcccattacggtggtgttgctcaactagcgttgttgatgcgcccctgatatcggcgagaaatacatcgaaaactgtgagcgttctcacgcctatggaataattcgtaccgaaaatgtgccactgcggttgagattgttccctcgtcactgtacaaccgtcatctagtcgcgaggtagggggagcgcgatgcggttctttctacgttccctataggttttgtgtcgcgacgcccaagggaacaaaggaaagaccagatatggcacaaggtaccgtgaagttcttccttgccaagaaggggttcgggtttatccagccggacgacggcggcgaggacgttttcgtgcactacgcggaaatcaaggacgacggcagcaccaataagttcaaaatgctgtacgaaggcgatcgcgtggagtatacgcccgcttcgtccggcaaaggcacgcaggcaaaggatgttgtcaagctgtcttcgggtgaagcccgctccgagtgagcaacacgcacgcaaggatgtgcattgaaggccctgaccgtttcgacggttggggctttttcatgcccaaagcgcaatcgccgccgatggtgttggcactcggcgggcgcgagtgctaatgtctgggttagcactcggaggtcgagagtgataatcggcagctgacggctggtcgtcacgactcgacgcttgcgagtgataaccggtatacctagccatttggaggaatacgcaaccatggcaaagatcatctcttatgatgaggaagcccgtcagggcatgctggagggccttgacaagctcgccaacaccgtcaaggtcactctgggcccgaagggccgcaacgtcgtgctcgacaagacctacggcgctccgaccatcaccaacgatggcgtgtccatcgccaaggaaatcgaccttgaagacccgtacgagcgcatcggcgccgagctggtcaaggaagtcgccaagaagaccgacgacgtcgccggtgacggcaccaccactgcaaccgtgcttgctcagtccctggttcacgagggtctgaagaacgtggtcgccggctccaacccgatcgccctgcgtcgcggcatcgagaaggccaccgaggtcatcgtcaaggaactcgtcgctgccgccaaggacgtcgagaccaaggaccagatcgctgctaccgccaccatctccgccgctgaccctgaggtcggcgagaagatcgctgaggctctggacaaggtcggccaggacggcgttgtgaccgttgaagacaacaaccgcttcggcctggacctcgacttcaccgagggcatgcgttttgacaagggctacatcgccccgtacttcgtcaccaacgctgacgaccagaccgcagtgctcgaagatccgtacattctgctgacctccggcaaggtctcatcccagcaggacatcgtgcacgtggccgagctggtcatgaagaccggcaagccgctgctgatcatcgctgaggacgtcgacggcgaagcactgccgaccttgatcctgaacaacatccgtggcaccttcaagtcctgcgccgtcaaggccccgggctttggcgaccgtcgcaaggccatgctgcaggatatggccatcctgaccggtgctcaggttgtctccgacgaactgggcctgaagctcgagtccgtcgacacctccgtgctcggccacgccaagaaggtcatcgtctccaaggacgagaccaccatcgttcagggcgctggctccaaggaagacatcgacgctcgcgtggcccagatccgcgctgagatcgagaacaccgactccgattacgaccgtgagaagctgcaggagcgtctggccaagctggctggcggcgtggctgtcatcaaggtcggcgctgccaccgaggtcgaggccaaggagcgcaagcaccgcatcgaagatgccgtgcgtaacgccaaggccgccatcgaggaaggcctgctgcctggcggtggcgtggccctcgttcaggctgctgccaaggccgagaagaccgaggccgtcacctccctgaccggcgaagaggctaccggtgccgccatcgtgttccgcgccatcgaggccccgatcaagcagatcgccgagaacgccggcgtgtccggtgacgtggtcatcaacaccgtccgctccctgcctgatggcgaaggcttcaacgccgccaccgacacctacgaagacctgctggccgccggtgtgaccgacccggtcaaggtgacccgctccgctctgcagaacgccgcctccatcgctggtctgttcctgaccaccgaggccgtcgttgccaacaagccggagccgaagtctgctgccccggccgccggtgccgacatgggctactgatccgcaaacgatcgctagctgattgagctgaaaggggactccttcgggagtcccttttttgtattctggctcccctctttgaggggagccaagaaactagctggcaaacaggcgcgaagcttggatttcggcgtcagcgtacacggtggaggcttgcgtcagcgagcgttggatggactcgagtgaggcctccatctgctgttgggccgcacgccactgttcggctaccgcggtgaactgggtggccgccgaacctcgccatgcgtcctgcaaggcattgagattggtgtacatgccgcccacggcctgcctgatttgcgagatcgaagtggccactgcggccgaggatgattggattcgctcggaatctacctgatattggggcatcgttgctccttttctagagggttaatggtatgtatggcggccgattgccaataccggccgttaaggtggaggatatgtcaacaacgaatcgggaagacggaaaaacaactattgtggtcctagcttcggagccgtcctattcggccttcgggaatatggtccgaaaatggcttgtttgcgccatttgcgcccttgctgcagtagcgatgaacgcaatgtggataaccgcaaatgcctatggggataactcgagcgacagctctgacagctccagcagcagcaccgacagcggcgtgaccatcaccgagaacatcacggatacggaaaatctcctgggctcccatgcggccgaagtcacggatgccatcgccaaaaccgagaaggaaaccggtgtacacgtgcatctgctgtatctttccagtttcaatagtcaacagaaaccgggagactgggcggcaaccgtgatggagtccatgaatcccaagccgaacacagtgatgcttgccgtggcctcgaatgacggcaacctggtggtcgtcgtgtccaagaactccgataagtggcttctcgataacaaaaccgtcgataagctatccgaagccgcacagcagccgttactggaaaacccgccgagctggtctggcgcggcaacggcaatgatggatcaaatcgtgaaatccaaaaaagcctccacctcatcgtccacggtgatcgtaggcataatcatcatgggtgtggtattggtggcgctggtcatcatcatcgtggtcatggtggtgattcatcggcgcaaggagatcaagaaggattccaaggccgaactccaagatgacattcaggaaacgcccagaagagcgcgacactctaggaagcatgagtaagcctattgaagcatcgattgttgttgtcgacgacgagccgtccatccgagaactgctggtcgcttccctgcacttcgccggattcgaggtaaacaccgccgcttccggttctgaagccattgaggttatcgaaaaagtgcagcctgacctcatcgtgttggacgtcatgctgcctgacatcgatggattcaccgtcacccgtcgcatccgccaggaaggcattaacgcccctgtgctgtttctcaccgctcgtgacgacacccaagacaagatcatgggcctgaccgtcggcggtgacgattacgtcaccaagccgttcagcctcgaggaagtcgtggctcgcatccgcgccattctgcgccgtacccgcgaacaggtggaagacgatccgattattcgcgtcgccgacttggaaatcaacgaggactcccacgacgtgacccgtgcagggcagccggttgacctgagccctaccgaatacaagctgctgcgctacctgatggacaacgagggccgagtactgtccaaggcacagattctcgaccacgtctggcaatacgactggggcggcgacgcagccatcgtcgaatcgtacatctcctacctgcgcaagaaagtcgacggcatcgaggtcgacgacggcgaaggcggcaagcgcaaggtgactccgctgatcgaaaccaagcgcggcatcggatacatgattcgcgaaccgaagaactaatcgcctccatccataacgtatcgcaatctcatgagtatccccgataagcagtcaggcggcgtaccgccgagcagcacgccgaacgccgccccgaacacgaatcccatgcctgcaatgtcgccgttcgccgcccatttccaagagcagcgcgagcgtaagaaaaacatgctgatgcggcatatcgaccgtatctcgttgagcagcaagctggtggcctgcaccatcgccgtgctgctcatcggcgtgtcggtgatttccttctccatccgcgcgttggtgaacaactacatgctgcagaaaaccgacacccagttaagctcgcaaagccaactggtggtcaacaatatcgatctgctgtcaaaaaatgactcatcggggccgaactcgtactttctgcagattcaatacaccgacggaaccaaagacaaagaaggcaatcctctggtcgtgaccccgctgatgccgcagatgcaggacggtatcgtatcggtgccgattctgcctacctatggcgataccaatggcatcacgctcggtcaggcattcactacgcaggcggtggccaagcagatcattacggtgcagtccgacagtgcggacagccagaacgatccggccaacggaaactccaattcctctgacaccatcaccaaggtactggccaaccccactgccaatgccaaccatgccgccatcgtcacggcgagggcaccatggcgtattctgccggtgaccttccaacaaaacggcaaggaccgtgccgtggtgtacatcggcttgtcgctggccgaccaaatcgacaccgtcaacacactcacccgatactgcattgtggtcggcatcgccgtggtgctgctcggcggctccctgtccacgctgatcatccagcacacgatgacgccgctgaagcgcatcgagaagaccgccgcgaaaattgcagccggcgacctgagccaacgtattccttccgcgccggaaaacaccgaggtcggctctctggccgcctcgctgaattccatgctcacccgaatagaatccagtttccatgagcaggaggagaccaccgacaagatgaaacggttcgtctccgacgccagccatgagctgcgcaccccgttggccgccatccatggctatgcggagctgtataagatgcagcgcgatatgcctggtgccttggagcgtgcggacgagtccatcgaacatatcgaacggtccagccagcgcatgactgttcttgttgaggatctgctgtctttggcccgtctcgatgaggggcgcggcatcgatatgaccggcacggtgaaactctcgtcgctggtcaccgacgccgtcgacgatttgcatgcgctcgacccggaccgtgccgttcgccgcatgcagatttccctcgaaccggcgcgcgatttgaaccatcccgccgaattcagccttgccgaaggcgattggcctgaggtcgtactgcccggtgatgcctctcgactgcgccaggtggtgaccaacatcgtgggcaacatccaccgctacacgcctgccgattcgcccgctgaagccgcgctcggtgtgatgccggccgccatcgatccaagacagctcgcccgcatgcccgccagcgacgcgtcaatgcggcggttcatcgacgctgccgaagtaggtgcctcgatgcagaccggctatcgatatgccgtattgcgtttcgtggaccatggccccggcgtgccgcctgaatcgcgctcgaagattttcgaacgcttctacaccgcggacccatcccgtgcccgcgaaaagggcggtactggtttgggcatggccatcgcgcaatccgtggtcaaagcacatcacggctttatctgcgccaccggcaccgatgggggaggcctgaccttcaccgtggtgctgccgattgagcagatcgccgctcctgagcccaagcagtccaccggcaaaaccaaggacgccaaacagaagacttcttggttcagctctgagcgtaagactcaggcgactcagcccaaagcgtgaggtcaagccctgtgaggtaaactgtaccttcggtttactatttccattgaggattaaggaaggttcgcaatgcccaccggtcgagttcgttggtttgacgcagccaagggttatggcttcatcaccagtgaggaaggcaaggacgtgttcctgccggctcaggccctacccactggcgtcaccacgttgcgcaagggggccaaggtggagtattccgtggtggacggccgtcgtgggccgcaggccatggatgttcgcctgatcgcctccgctcccagcttggtcaaggccacccgcccgaaggcggatgacatggccgccatctgcgaggacctcatcaagatgcttgatgcggccggcaatacgttgcgccgtcaccgttacccatctgctgccgacagcaaaaagctggccacgttgctgcgtgcggtggcggatcaattcgatgtacaggactgatctgatctatgactgataccaccgaaaccatcgtgacaccggaccctcacgccatcgcgcgcgccgtgctgctcgaagtggccggcgagagcgatcaggtgggggatttcgttacctcatatgatcttgaggatcacgtcactgacttccgcttcgccgcgaatatccgtggctacgaaggatggcaatggtcggtgacgctgtatcacgacgaggagatcgactcttggaccgtcaacgaatcctccttgatccccactgaggacgcgttgatgccgcccaagtggattccttggaaggatcgccttgagcccacggatctggctcccaccgattcgatcggtaccgatccggatgacgagcgcatcgaggaaggcgaagtcgaggaatcctcgctgcaggatgtcaacgacgccgtcgagaccttccgactgacccgccgtcacgtgctgacctcgctgggccgcgcgcaggctgccaagcgctggtatgaaggtccgcgaggccccaaagcgttgagcaccaaaaccgccgaaggcaacctgtgctccacctgtggtttcttcgtgccgctcgcgggcgagctcgaccgtatgttcggcgtgtgcgccaacaagtggagtccggatgacggccgcgtggtttccttggaccacggctgcggcgagcattccgaaatcgaacctcccgagccaagccagctgtgggtgcagtccaagcctgctttcgacgatctgcatatcgacgtggtggccaaccgtccgcgcaagcaggagccggctgcccaggacgaggccgaaggcgaaaccgacaagacaggcgagcctgccggtgatgatatcgaagcacagaagactgttgacgggaacgccgtcgatactgagcccgctgaggaggcggcaggcgacgggacctcgcaatcccagtctgccggtgatgagtccgttgcacagaacgtatctgattccgttgtggatgttgatgcagctgattccagcgacgattccaagtctgatgctgacgacgaggccaccgaagaggatatcctcaacaacaccgttgccgatgatgatgaggatgatgagatggacgacgaagaggataacgttcgtccttcagacgatgtgactcctgaactcgaaaccgtcatcgatctcattgagcagctgcgccagaacagggcggacgaggaataaactccgaattccgcgaaaagtagatggtgatggggttgcaggaataaagaattcctccctgcaagcccatcaccgaggcgtgcgttagcactccatgccgattttggtgaatcagtgcaccacggtcaccgtgcattcggcgaagttcacgatctggcgggacaccgatcccaggaagtgcgcgtccagcccggacaggccacgcgagccgaccaccagatggctggcgtaccgcgaggccgcgatcagacctttggatgcgggaatatggaaggcgtttgtgctgaccttgacgccatcgggaatccgggccttggccatcagctcagagagaatctcctcggcgcggcgctgaccgaccttcaccggtgccacggcgttctcatagcccggaataacgcccaaatccttgagctgccagcagaacatcacatgcagcggcgcgtcgtgcagtcgtgcttcttccagtgcgaaatcgaacgcacggcgggaagtctcggaaccatccacaccaaccaccaccgggcggcgagcctcctcaaccaccggctgaggctgcgtgtagtgaacgggcttgtctcccggagtcagggcgttggcaatggcctcggtcacggtctcatcctcgctgccggcgatgcgcaccacggtcaccggcacttcggcggcctcggccagcgaagcggacagggaccccatgaaccagcgggccatacggctcagcgagcggcggccgaccacgatctgctgcgaatcatggccgatctgcagcagggccgaagtaccggaggccttcaccgaggtgagcttcagattcgccggatcgaagtcgatgcctgcagcggccttgtcgacccacacacgcagctcgttggcaatatcgtggcggaccttggcccaggcctcgtcgctgtccggttcggaccccatatcccaggaatgcgtccagccaaacacggcgttgacgctctgaccggttaacgaggcctcctcaagcgcccacttcagcgcggcaaaggattcatcggaaccatccacaccgacaacgatgtcgggcttggttgcagcttcactcatttcgagcctccttgtaatcgactacgggcgaatctagaaccagcatatcgttttcttctcctctcacggcgcaattcgtggaatccgatgaataaacgtcatcgtgaatcggtagagtaagacggaatgtcaattgaggaaggacaagcatgttcgaacggtttaccgaccgtgcacggcgcgtgatcgtgttggcgcaggaagaggcgagggcccttcagcacaactacatcggcaccgaacacctgctgctcggcctgatccgcgaaggtgagggtgtagccgccaaggcactcgcctcgaagggcgtggagctggatgccacccgcaagcaggttgaagaaatgatcggcaagggcaacgcggctccgaacgggcacatcccctttactccgcacgccaagcaggtgttggagttttcgctgcgtgaagccctgcagctgggccacagctacatcggcaccgagcacatcctgctcggcctgattcgcgaaggcgaaggcgtgggcacccaggtgctcatcaagatggacgtcgatctgggcgagttgcgtagcgcgaccatcgatatgattcgcggcaactccggcaccggcaccggtgacggcaagggcgacttggccaacgccggcggcgtgacggacaagcagaacaagtccggttccgccatcctcgatcagttcggccgcaacctgaccgccgaagccgctgaaggcaagctggacccggtcatcggccgtaccaacgagattgagcgcgttatggtcgtgctttcccgccgcaccaagaacaacccggtgctgatcggcgagcccggcgtgggcaagaccgctgtggtcgaaggcttggcccagaagatccaagccggcgacgtgccggaaaccctgaagggcaagcaggtctactcgctggacctcggttccatggtggccggctcccgctaccgtggtgatttcgaggagcgcctgaagaaggtgctgaaggaaatcaagactcgtggcgacatcgtgctgttcatcgacgagattcacaccatcgtgggcgccggctcggctgacggcgcgctgggtgcctccgacatgttgaagccgatgctggcccgtggcgagctccagaccattggtgccaccaccaccgacgagtaccgcaagtacatcgagaaggacgcggctctggaacgccgtttccagccgattcaggtgcacgagccgaccatcgccgagaccatcgagatcctgaagggcctgcgttcccgttacgagaaccaccaccacgtgaccatcaccgatggcgcgctgcagtctgccgcagagctgtccagccggtacatccaggaccgtaacctgcctgacaaggccatcgacctgatcgatgaggccggtgcacgcctgcgcatcaagcgcctgaccgccccgcctgagctcaaggaactcgacgagaagatcgccaagatcgccgccgacaaggacgaggccatcaagggccaggacttcgagaaggccgccgaactgcgcgacaagcaggagaagctggaagccgatcgcaagcagaaggaagactcctggcgcgaaggcgagtccgacgtcaagatggtcgtggacgaggacgtgatcgccgaggtcatcagctccaccaccggtatcccggtgttcaagctgactcaggccgagtccaagaaactgctcaacatggaagccgaactgcacaagcgcatcatcggccaggacgaggcggtttccgccctgtcccgctctatccgccgtactcgcgtgggtctgaaggacccgaagcgcccgtccggttcgttcatcttcgccggccccaccggcgtcggcaagaccgagctggccaagacgctcgccgaattcctgttcgacgatgaggacgcgctgattcgcgtggatatgtccgagttctccgagaagtacgcggcttcgcgactcttcggtgcgcctccgggatacgtcggctacgaggaaggcggcgagctcaccgaaaaggtgcgccgcaagccgttctccgtggtgctgttcgacgagatcgaaaaggctcatccggacatcttcaacacgttgctgcaggtgctcgatgacggccacctgaccgacggtcagggccgcaaggtggactttaagaacaccatcatcatcctgaccaccaacctcggtacgcgagacatcgccaaggccgccaacacgggcttcaacctaggtgccaacaacgagtccagctaccagcgcatgaaggaccaggtcagctccgaattgaagcagcagttccgcccggagttcctgaaccgtctggacgacatcatcgtcttcaagcagctcaccgagccgcaggtgcgccagatcgtggatctggacgtcaagcagctcaacgaccgcctgttcgaccgtcatatgtcgctcgaactcaccgacgccgccaaggacctgctcgcgcagaagggcttcgacccgctgctcggtgcccgtccgctgcgccgcgtgattcagcgcgacatcgaggacgccatctccgagaagatcctgatgggcgatctcgaagacggtcagcgcgtgattgtggatgcggaaggcgagggtatcctcggcgaattcaccttcaagggtgaggagttcgaggagccggccgccgccgataagcccgccgaagacggtgccgccactgatggcgagactccagccgacgccactccggccactgagccggccgaatccgctcccgccgattccggtgacgctccgcaggagtagtccgtttcgatagcgtagctagcgcataccagcaaagctccccttgacaggggagctgtcagcgaagctgactgaggggtagacctgcgcacacatgatgtgcacgtttgtggtctacccctcagttgcctctggcgacagctcccctgtcaaggggagctactgtttgtgtcggattattgcagcagggcgagtccggtgtcgatggtctcctcgcgggtaaacagcgtgcggccggcgcgcaccgaacgcaatactgagcagcgctcatacacggcgttgaacacgctatcggcgtccagcacaatgaagtttgctggcttgcccgtttccaagccgtacatatcgcgcaggcccaacgtagtggcaccgttgacggtcaggaacttcaacgcatcgtcgatttcttcaaagctcatcatctgtgccaaatgcagcacataatcaagaatgagcatcatattgccattgcccagcgggtaccacgggtcctgcattgaatcctggcccaatgacacattgacacccgcctcagtgagctccttgactcgcgtgatgccacggcgcttggggaaggtatcctgacggccctgcaaatacaggttctcggtgggggcgcaggcgaagttgatatgcgccgccttaagcagcttggtcaggtggaagaagtaggcgttgtccgccgatcccagcgagcaggtgtggctggcggtgaccttcgggccaatgccagccttatacgccaatgccgaaagcagctccacgtaacgggaattcggatcatccgtctcatcgcaatgcacgtcgatgagcttgtcgtatttcgaagccaactcaactaccgtgtgcatggaatgctcgccaaactcacggcactgttcgaaatgggggatgccgcccacgcagtcggcacccatcttgagtccttcctccaccagctcggcacccgattcgccatgcgggccctcgtaggagtacatgccctcctgcgggaagctgacgatctggagagtgaccgtatccttcaattcctccttaagctccagcagcgcctttaacgaggtcaggttcgggtcggtcacatcggcatgggatcgaatgagctgtacgccatgcagcatttctttcttaatgccgattttcgcgcgctgcttgatctcgtcgaccgtcaagtcggacttggtctcactccatcgctggatgccctcaaacaaggttccgctttcattcaccgcaccgggcttgcgggccgtgaatacgtaatcaaggtgcagatgcgtatcgcagaacggtgggcagacaagtttgccgcccagatcgaccacctcaatggccgccggatcaccaccctgagcctcatattgttgcgcgagtccggggccgaatgcggtgaacacaccatccgtgacgagaatgtcctgcaatggcagggtgcttgcagccgtgcttccgggttctccggtggcgatatgtgcgttggtgaacagtgtggtagtcatcgtcgctccttcaactggtgtgttgccgaacggttacgtgaaccgactgcccgcgtaaccaactgaggttattgtcaacagcacgctttgcggtgaggttaaccggaacgaccggtgttccgcgggggaatggacagattgtatgactgtatcgattcgcagtgtgcttcataacacgcagttcaaacgagccgatcctgtggtggaggtcgaaggcaaagacctcgatatgccagtgcgatgggtgttcaccaacgagcgagaggatgtctccagcttcctttcgggcggtgagatgctgattatcgagggcaacgctctgctcgccgccgattggcacggcacgctaggacaatatgtagcaagcctggcacaggctggtgttgccgctctggtggtcgaactggtggagggtgtggtgcggatgccggacgaactggtgtctgcggccaggctgcatgggttgacgttgattggtttgaaatctcgcgtaccttttgtcgacatctgtcagagtgtcaataccgctatcgtgcacgaacagatgcacttgcaattggaggtggacacaatgtccacttcattacgtgagggattgtcccgtactggcaatatcgaggctgtggccgaaaccattgcgtcgctgttcggcgaaagcgtcgccattttcgatggtgacggtctgttggccgctcgagcgggtcgtgcgttcgatgccggcaacgaatcgagcgccgtcatcgcccttgaaagtcgctcccggccggtgggagcattggagatcacgcaacgcaccatgactttcgacgccacgatgcgtcgggccatcgccaccatcgtgtctccggtggccgccctttatattgacggcggtgcgcgcatgggcatgatgcatcatctgagtatgggtccggccgacggcgtgcacgtcaatacatttgaggcgcaggaagcgcatgcgatgctcgaagcgctgggttttgccggatcatgcatctatatgccattcgcttttcggttcagatcggtggtggaaggcatcaaccatgtatcgacgatggtcgaacggttcgaagaactgtcgggatgcgccgtctcctgcatgatggaaggtgacttgatggtcggatggtgctccaccaccgattcctcagacggtgcggccgcattcggacgccattgcatggatgcgcttgccgtactggaaggcgacggtatatacgtggtgcatggccgagtggcattggacacggtgacgctggtcgacgggttcgcggtattgcgtgacatcgccaatcatgaaccggcatacgggcgagtcgtaagtaccatgtccgcactcgtcgaccgtttcgtcgcatcctctgatatggacaaggcgatgcgcatgctcgtggtgcagaccatcggattcgaggtcgccgcctccccgctgttgctggacacactgtgcgcctgcttcgacaacctcgacagcaaaaccggcgcgtgcgagcaattgggtatcagacggcaaaccctgtacaaccgactggacaaagtgacacaaatggtcggcgtcgactataacgacaaaccgaactggtcgatgctgctattcgccgccaaactcacgaaatcatggcaagaacagcatggtgaataatacggcagtgccactgggcaacctgtccacttctacgccgaactggttaatcgacgattcacgtttcagcaaatactcaagggcatagtcgaggctatcgcggcgctggtcgacctgctgcgaaacggattcccacttgaatctcattcagtcacacgaacagcacatccttgaaaggacggtgacatcatgagttccgcaacgattactacatctgcacgactgatgaattccaccccgcaaactgaagaacaggccatggtcagaaaagtcgcggtatcttccttcctcggcaacttcatcgagtggttcgactacgcctcctattcgtacttcgccaccactatcgccctggtgttcttcccaaccgacaatcacaccgtcgccatgctgcagaccttcggcgtgttcgcgctatccttcatcctgcgtccaatcggcgcactgttctggggtagctatggagataagaaaggccgtaaagccgcactggcccactcgattatgttcatgtccggtgcgagcttcctgatcggctgcctgccgtcttactcggtgattggcgttggcgcgccgattctgcttcttctgctgcgcatggtgcagggcttctccgcctccggtgaatatgccggtgcggccacgttcctcggcgaatatgcgcccacttcaaagcgcggcatctactgctcgctgattccggcttccaccgctatcggtctgctcgccggttctactctggccacgctgatgaccgccaacatgaactctagcgcgatggtcggttggggatggcgtgtgccgttcctgctggccggcccgctcggtctgattgtgctgtacatccgcgccaagctcgctgattcccccgtctaccagtcgatgaacgatgcgcttgagtccaagggcgccgcctccgccgacggtcaaatcgctgccaagagcggcatgttcgccccgctcgccgagttgttccacaaccatctcaaggctctgatcatcagcttcggagcctgcgtgctgaacgcggtcggcttctacaccgtgctcacctacctgccgacctatctgtctgacaccgtcggcatggacgccccccagtccggcaccatcaccaccatctgcctggtcgcctacgtgttcatggtgttcggcatgggccacatctccgacaaattcggccgcaagaaggtgctcatcggcgcttgcgtggcgttcatcgtcctcaccgttcctgccttcctcatcctcaacacctcccagttctggcccgtgctgctggttgagctggcaatgtgcgccaccctgaccgccaacgacggtaccctgtccagctacctgaccgagacgttccccacctccgtgcgcttcaccggattcgcgttcagcttcaatctggccaacgccatcttcggtggtacggcctcgttcatcgccactggcctgattgccctgaccggttcgtccatcgccccggcctggtacatggtgggcgttgcggccatcgccttggtcgcgatgatcctctcccacgaaaacaccgacaaggatctgaatcacatctgatctcctcagctccggctccttccccgagggagccgggcgtattcatcgaccatccaatccaccaccaacctaaaggagtactgcaatgggtagcaaccgccgtatggaccacatgacctggccggaattcaaggaggcgaagactcgtcccgtcatcgtgccgatcggttcgaccgaacagcacggccagcatctgcccatcggcaccgacgcggtactcgccacgcgggtcgccgaagatctggcggaacgcatcgacggcaccgtgctgcccaccctgagctacggatacaagtccaagccgctctccggtggcgggccgctgttcccgggcactatcgacatgaacggcgtgacagtgatcaaccaaatgcacgacgtgctgagcgaactcatcgccgatggcttcaccaagatcgtcgtcatgaacgcgcattttgaaaacgaggcgttcatcgtcgaggccatcgatctggtcacccgcgaaaccgggggagtggccaccatcgtggaaaccaattggtgggacccggttccgcagtcggttatcgacaaggtattcgatggattggtgttccccggctgggcattggagcatgcggccgtcaccgaaacttcgttgatgctccactatgcgccggaactggtgcacatggaccgtatggtcgaggaagccggtgccacggcgaaatcctatgtccgctaccctgtgcgccaaggtaacgttcccgctcacggcggactcgccaatccggccggctcgagcgccgaacgcggccgtctgattgccgaggcgtgcgtggatgcggtagctgagatctgcgccgaggaatttggcgagtaatctcctcttgctgacgcattcgtagtgactcgggttgcaaaggcctgaccctgatagtatggggtcaggcctttcccatcccaagacgccgctaagaattcacctgagagtcgccttcctaggcatggccattcaatcgacgattctagcgtgactggtgtgagcaggaatatgaagaaccggcggtgggccggcaagcgatcggggatcgcttttggtgcagtagcgcttatccttacggctctggtggttccttatgcttgtgctggaaccacgggagccgttcctttttccggtgataatccatcttccggcactcgtacggtgaccattgccgacatcactgattttcacgggcatatcgaacgtggtgcggacaacgccaccgccttcaccgtggccgacagccataatcccggcaatatgattccggtatcgaccggcgatttggtgggaggctccccgtatgagtcggcggtggagaaggaccaacccacgctggatatggccaaagcgtggggattgacgatttcggcggtaggcaaccatgagttcgaccgcggtgtcgccgatttcaacaatcgcatcgctgatcccagcaacggcatcgactggctgtgcgccaacgcgtctgccgccaataagtcgcctgacggactgctgagccacgtacgtgactctacgattcgaacggtgaacggcaagcggatcggtttcgtgggcgcccttactgatgcgctcggctcggtggccactccgcagatcactcgtgatgccgaccttgacgaacgggcggtggacgtgatcaatcgtgtggcccgtgaactcaagcgctccggaaaggtggatgcggtggtggccttgctgcatgccgatgcttcagccgccgccgatattgggcgagatgttgatgtggtatacaccggtcacagtcacgcgatcaagcacggtacaaccgcgggtggcgcgcctatttacgaggcgggcagcttcgggcggaacatggccgtgcaggatttgatcatcaccggtgccgggcgtcgcgccacggtgcgagtggccgacgttgacctcggcaatggcaccagccatacggcggttgacggcgtgctgggcgtggatgggcttaatgcgcatccggcgcaagccgcttggatgtctgccggtgctgaggagaacgatgaggtatcgcgcgcgcagcatatttaccaggcgtcggcaacatatgcgaaccataccggcagcgcggtgattggcaccttggcctccggcgtgaatttcgacaaacaaggttcggataagcacgggaatacggtcggtgtgctggtggcggacgcgaaccgagagtcaatcatgaagcatgtgtatgccgggaatcgcttgccggtaatcggattttcgaataatggcagtctgcggactccacggcttgatatgaatggcgatggcaaagtcaccgtgcgcgaggtggatagtctcatggccttgcagttcaaggccgcgcatgagacgctcaccgggcgcgatgtgaagagagtgctcgccgagcaatttcgccgtgacgatgggcgactggagcggcgctggctcggcatctcctcgaacgtgacgtatcggtatgccgaatgcggtacggctggtgagagcggcaatgccgatgccgccgctgataccaacgctgacgctgacgagtgtgctgccgacgaacatgcggcggttcgtatcgtgaacctcgccgttgacggccgaccgattgcggacgatgacctggtgattatcgcgtccaattcatatctgcttcagggcggcgacagttaccccgccttccgtgccggaaccaattacggcgagctggatatgccatacagccagccgttgcatgaatatctggccgcacatcaagggctcacggcagttgttgcagtaccggtagggactcaggcgtaagacaccaattgctgggtgactgaggaactatggggtgaagttatgagtatagggcaggagaaaacggcataaatatgacgacgctcccctcgctgaggggagctgtcgccgtaggcgactgaggggagcttgcggtataaccgtaaactcccctcagtcagccttgctgccagctcccctctctgaggggcacctggcgagacccttacttgatggcgttcaaccactgctccttggtggccttctcggcttcgagcttggccttcttcttcgggtcggattcggccgcgatctcggcgtcgagctcggcgagctgggcgttgagctgctcctcgaagctggacttgcgggcgtcggcctccggatcggtctgcttccaagcggcatcctcgatggccttgatctgcttgtcaacggcgtcgagacggttctcgatgcggcgcatatcgtcacgcggcacgtaaccgatctgatcccactcttcctgaatcttggccagctcctggcgggccttcttggcctcggcgtcggtcttcaccggcaccagagcctcggccttgaccagcagagcctccttggcagccagattctccttctcggaggagttgatctgatcgcgatcggcctgacgagcgttgaagaaggtgtcggcggcttcgcggaacttggcccacagctcgtcgtcctcgttacggccagcgcggccggccttcttccaacggtccatcagatcgttgaacttgcgggaagtctcaccccaagcggtggaatccttgagctcattggcctcggcgataatcgcttccttggcttccttggcggccgtgcgctcgttgtcgcgagcctgagcccacttgcggcgagcctggttgaaggtggtacgggcggcggagaagcgcttccacagcgcctcggcctccggcttgtcgatgcgcacggtggtgcgctggtggttctgccactcgtcgaacaggttacggaacttgtcggcggtggagcgccagttggtgttgtcgcccagagaagcggccagtgcttcagccttctcgacaatggcggtgcgctcggcaacggccctggcctgagcggccttgcgtgcctcggcgatttcggtcttcttggcctcgccggcggccttcagctcctcgtactgggccttgagtgcggcaagatcgcccacgacggccggctcggaggtttcttcacccaagagcttcacggattcgtcgatttcacgggccttgatgttcggggaagccagacgggtggccaacagatcgagcttggccttgagatccaggaaacgacgggcgtacagtgccaacgcctcttccttggagacatccgggaactggcccacctcgcgctcggcgtcgccatccttgacgaagacggtgccgttgtcatccacgcggccgaaggcctcggcggccttgacatcagcctcggaataggcggcggtggcggcggccggggcggcagcgcgcggcttggtcgccggagtcttcttggcgaaggcggcgggggagggcgcgtgcggtttcggcatggaagcgggggacggagtcggcgccggcgtggccgcgctggcctcgggtgcgggtgtcgttgcctgctcttcgggcgcagcggtgtttacgggttcggtgacagtttcgtcggccatggccagctccttaaagcgtagaatgcataagcgggagcgtctcccatcccgggcgaaccaggaagttttgacgcaaccctcacctattatattgatttcgtggctaaaggtgcatcaatatcaggattcccggagtggctcccctccgaacgtgttgtggagcagcgtgttatcgatacgcttcgtaaggtttttgagctcaacggcttcatcggcattgagacgcgagcggtggaaaccggcgcttctttgttgaaaaaaggcgagaccagcaaggagatctacctgctgagccgtttgcaggaggtcggtcatgaatccgacactccgattgaagagcggttgggcctgcatttcgatctgaccgtgccgctgagccggtatgtggtcgagcactcgggtgcgttggcgttcccgttcaagcgctggcagattcagaaggtgtggcgtggcgagcgtccgcaggaaggccgcttccgcgagttcgtgcaggccgatatcgacgtgatcggtgccggcgacctgcccgaccactatgaagtggaactgccgctggtcatggtctccgcgctggaagagctgcgcgcgtatggcctccccaaggccaccgtgcacgccaataaccgcaagttgtctgaaggcttctaccgcggccttggcctgacggacgtcgaaggcgtgctgcgcgagatcgacaagctcgacaagatcggtgccgatgaggtggcccgactgctcaccgagacctgcggcgccaccgaagcacaggcacgcgcctgcctcgaattggccgagctcaacgcctccgacggtgccgagcttgccgccaagttcgatgcgctgtgcgaggctcacggcatcgtcaaggattccgaggcctacacgctggctcgtcagggactcgataccctggccatgatcgtcgacgaagccgccgtcatccgccccggttccgtcatcgccgacctgaagatcgcccgcggtctcgactactacaccggttccgtctacgagaccttcctcgacggtgccgcatcactcggctccatctgctccggtggccgttacgacaatctcgcctcccagggcaaccgcaagtacccgggcgtgggcctgtccatcggcctgagccgactggtcagctacatgctgcacaccgccggcgctcacgccaaccgtgtcagcccggccgccgtgctggtcgctgtgtggaatgaagaggaccgcccggccgccaaccgtattgcgaaccaactgcgtgcgcgcggcatcgccaccgacgtggcacccaccgcggccaagctcggcaagcagatcaagtacgcggacaaactcggcattccgtacgtgtggttcccggccaccgctgccgaaggtgcggaaggcgcagagcccgctggcgacgaggtcaagaacatcgtcacgggcgagcaggttgccgccgattgcacgtcgtgggagccggatactgtggttgcccagcaaaccgtcgaaatctgacgtattcgcgcgaaaaatcgaggagaaacaagacaatgagccagacggcttacagaacacatcatgccactgaagtgaccgaggccctggtcggccagaaggtcacccttgccggttgggttgaccgacgccgtgatcacggtggcgtggccttcatcgaccttcgtgattcgaccggtctcgtgcaggtcgtcatttacgacgaggatatggcccgcccgctgcgcagcgaattcgtgattcagattaccggcgaagtgcgcctgcgcccggatggcaacgaaaacacccatctggccaccggcaagatcgaggttgtggccgagaccatcgagatcctcgccaagtccgacgctctgccgttccaggtttccaccgctctcgagaatgagtccgagaacaagctgccgggcgaggacgtgcgtctgaagtaccgttacctcgacctacgccgtccgtccatgcaacacaatctgaagctgcgttccgacatggctaaggccgcccgccacgcgctggaagacatggacttcaccgaggtcgagaccccgaccttcatcaagtccaccccggaaggcgcccgcgacttcgtggtgccggcccgtctggtgcccggttcctggtacgccctgccgcagtccccgcagctcctcaagcagctgctcatggtctccggcgtcgaacgctactaccagctcgcccgctgctaccgtgacgaggacttccgcgccgaccgtcagcccgagttcacccagctcgatatggagatggcctacgtggaccaggaagatgtgatggccatgactgagaaggtcatcgccgccatctggaagtccgccggctatgaggtccagctgccgctgccgcgcatcacctggaaggatgcgatggacaagtacggctccgacaagccggacctgcgcttcggcaacccgctggtggaactgaccgagtacttcaagaacacgccgttccgcgtgttccaggccccgtacgtgggtgccgtggtcttcaagggcggtgccgccacgccgcgtcgtcagttcgacgcttggcaggattgggctcgtcagcgtggcgccaagggccttgcctacgtggtcttcggtgagaacggcgagctcaagggccccgtcgccaagaacctgtccgatgaggaacgtgccggtctgcgcgaggccgtcggcgccgaggagggtgacgccgtcttcttcgccgccggttctcgcgagtccgcccagctgctgctgggtgccgtgcgtgtggagctcgcctcccgcgaaggcctgctggatccgaagaagttcgctttcacttgggtcgtggacttcccgctgttcaagcccaccgacgatccggatgatgacgatgtggctgtcggccactccaagtggacctccatgcatcatccgttcaccatgccgagcaaggattggatcgacaagttcgacaaggatcccgaacacgccatgtccgactcctacgacatcgtctgcaacggcgaggagatgggcggcggttccgttcgtatccatcgtgacgacatccaagcccgtgtgctcgatgtgctgggcatcaccaaggaagaggccgacgagaagttcggcttcctgcttgaggcattcaagtacggcgctccgcctcacgcgggtctggccctcggttgggaccgcaccgtgtccatcctggccggtgcagactccatccgcgacgtcatcgccttcccgaaggccggcggcggccgcgacccgctgaccggtgctccggccccgatttccgacgagcagcgcgccgagactggcgtcgactacgacccggacgccgacgaaaactaatctacggagcgtataccgcctttcctcagcactcgacgtacttcagtgcgccttcggcttcggacggcggtctccgcacgcgtagattaattttcgaggagtaatgctccggtgctattagccgcaaatggcccttggaataattccaagggccatttgctttttgcgggtggggcccaatgtgccaaatacctgccaaggggtgccaaatactccgcccgatggcacctccgccatgcggcaaacctcgcaccatgcggtgtcccccttggcgtttgccgattatccttccatggggcggtaacttcctcatggggcggtaaacaacccatggggcggtgaaaaccccatggggcggtaggtcaaaatggcttaattccgcggtttcacaatttcttcaaaccgccccatgggcaaattaccgcctcatgggggaattgccgctccatgagaagtaatcgcaactccgtatttgatcaatgttgtgaggctttgttgtgttttgcttgtttccgcctcctgtattcccctttgcgcgcattgatggtaaggctgccgtctattaatacccggcatgaaggttgaggacggccaggaagcggtatttgcatcgcggtggcaacctcttgtgcgaaggcacgttgtttggcggtgttccacaggtcatcggcgaacacctcgatgacggtccagcccaattgccgcagacgtcgacgtttttgctggtcccgcacatattgtttgcggaagcgacggtgatgatcgccatcatattcaatagcgactttgtattgtggataagccatgtcaacggtataggtgtatccgttctctgaatcggtaatgccgtattgtgtttgcggtatgggcaggccgaaaagcataagcgccaagcgtgtacgagtttcctgaacggaatccgatggttttacgagcttcagcgccgcctcacaacgcgcacggccaataacgcggtgaaaggccgttagtcgttgagtgaattgttcaatggcatatccataacgtctgatgagcgcttcagccagcaccactaattcggtgaggttgagatattgggcaaactgtatccacgcatccatgggatgcatgcaggttacgccgtttgaaaaagcgatactgctgaactttgcattccatatgcgatagtcgacattgtccaatgaagagcgggtccctttgctcctcaccgtcacataaaaatccttctgcggcaacgtgctgtgcctcggcaactccacgccgcataattccaatgcggtatacagcgagaaacacaacgtgcgtttcgtgcgcactttgcccagcagattccaacaggccgtgttcttggccgtggctttggcgtcaagatctttgcgcagatagttgttgatttcgccattgtgcggcacttcgctgtatccgttcatgcgccgagcgtagcgcattccacggtggcacaggggcaaaaccgaaaaatggggataacttaagcggcgcgaaccggttatccaccggcatatcgtgtgccgcgcccggttatccaccgcgcttcgggagtgtcgtccaccgtataacagcactcatcgtgtgcgaacagctagccacgctcaaaatgcctagcgcatttatacgaatacgacatgggaaacggcgagaccagccccacacaatacaaagtgaccgccagccatgcgcccgactgcggcatacacggcagcaacgccaacgacaccaaggccaaacatggaatcagcagataggacaacacgtgcccgctttgccgtcgcagcaacgtctcagccaccacgcagcaggcaatcagcgcacagcagacgccgagcgatgcgcgactcagcgagaatgtatgccgatgcccaatgccgccttcacgatgtctgatgcggaaatgagacatcgactgagcaactgtgtggacatactgtgaacacgttggaaacgtcggtgtgctatcctcccactcatgtctgaaacgaacaatgaaacagcagtgcgttcgcgcgcgacaagcacaacatcaccgagcaaggccaaattgaccccgctggttcccggcaaagaggacccgaaccgtccgctagtcgaactgacccacgtcgaaaagcacttcggtgctttgcacgttctcaaggacatcaacctgaccgtcgccaagggtgaggtgctggtggtcgtgggcccgtccggctcaggcaagtccacgatgtgccgcaccatcaatcgcctcgagaccatcgattccggcgacatccgcatcgacggcaagcccctgccacaggaaggcaaggagctcgcgaacctcagggccgaagttggcatggtgttccagtcgttcaacctgttcgccaacaaaaccattcttgaaaacgtgacgctggccctcatcaaggtgcgtcacatggacaagaaggaagccgagcaactggccatggacctgctcgcccgcgtgggcgtcgactcccaagccagcaagatgccctcccagctctccggcggccagcagcagcgtgtggccatcgcccgcgcgctcgccatgcgccccaaggtcatgctgttcgacgagcccacttccgcactcgacccggaaatggtcaacgaagtgctcgacgtgatggtcgaactcgcgcatgaaggcatgacgatgatctgcgtgacccacgagatgggtttcgcgcgcaaggccgccgaccgcatcgtcttcatgtcggacggccagattctcgaagagaacacgcccgacgagttcttcgagcatccgcagaccgaccgtgccaaggacttcctctcgaagatcctcacccactgacgaacccactgaaagacgggtacgcaatccaatgacattcaccaatacgttcaaacggaaggcttgccgcgtgatcgccgcgctcgccgccgtggcctgcacaatgtcgctggcagcctgcggcgcggacgaaaccggcaagatccgcatcggcatcaaattcgaccagcctggcctgggcttcaagaagtccggcacctacgtgggcttcgacgtggacgtggccaaatacgtcgccaagaaactcggctattccgaagaccagatcatctggaaggaagccccctccaagcagcgtgaggccatgattcagaacggcgacgtggacatgatcctcgccacctactccatcaccgacgagcgcaagaaggccgtctccttcgctggcccgtacttcgtggccggacaggatctgctcgtgcgcaaggacgacaactccatcaacggccccgaagacctgaacggcaagcgcctatgctccgtcaccggttcgacctcggccgccaccgtcaaggagaagttcgcctccgaagtccagctcatggaacagcccggttacgccgaatgcgccaccgccctgttctccggcattgtggacgcggtaaccaccgacgacatcatcctggccggcctggcctccgcctcgcgcggcaagctcaaggtggttggcaaaccgttcacgcaggaatactacggcgtgggcatcaagaagggcgatacgcagctggccaccaaaatcaacaacgccatcgtggacatgattcaggacggctcgtgggagaacgccatcagcgataacaccaagggcaccaactacacgcccgacgtacgctacaacccgcccatcccggacgaaggagaggaggcctgatgagcggattcctggaactcttcagccagtatgacgtgctcggtgcgtttctggtcaatatcgaactgaccttgtggtccgccctgttctccctgatcctcggcgtgatcctcgtggtgatgcgcatctcgccgatttcctcactcagggccgtggccggtgcgtatgtggaactgttcaagaacctgccgctgaccatcatcatggtgttcatggtgctgggtgcctatgcgcagctgaagctcagcttctccgacaccttcgccacgaacttcttctggctcgcggtcaccggcctgagcctgtacacggcggcgttcgtgtgcgaatcgctgcgttcgggcatcaacaccgtgccgattggccaggccgaggccgcacgagcgctgggcttgggcttcatgcagtccgctactgagattatcctgccgcaggccttccgaggctccgtggcgccgctcggcaacacgctgatcgcactgctcaagaactccaccgtggccgccgccgcatccgtggccaccgaaacatcctcgctgatgagcgagatgatcgaattccgtcccgacgtgatcatccagatcttcctgatcttcgcgctcggctacgtgatcctgatcatccccatcggcatgctcaccacgtacctgtccaacaaactcgccgtaaggaggtgacggatatggccgatacttcgaattccgtgctgttcgacgcgcccggtcccaagggccggcgcaccattcgcatcgtcaactggatcgcgggcattctgttcgcggtggtgctcgtgcttatcctcatgcgcctgcacaacccgccggacggcgagaaccagctcagctgggagctgtggaagcccgccgtcgaacgagaggcgtggaccgacttctacctgcccggactgtggatgaccatcaaggccaccatcgtggccgtggtgggtgccgtggtgttcggcttggtgttcggcgtgggccgactgctgccgaacccgttggtacgtggcgtctccgccgtgatcgtcgagttctgccgtgcggtgccggtgctgctgctcatgatcttcttctggcgatggttcgcgttcgcgggcctgcccagcccgtcctattgggccgtggtgctggccttggtgctgtacaacggttcggtggtcgccgaactggtgcgctccggcgtcggcaatctgccgggcggccagcgtgaggcctcgctcgctttgggcctgaccgaaacgcagtcgctgatggagatcgaggtgccgcaggccgtctacgccatgctgccggccgccgtcacccagctggtcgtggtgttgaaggataccgccctaggctcgatcatcatgtataccgacctgctgcaggaatcgcgccgactcggttcgatgtacttcaacatcctgcagacgctggtcatggccgcggtgatttacttcatcgcctgctggctgttgtcgaggctcgccgaatggctgcccgcgcgcatgcagcagcgtacggccgcacccgccgaacccgagccgctggcgccgatcgccgccggcgacccgtccaatgtcaaccagatcgctgtggccaaggaggtcgaagagctgccgctgggcggtacgccgcgcaaataccatgtgcatcaccgtggcaccaacgcctcgattcgcaactggcggcgcacccgctacgaacagggatatgacgccacccagcccgagtcacaggttgacccggaaaccggcgaattcccggcgttccgcaagcccgaagacaagccagaggcctgacggtcagctcaatcgccgctaagccagcacgaagaatttactgagtgtttgactgggctccggctacgtagccttcacggaggataggttggaacatatgaagatgttccggcacctatcctccgtttttgctattgcgaccattgcgccgctggcgttggcggccacgctagccgcgacgcctgcaatcgcacaggccgaccagctgcccaacccggattgggtggcattgctctccgactacgaaaagaactattggcaggcccccaccgatgccgaacacggtggcaaggtgctcgacgccgatacaatgaaactcgacgaagatttggccgtggcaattaaccacaaagccgccgaaaatctcgataaggatggcctgaacgcccaacgcaagcgtgcactcgtcgactccgatctgcaagccgaggaagccatgccggacgcgctcggtccggtgcttggcaaatatatgagcgaagggctcaaatccgggaaactcaacgccgtcgccgatatcttctcctttaacgtggcctccacctacgcctcaaaacgtgcggccatgcatccgcgcccctatctgaaccgtgcggaaagcagctacggcggcactaacgatctcgccggactgcccgccacgcttgacatcaagcaatcaccctcatggctcgaacacgtgcccggctactcgaacttgcagaaaaacagttcctacccctccggccacactaccggcgcctattcgtggggtatcgcgctggccggcatgattcccgaactcgcgccgcaaatcatggcccgcacttcggaggccggcaacaaccgcatcgtgctcggcgtgcattatccgcttgacatcatgggcgggcgcattggcgcatccgcccagaacgggcagtactggcataacgaattcgcttcgtccatcgtgcccgcgtcccggcagctgcgggactatctggtgtcccgctgcgccgcggacggccacggcactaccctcgccgcctgcatcgccaacaccaaggcctccggttcgggcggctacaccaacgattttctggacccggtggccaccgagccggtcgcggaccaggcctcggccgtgcgcgtctacaccgcacgcctgacctacaccttcccgcaagacaccgcccagtccggcgctgatttcatggcaccgcgcggggcggcggacgtgctgcgactggcctatcccgaactgcacgccgatcagcgcaacgcgattttgaaagccactgccttggattccggataccccctatggcaatcgagcgacggctggcagcgtatcaactgggccaaagccctgtgcgcccgcgtcaccttggataagcacggcgatgtggccaaggtcgagaccgccgaccaagtggcgcttaccggcccgagtgtggtcaatgcccagtacaccgacgcgggcaatcacccggcgtcggatagctcggcgggtgaaaacagtgccattgcggccggaccggatctcgccaccctccatgccgcgcaacgaccggcgttgatcagcgtagctatcggtaccgctgtaatcgcgattgtcggcggaatacggacggttcgacgcaaatccaagaactagcttcagcagtaattcagccaaagttcagtcgcgctgctcaccgctgcggtgacactgagcagcatcgccctgatcggcgtgcccgctgcgcctgcggacgagcagcagaccactgccgaacagaacacggctgccaaaccatccgtaatcatcaacgaggtctatgccggcaatacgaaagctgccggagacccggatagcaagcgttgcgattgggtcgagctcaagaacaccggctccacagacgttgacgtgaaggtctgggcatctacggcagtgacaagaaagccaagaagcactacaccatcggcaccagcgaagtaacgaatacggacaccgtcatcaaagccggcggatatctggtggcatacatcgaccccgacaaggcaaagcctgccaaaacctgcgatgccgctgccgatatgaaagtctcctcgatcaagagcgagagcgacaatctgatagtcacgattctggccacttcgaattgtgatgataagaacgcatccacgaaattcaatgattcggccacccgactcacgttgcaggacagcgacgataatgtcgtggccgatgccgtgttcgatttttcgggtctattccacgtataccgcgcagttgtccagcaagcgtaagggtatggaggctgaaggcaagacctggaactaccgcgatattcttgcgcaattcatc

SEQ ID NO: 895 - DNA, 69134 bp, Unknown
  gut microbiota DNA sequence
cgctgattgcactggtctggtcatggatcgtcctgcagatcacgccgctgctcatcatcaaattcgcgctgaccatcctctggcttatcggtttcgaatgggtgttcgcgcttcaggcacgcttcgagaacaccgtggccggcaccttgaagaacgccttcatcttcggcatctcccacatcgcgatgaccgtggccctggtcatcgtggatgccgtgttcgtggcactgctggcggccagctggttccacatgcccggtggactgttcctgctggtgatccttggttacggcaccatgctgatgctccatatccccgtcgccgagcgtgtcttcaagccatatctcattgactaggcgggttctcacgaatatgcggcgatcttcgaggtctgagcgctctctgtccacgcaagcgcggtaaagataacaaattaataacagtttggggcggctggcggagcggggtgccgattgaggggtattagtgattggcttggaagggggcttttggcatacggggagtgttcgggctgggcggttgccccccgtaagtgcttatatacataaggaatctggcacactgagtctcagtgccgtaatggtatcatcgcaaataatgtttgcgttcacgtagaggcgaacgagacactcgacaagtgggtcgaggcaaaggacaaggagagatgcggtgaagcattggaagaagatggcagcatcgttggttgcaatatcaacgatgatggcagtagttccgacgacgtatgccatggaatcggaagattcccaaccacagacaaccgataccgcgacagtgcagactactaaggctgctgaaccgacgctgctcgccagctgggacttcacgggcaaaaacggcaccacgaacagcgcgattgccgattcgaccggcaagtacaacctgacgctgaaagacaacgccaagatcgaacagtacggtgaccgcagcaacaatgaggcgctctcactgcgcggcggtggccagtatgcccagatcgatgaccagctgttcaaggacgccggcgactccttcactctggagttcgcgtccaagactcgtcacgacgacagcggcaagttcttctcgttcatcgtcggcaaggacggttcgaacgacgccaacaccaccgatcagtccaacgccaacaagtacctgatgttctacaacagcaagaccgccatcaagggcgttatctccaacaacaactggggtaacgaacagggatccaaggtcaccgtttccggcaacgacaacagctgggccgattacaagattgtcgtggacggcaccaaccttgccgtgttccgcaacaatgccctgatcattttcaaggccaacaccggcatcaagatgagcgatctcggtgcgaccaccgcctacatcggcaagtcgttctactccgtcgatgagtactggaatggtgcaatggatgatatcaaggtctacaggggcgctgacctgaccatgccgaccgccgttgcgatttccggtaccggtgtggtgaacaacaagctcaccctgattgagaaggactccaccaagctcaccgccaccgtcactccggacgacgccgtgagcaagaacgtcacctggtcctcctccgatgagtccgtggccaaggtcgccgcagacggtactgtaaccggcgtcaaggctggtactgccaccatcaccgccaccactgagctgggtggtgtgaaggccgaactgcccgtcaccgttgagccgatgaacgcccagaacgccgccgcagccgacctcgatgccgcgattgctgcgctgaaagttccggcggccgagaatctgccgctagtcgccaagggcaccaagaacggctcggcgattacgtggaagtcctcggacgagaagctcattacgtccactaacgagaagtacgaaaacaagaccactggtgccgatgacccgtatcgtggtgctggcatcatcaatcgtccggcctacggcgacggtgattccaagccggttacgctgaccgccaccgcttcctacaacggcggcgagaaggtcaccaagaccatcgaggtcactgtcaaggagaagacccgcatcgcgcctgacaccggctatgcggccgtcacttttgagagcgacagcaacggtggagaaaaggcctgggtggcttccactgagaagaacgatttcttcacgtttaagactcgcaacaatggccaggcggtacttaccaatgatgcagacacgggtggcttgcgtgacatgttcgtgctgcgttcccacgaaggcgacaagtactacctgattgccactgatctcaaggtctcgtcaatgggctggagccagaaccaggttaacggttctcggaaagttgaggtctacgagtccaccgatatgatgaactggacccgtaccaacggcgacggcaacggcggcatcaccatcaacacgccgaacgccggtatgacctgggcgccggaagcttactgggatgatgacctgaacgcttacgtggtgttcttctcttcccgcatgttcactgatgacacccgtaccactccggtcaagaacgacaaaaccggcaatagctcctatgctcaggtgcgttacgccatcacccgcgacttcgtgaacttcaccgagccgcagatgtggcaggacaccggctactcgcgcattgattccaccgtgcgtaagatcggtggctactactaccgattcaccaagaatgagcagggcggtgccgctggcgattacatcaccactggtaagagcatcttccttgagcgttccaaggtgctgactgcaccgaccaccgaggcatctccgggtcaggacccgaacaccggttggcagctgctcgagcaggcgttgctgccgttcgaaggaccagagaccatcaagctcaacaaggatgacgaactcaacacgaaggacgacgacggctacattctgctgtccgacaacttcgcctaccgtgcatttatgaccacgggtgccgagctttccaagaccacgtgggacaacccgatgaccaagcgttacccggacttcaacaacgaaaagaagccggtcaaagccgagccgggcgctcagggctacatcactcagggtgctaacggcggtctgccggacaaggtgcgtcacggtgcgttcgtgaacgtgcctgagtctgtgctcaaggtgacgaagtcctggaccgctgccaacccgacgcacatcgaggctgttgactccaccaccaaggccgtgtacaacgccggcacccgcgagctcaccgccacggtgaccgccgccgataagggcacgctcgccggttcggtgaagttctctgctggcgactggtccaagaccgtgaagctcgacgccgaaggcaaggccactgtgaccctcccggccagcgtctctggcactgttgcggttgcttacgacggctacaccgatggtttggtcaatccatccgatactacggttgacggcattgaacagggcaaggtcgatttggctgagctcaacaagcagatcgccgctgccgaagcgctcaaggaatccgattacacggctgattcctgggctgcgctcgccaaggcactgcaggccgccaaggctgcgctcgcttcctccgaccaggctgtggttgacaaggccgccgctgatctgagcgccgccatcgcagcattgcagaaggcggaaacgcccaccaagccggataccggcgatggtgacaacaagggcgataacgcaggcgacaagaccgacaacaagaccgatgacaccaagtctgacggcaagttgccggccaccggtgccgccgtatatggcgtgagcggtgccatggtgctgctcgccgctgccggcactgcgctgtccatctggcgcaagcgccgcgcataactgagtagctgctcactgcaacgcacagaaaatcgcacagtatatgtgtgattttctgtgcgttttaatgtataacagcacatgcgtcattttttttggctattcgctgtttgtggtgggtgatggtcaagtggtggtgacggctttgaggtcgagtctgccgcaggtcaggtagatcatggtggcgaagtagtccatgttgcggaagcctctcgcccgtcgtttgacgttctggatgacgctgtcggcgccctcgagcacggcgttggtgtacgggtgctcgaagtaggcgacgatctcggcgaagtggcgtcggatcatgcgggcgaagtccttcatgggctcgagcctcgagtgcatcatccacgagcacaggcgatgcaggcgcacccatgcctcggacggggtgcggctgtccgtgtagatgtcctgcaggacctcgcgcatccggcaggcgcggccggtcttcaaccgttgcctcgtcaggttgcgcttggtctccacctgcagttcggtcaggctttcctcgttgcgcagccacaggtacttggtccgtttgagcagcgggttggagcggccttccgtcttcccggccttgtcgacggcctcgttggcgtgcctggccacgtggaacctgtcgacgatccgccgcgcatggggcagatgctcacggatgcccttccggaagcccaggctcatgtcgcaggcgaccagacgcacatattccgggaccccgttgtggtccatgaaatcacgcgagaaccgttcgaccgtggccgggtccttgcccggcgtcacgttgatgacatcgtgctccacgagatcggcgaccacggtgatgcaattgcggcccctgcggctggtctcgtcgatgccgatggcctccacacccatgtagtcctccagcctcctcgcctcgtcgacgtaatgggcgacggaccgccacaaacgggtgtcggtctcgtccaattgctcggcgagcgtgctgacgggcaggtggcgggccatctccacggcccacgcctcgaacaggagcgtgaacccgctgccgggcctggcccacggggcgggcaccggcatcaccccgcacccaaaccacccaccacaaacagcgaaaggccaaaaattagtgacgaaacacgaaacaccgacttgactaaaaacaccgcccgccggggcatgggtcaggctataccgcctgtgctcgtggatgatgcactcgaggctcgaacccgtgaaggaacccgcccgtctggtccgccgccgcttcgccgaggtcgtcgcgtacttcgagcacccgtacgccaacgccgtcctcgagggcgccgacagcgtcgtccggaacgtgaagagacgggcctgcggcttccgtgacatggactacttcgccaccatggtctacctgacctgcggcaagctcgacctcaaagccgtcaccacctccccctcagtgagagttttttgcaaattggcccgtacccgcacctcgtcacagcttgtataatcacgattatactaatcgtgatacaataaatcgtgatgcgatagaaatacgccggcgtatggcataaaggaggcgggcagcatggcattcatcggacgagacgatgacctcaagcaactgcaggaatgtttcactgagcgtagggcacagcttgtgttcgtctacggccgcaggcgcgtgggaaaaacagagacgcttattcaactcgcaaaagacaagggaaccttattcttcgcggcgcagaatgccactaaagatgaacagctggcatcgttctcccgtctcatgttcgaggcgggtgccccgggcaaggattatctgagtcaatatccttcttgggaaagggcgttaaccgagttaacccggctgccagagccgagcgatggcggccgcaggcttgtgatattcgatgagtttccttatctggtcaaatctgatccgtcattgccgtcagtgctacagaatctttgggaccacacgttgcgtcatgcaaatctgatgattgtgatttgcggcagtgccatgagcttcatcgaaaaggagctgttgggagaaaaatcgccgctatatggtcgtgcgaccggcatcctgaagatgctgccgatgccatattgggatgcagcgcaattcttccccaactatagtggcgaggataaggcgctggcctacgcaatactgggcggtatcccgcgttacctagaggaatttgacccagatgagaccatagacgcaaatgtcaagcggcatattctgagacgcattgctccgctatacagcgaggttgaatttttgttgcacgaagaactgcgggaaactgcgaaatataacagcgtgatacgggcgatcgcgctcggcgcaacttcgctgaatgagatcgcgacacacacgatgatggcaaacgcaacagtatcgtcgtatctcgccaatcttatggaactggggattgtggaacgtgagttcccagtcacggcgaagcctaaggagcgggcgaaaggttcgcgtgggctgtatcagctgagcgacaatttcttccgattctggtattcgtttgtctttccgtatcgttcggaattggagcggggcgatgtggaaggcgtatacgagcgtcatatcaagccggtattacatgattttgccggcaaaccgttcgagggtctgtgccgtgaatggatgtggcgtgagagtgctgctggacggttgcccttccgtgcgcgtgcggttggccgttggtgggatcgtcaggatgagatagacgtgatggccgttgacaatgcgtctgatgctgccattgtgggcgagtgcaaattccgcaatgcgccggtggaccgttccgtgctgaatctactgcgagaccgtgctgcgcgaaccggtatcggccagcgaacatacctgctgttttcgctcggcggtttcgatcaatcactggtcgacgatgctgcggcgtctcaatccgacgttcagctcgtcggcatcgatgagctgtttcatgaataaatcccatttgcgaatagctctcactgagtgctcatcagtgagagctattcgcaaatggagccttacttcttcgcctgagtgagctggtaggcggcgaagaggatggccagccagatcacgccggcgatgacggcgatgcggtagctggtggagaagcacatcagcaccacgaccagcgccaggaacgccagcaccacccacggggtcaccttggcaaacggcagtttgaagtgaatcgcgtccagtgcctcctggccgctcagaccggccagctcggaatcctcgggagcgccgcccgcggcgaccaccttacggaacttcatttcggtgagcatgatcatcgtccagttgatgatgccggcaatggtggcaatcgacatcaggtagttgaacgcgaactcaggccacacgaacaccacgaccacggcgatggcggtgatcgcggcggacgtcagcacgccggccactggcacgccgcgcgagttgagcttgcccaagtaagcgggcgcattgccctgcttggccagcgagtacaacatgcgggagttggcgtacaggccggagttgtagacgctcatcacagcggtcaggcacacgaagttcaaaataccggcagccgcgtgaatgcccacggaatcgaagatctgcacgaacgggctggacttgccatcgatggtgttccacggcactacggccatgatcacacccagagcgccgatgtagaacacgaggattcgccaaataatatcattggtggcgcgcggaatcgtggtcttcggatcctcggtttcgccggcggtgatgccgatgagctcggtgccgccgaagctgaacatcaccacaaccagtgccatcagcaggccggtccaggaaccgtcggaattctgccccatcaggccgttcgggaagaagccgttacccacggtgaaccagttcgcgaagcttgcgcgcacgccggatgcggtgggcaggacaaagatgatgacggccaggccgccgacgatcatggcgatcacggccacaatcttgataatggcgaaccagaactcgaactcaccgaatttagagacgcccagcaggttggcggcgcagatgatcaccaagaacacggccgccgacacccatgtcggaatcgccgggaaccagtagttcacaaacgaacccaccactgatagctccaccatcgagacgaggatgtagttgaaccagtagttccagccggaaataaagccggcgcgcttggaccagtagcgggtggcatagtagctgaacgcgcccgccttcggatcctcaacggacatttcagacagtgcacgcacaatcgcgaaaatcgcgaggccgccaaccaagtaggcgagcagaatcgagggtccggccagcgcgatggattcactggaaccatagaacaggccggttccgatggcgccgcccagtgcaatcagctggatatgacggttcttcagtgacttgcgcagcgtggccggcaccggcacgtcgtcggtttcgcgcggcttcttaggcgcatcagcagtactcattgtgcccttctctcacatttcttgggttttggcgcacgcggggcttgccgtgatgcgcaacgttcgttattctatgccgccgtatcgtctcagaaatggtcaatcgtctatttgtgcgctattgcaagcgcgggcgtgggcgcggccggtgagcaggcgaagctatagcgagcgatgcttatgaaaccgcacgcttcactgagttcactgaattcactgtgctcactgcgtggcaggcgtacacatggtgaagatggtgtgggacaccgattcgggagaggccgcgagatcggtggcgagccagtattgcaaaagcccaatgctgccggacacggcgaatcgcatacgcatctgcgcctcggctgggtaacccgccgaagattgcaactgttcgcctacaccgcgctggctgtaaatcaatcccagcagctgctgctggaaaccgatatccgctttcgggctcatcagcacttggagatgattgcgattgtcggcaatgtactggcagatgcgctcaataacatgctcgatgccggcaggatctggctgggcgagtagctgttcgagtgcggtggtgacccaggccatggtttcgtcttcaatgtcgtgcagcagttcctcgatgctcgcataatgcgcgtaaaacgtggaacgattcacatcggcccgctcgcacaacgctttaacggtgatggagccgagcggctgatcgcgcagcaactcgataagcgcgtcctgcatggcacgtctcgtgtaacgggtgcggcggctttccgtcaattctttggacatggccttctccccaagttccgacaacccacaatccaactgttggttgcagaaccgacacagtgttgttttacttgagtatagcaggaagttctggcggggcctatggggctaggtggctgccacgagcgcgttggaggtgtgcgatggcgtatatcgaattcgaccatgtggtcaaggaatatccttctggcagcagtgtgattcgcgcgctcgacgaggccagcttcaccgccgaacaaggcgaattaagcgtgattctggggcagtccggtgccggcaaaaccacggcattgaacattctgggcggcatggataccgccacaaccggccgcgtagtggtcggcggacgcgatattacgggtctgcggaaaaaggaactggtgacctaccggcgcaacgatatcggcttcgtcttccagttctacaatctggtgcctaaccttaccgcgctcgaaaacgtggagctcgcctcgcaaatctgccctgaccatttcgatccaggggaaacgctgcgcaaagtcggactgggggagaggatggacaacttccccgcgcaactgtccggcggcgaacaacagcgtgtatccatcgcccgcgcgattgccaaaaagccgaagctgttgttgtgcgatgagccgaccggtgcgctcgattacgagaccggcaaggaagtgctgcagttgctgcaggatatttgccaaacacaaggcatgaccgtaatgatcatcacgcataattccgcgcttgcaccgatggctcacaaagtgattcgcttccgctccggcaaggtgaccagcgaggaggtcaacgcaacgccgcggcccatcgccgatatcgaatggtaggtgattggcgatgctcactgcaagacactctgtgaaacgccccgtgaaacaagcgaggcgattcgtgaaacaacctgtgaaacattctgtgaaacggcggaacctcgacgatagcggcggtcgaggagcgggcgtttctgcggtatttgccaaagatacgttgcgttgctggctgcgcagctggaagaggttcgtctcgatcgccgtcatcacgctgcttggcgtggccgtgctgaccggcatctacgccggatgccgcgatgcttttctggcggccggtcgtttttacgatcagcagggactgcatgacctgcaggtgctatccacatacggcctgaccgatgatgatgcaacggcactgcgccgaatcgacggtgtgcaaaccgtgcagcccgaacgttctcagacggtgaccacgttggtggacggcaccaagaaaaccgtgaccatgcaggaaatcggtaccgaagggctcgatcagccgtacatacggcagggcaaactgccgaacaaggccggcgaagtggcggttacgcagcaattcctgaacgatagcggactcaagattggcggcaccattactgtgacgccacaagacacctcttcatccgtcatatcggtagcggccacggagactgacgattccaataatgccgatacggtaggtgtcgccgccaatgcctcggcatccgatgcgaagtccgacgccaatacggacgccgacgccgagcaatccccgcagttccccacgaaactcaccatcaccggcgtcgtactcgacccgcgcgacctcaacaatccagacggctattcgggcatgacctccttccggtccacctcatccgaggactatacgttctttgcacccagcgacggcgtgaccggcaatatatacactgcgatatcggttgccgtcactggtgcgtccgattttgacacgttttccgatgcctacgatgaagccatcaaaaccgtggccgaccgtatcgaacatcagatacaggccacacgccagaaagcccgtcgtcaacagatcgtctccagcgcgcagcgcaaactggatgatgccaaagacgaggccaacgagcagctggacgaagcccagaagcagatcgacgacaactgggccgagctggaagccaacaaaacgacattgcaagatagccgtaccgaattggagaacaacaggacaaccattaccgatggcgaacggcagctcgccgatggacgtgcgcagattgcatcggcccgtcaacagatcgcgcaaggtcgccagcagatagccgaagcgcgcacccagctcgaatcgggcaaagcgcagctcacctcggctcgcaaacagctcgatgcggcgcaaacggaactgactgccaatcgcacgaaaatcgaacagggcattacccaaatcgaccaaggcatggcgcaaattgatcagatgctgcccatgattcaacaggccaacaatctactggcgcaacttgacccgaatatcgacctcaactcacccacatggcaggccatcaagcaactgctcgcgcgccttggcattaccgtgcctgaagtgccgtcaatcagcgatctgcggcaacagctgaccgccaagcaaacggaactgcaaacgcagcgagacagtctggcccagcagaaagccgatttgcagcgcacattaaacgaaaccattgcccccgcacaatccaccttggaccagcagaacgcgcaactgaccgccaaggaacaggaagcggctgcaggagaggcacagctcaataccaaatccgcggaactcgaagcgaatgccgcaaccctcgaaacccagtcggcgcaacttgaagcgcaggccgcccaactggccagcggcaagcggcagcttgaagaaggcgagcggcagctgaaagaaggcgaacaacagctcgcggacggcaaggcgaaactggatgatgcgcagtctgcactcgatgcgatgcgaagcgaagcggaaagcgaattcgccaagcagcaacggcgcatcgacgatgtggccaacgcacgttggtatgtgcagacgcgcgcttcgatcgacggattcagctcgctcaaatcagatgtcagttccatcgaatccatcggccgcgcattcccgattgtgttcctgctggtcgccgtgctcatgagcctgaccaccatgacccgcatggtcgaggaagatcgcggacttatcggcacctaccttggactcggctatggcggactcgccgtgtccagccggtatctgctgttcgcgttgctcgcctgcttggtcggcggcggcatcggtctgctggtcggattcctcggcatcccggcattcctgatggtggtgattgagggactgtatatattgcccggtgtgcgacttgaatacgactggctgtacggctcggccggcatcgtgctgttcgtggtcggtgtgggcgtggtcaccgcgctcgcctgccgcgaggagatacggcacacgcccgccgcgctgatgcgcccgaaggcgccgaaggcgggcgctcgcatattgttggagcggattcgcccggtatggagccggctgaacttcctcggcaaagtcactgcgcgcaatatcttccgattcaagtcgcgtttgattatgaccgtgggcggcgtggctggttgcacagcgctgattatctgcggatttgcgattaacgacaccgtcgacacgactggcgtcaagcaatatgagcagatctaccagtatgacttgatggtggtggccaatgacgatgacgccgccgcgatgcgcaagcaggtagcacaagatggccgggccaccgaaacgctggatctgcgcgtggatagcggcgagatgagcaatgcggcgcaggaaagcgaaaccgtgcagctgatgacggtgcccaacaattcgttgaacaaactgaacgacatggtcacgctggaagaggccggtgacgatgggtggttcgagctgcccaatatcttcggcaaagcgggtggcggcactgtagcgctggacgatagtggtgtgattgtggcgaagtccgcagccaattcgttggatattcatgcgggcgacaccgtcacgttgagcaatggcggcagcgggcgggccaaggtgaaggttgcggcggtgacgcgcaacctcatcggctctgatgtgtacatcagtgagcgactgtacgaccagaagtttgcggccgacggtgtgacgtcttcggcttcgggagatggcactgcctcgaccttgacgtggaacgcgatgctcgccaagctgaaaggttccgagaccgaacaggccgaatatgcggatcggttgggcgaggaatcgtcggtgctcaaggccgtgagctgtgcgcatctggccgccacgtttaagttcgatttgatgggtgccgtggtggcgctgattgtggggctcgccggcggcctggcgctggtggtgctgtttacgttggccaatacgaacgtgtccgaacgcatccgcgagatggccacactgaaggtgctgggcttctatgaccgcgaggtgcacaactacgtgaaccgcgagatgatgatattgaccggtatgggtgtggtggttggtctgccgcttggcaggtggataggcggattactgactgctgcgttgaatatgccgtcgctgtatttcgaagtggaagtgcactggtacagctatgcgattgccgtggtggcgacgctggcgttcgcgctgctggtgcagctgttcaccaacccagtgctcgatcgcgtagacccggtcagctcgctcaagtccgtggaatagaggtagaagttcaatttggtgttgatgaattgaactttttggcggaatatttacagtatcatcgcatgtattattgagctgagcggttttcgtgacatatttcggtgatacagtttgaacttgttttgaacgagtatcgcgtctggtgcgtaacaatcgggcggcagagaagagaaatgaaatcagtatggccgatacgaatgtgaatggtggtacacagcaggctacgggcaaactcaagtctgtcgaaagcctggaccagaccaacgagatggagcgtggcctgagcaatcgccacgtacagttcatcgccattggcggcaccatcggcaccggcctgttcctgggctcgggcaagtcaatctcgctaaccggcccctcgatcatcttcgtgtacattctggtcggtgtcatcatgttcttcctgatgcgcgccatcggcgaaatgatgtaccgtgaccccagccagcacaccttcatcaatttcatcacccgttaccttggcaacgggtgggggcatttcgccggctggacgtattgggccgcgctcgtgctgctgggcatgaccgagatcacggccgtctccacgtacttcatcaccttcttcgacacgttcggcatcgacctgacccattggaaatggctgatcgagctgtgtttcctggtgtcgctggtctccatcaacctgattgccgtcaaggtgttcggcgaggtggaattctggttctcgatgatcaagatcacgctgatttgcgcgatgatcgccaccgccgtggtcatgatcgtgatcggctaccattacccagccgtgcagattcacggcgtggaccacgtgagcccggccggccacgccggattcgacaacctgttcgccaacttctcgttcgcgccgaacggttggatggccttcctcatgagcttccagatggtgttcttcgcctacgagatgattgaattcgtgggcgtcaccgtctccgagaccaagaatccgcgcaaggtgctgcccaaggccatcaacgagattatcgtgcgcgtgctcatcttctatgtgggcgcactggtggccatcatgtgcattgtgccgtggacctcgttcaagccgaacaaggacggctccttcgcatccccgttcattatgatgttccagtatgccggtttgaactgggcgtccgccctggtgttcttcgtggtgatcaccgccgcgtcctcgtcgctcaattcgctgttgtattccgccggccgccacctgtaccagctgtccgaggtgtcgccgaacccgatgctgaacaagctcggcaaggtgtccgaccgcaaggtgccggcccgcgccatcctggtgtccgcggcgctgatactgctgtcgccgatcgtcaacgccatccccggtgtgtccggagcgttcgtgctgttctcgtccgccagctccgcggtgttcctgttcatctacatcctgacgctgatggcacaccgcaagtaccgtcgctccgctgatttcattccggacgggttcgtcatgcccgcttggaaggtgctcaatacggtggcaatcgtgttcttcgtgttcatctacctgacgttgttccttgcggacgatacgcgcaattccgcgattgccggcctggtgtggcttgtgggcttcggtggattctctatgctgcgcgaacgctaccgtagccgcgatttgaaggccgcactggaacacaaggagtgattggacgggctgattggctggcggctattagttgggtggctgttggctgttggcggctgactggctagcggccgatagccaatgactgggctgatcgtcagccaatcggctgcctataggtctcattgatacattcggtcatccgattagtgcatttgcgcggacaattagtgcattcgatcatcggattagtacatcagtgtgcaattattagtacaattagccgcctaattagtacattaggacataaaacaatgtcctaatgtactaattagatgctaaaatacgataagtgccatgtcctaatgtatgaattatcgctatgaagggcggaatgcgatgacgcaggatgaacttatgcaagtgctgcaggccggtgaatcatctatggtcgagttcaagcgctgcagcgaattgcctcatacggatacttttgagactgtatgctcattcgccaatcgttctggtggcagcatttatcttggcgttgacgatgacggtcaagtgctcggcgtcgattctaagcgcgttagtgagatagagcgcaacgttgtcaacgtagtgtctaatcgtaagatgttcgaaccggctccaatggtggaaacggaacatatcgagtacgacgaacggattattgttcgtatttgggtagctccgagttcttcggttgtgcggttcaagggcgcagtgtttgatcgcattgctgatgtggatacacacatcgaaagcgatatccagattagtcaaatgtatattcgcaagcagaactactattccgaacggcgaattttccgttacgtgactccgtttgatttgcgtcctgagctgattgcgcgaatgcggcagctggcggtcgctcagcgagctgggcacccttggggaactatgtctgacgaagaactgttccgcagcgccaagctatacgatcgtgattacacgaccggcgaagagggctttaatcttgctgcagtgctgctcttgggcaaggatgaagtcatttcctcggtttgcccagcgtatattactgatgccgtggttcggcgagacaatattgaccgatacgatgaccgacttatggtgcggaccaacttgttcgattcgtacgagcaactccgtgaatttactgagcggaatctgcctgaccgctttgtgttaaagggcgataagcgagtgagcccgcgtacgatgatcgcccgtgaattggtggcaaacagcctcatgcatcgggagtattccagtccggtggtggcgcgtgtcaccattgataatgaatccatccggacggttaatgcttcgcgctcattctttgaaggtcgaatgaagctgggcgagttcacgccaatgccaaagaatccgattatcgctaatgtgtttgtgcagaccggcatagccgagcagctgggtagcggactgcggaatctgataagagcgtcccggcaatatactgagcgagagcctgagttccgcgatggtgacatattcgaggcgacgattcctattgttcctgcgctgaagaccgtggatggttctggttttgctagcgtgagatctgtagttgagaaagatgccgaagagggtgcgaggctcattggcggggaacgtgtggatggtaagaaagcagatgcaaccgcatcgggtgaaattgattcgcgggcagcgatgctgtcggcgatgaatcgacgcttgacagaggttgactatgtgactgtacctgaactcgccaagataacagagctcgataacagaacagtccgcaaattcctaaacggtttagttgcgcaaagaaagctgattgctgaaggcaacacgcgtggtcggcgttatcggaagggatagcgggcgcgatatctcgatgcagtgggattcacttaagggctacggcaaatatgattcgtagcgattgggccagcgcaattcgaatggctcatgactttgtgcgtcgtttgtggtctctgaagttgtttgctgggtgacggttttgtgataaaatcgctcatatcaaaatgtttgcgtaaacattttggctgcgccgaaagaaggagtcgacgtaggttatgtatcaggcaaagaggccggctcagtgaagcaaaggccgatttttccggtataaggcggacagcaggaacactaaggagaccaatgaaggtactgagcaaatcgcttgctgcaatggttgcggcggcaacactagtgggaggaggggcgtttgcggttgccggcactgcgtatgcggctgataacgatgccattaccgtgaccccgaacccatggtatgccaacagtttcgatggctggggcacctcgctggcttggttcgccaacgccaccggcagcctcggcgaggaatcggccatcaccaccaatctcggcgatgacgcttccaaggctaaggctgtggaatacggcaaacagctgcgcgaacagttctaccagtccatcttcggtgatgaaggactggacctgaacatggcccgctacaacgtgggcggcggcaatgcctccgatgttgcctacggctacccattcatgcgccaaggcgctgccgtgcctggcacgtggaaagatgacgccaccggctccggcacgtatggcaatggcgtaaccaccaagcaggccgacaaagacaagctggctgcggcattcgacccgactgacgacaaccagtatgacttctccaagtccgccgcccaagactggtggattgagcgcggtgccaccggcgataaccctgacatcaccgacgtagaggccttcgccaactccgctccgtggttcctgaccaacagcggttacgccactggtggacgcaactccggtagcaataatcttgcaaaccctgcgaaattcgctcagtacatggccaagaacgtcgagcacctcgaaagccttggcgcaaacgttgacacggtcgagccgttcaacgagtccgagaccagttactggggcactccgggcgacatggcttcgaagtacaccgatgagagcgatgacaacaccaagctcattaacaactactgggataagtactactccgacaaagataagtccgtcaccccatactccaacgcgctgaagaagccgcaggagggtatgcatgtcagcaacgcccagcagcagcagacgattaccgcactcgctgaggcgctcaaggacaatgatgacaccatcatcgcagccaccgatgccacgaactccgccgacttcgtcaagtcgtacaaccagtacccgcaggcgatcaaggaccttatcggccagtacaacgttcacgcctactccgacagcaaccagatgcagtcgcgcgatatcgctcaggcagacggcaagaagctgtcgatgagcgaggtggacggctcctggcagtctggctcctacaacccgtacggtttcgacaacgcgctgggcatgatgagcaagatcagctccaacgtcacccgcctgcagtccaaggacttcaccttctggcaggtggtcgaggacctctacaacatgcagatgggctcgaatgtgaatccggccggtgagaacaccaactggggcaccgtgctcatcgacttcgactgcaccgtggctggcatggacggcaagctctactccgagcgccgcgtgaacaacaacggcggtaccaccgatggacttgaaccgtgcacggttattgcaaacgccaagtacaacggcgtcaaggccatcacccacttcatccacgcgggcgacaaggtcatcgccaacaacgatgaggacaacaacatgactgccacctccgacgatggcaagacacagaccgtcatccaccgcaactccggcacctctgaccagaccttcgtcatcgacctgtcgaagtacggcgagattgccgacaacgcttacggtgagctctacctgaccaccgaaacctctgccgaagacaagaacgcgggtgtcgattccgccactccggaagtcttcgccaagaccagcaacgtcaagcaagctgaaggctctgtgatgattgacaaggctgccaagaccgctacggtcactgtgcccgcccgttctatcgcctccatccagctcactggcgtgaccggctacgctaaggatgctgccgtcgagaccggcgacacttaccagctcgttggtaagcagtccggcaaggccgtggctgataccacttctggtgattccgcgctgtccctggccaacgtcgcttccgatgccgagaatgccaagaagcagacttggacctttacccagatcgagcagtccgccgactccgagcgccctgatctcaaggcttatgtgattactaacgccgaaggcaaggtgctggtgtccaaggatggcacgaacgcgctttccaacgaaacggttgaggccgctaagtccgacccggctgccaagtggattctcaacacttccgatggttcgacctaccagctgctcaatgccgcgactaagacgaacctcgatgtggataactctggtaccacagtcggcacgaaggttggcttgtggcagtcaccgagcggcacttcgccgtccgccaaccagacatggactctacgcaatgtaacgccgaccagccagaagaccgtgaacgtgcagaccgccgttaacgagaaggccgcgctgccgaccgaagtcacgctctactacacctggggcgaaggcaaggccacggttgccaactgggatacttccaaggtcgatgtggccaaggaaggcacctacgaagccaccgctaccgccaccgatgtgtacggcaacgagttcaatgtcgccgctacggtctacgttggcgcgctcaccgtttccgatccggtatcggctacagtgctggccggcaccagtgcgagcgaggcgaaggccgcgcttgaggctgcgccggtgtatctgcacgtcaaggcatcgcctgcattcgagggcgatgcggctaaggttacgtggaacttcgatgggcttgataccaagctcgccgatgccaaggctggcgacaacattgccgtgaccggtacttaccagctggacgacgcgaccacgattgcgctgaagggcgcgatctatgtcaccgccgccacgcctgagaatgtggccgacactgcttccagcctgaccgtgaccaaccagcagacggaatacagcaagggcgatcagtggaagaagctcaccgatggtgacacgtcagctgaagcctgggtgacgtggaactctgctggtgactattccgccagcccgaccgccacgattgacttcggctctgagtgtgagcttagcagagtgaccattacgtatggtgacaaggctccggcttccgccaaggccgagtacaccactgatggcgagacgtggatgcaattcggtagcgatgttaagcctgccgcaggccagacggtgacgttcaaggccgataagggcacagtgaatgccacgaaggtgcgcattgtgaacaccgtgaacaacgactacatgaacgccaccgaaattcaggcattcgtgacgccggttcagggtgctgcgaagaacatcgccgcggcctctggcacgaacttctcggtgaacttccaggagggtgcctccgcttccaaggccatcgatggtgacactacgtcaaagggttggtccacttgggcttccaccgcctcgacggtggacccggtcgccacgttcaccttcgacgaagctcagaccatcaccgaagtgaagaccttcttctactacgatggtcgtgcgtcttggccgaagagccagacgctggaataccaggatgaggctggcgaatggcatgaagtcggtaccaaggatggctggaagacacaggccggcgatgccggctctggctccgacggcatcaccgccgccgacaccccgaccgttgacttcgtgctcgacaccccggtaaaggccaaggccatccgcctgaccaacacgttgcaggacaccaaggtgtacatcaacgtggccgaaattcaggtgttcgcacaagacaacaaggtgattaccccgcagccggcatccgatgccacgctgggcgacctgcgtcttgacggcgagaccatcaagggcttcgctgctgataagaccgactacacagttgatcttccggtcgacgccgaggcaaacccggtgctgcaggccttcgccaccgacaatgccgccgccgtcaaggtgactggcgacgcggttgagaacggcaagcttggcggcaaggccgccattacggtgacctcagccgacgagtctgagacgaagacctacacggtgaccttcaacgccttcactttggcttcgctcaaggtgatcggacccacgaagaccgagtacgccatcggcgacaagctcgataccgccggtctgaaggtgactgccgtctaccagagtggcgacaagaccaaggaagtgccggtcgctcttgacgacccgcagcttgcgattggctcgttcgactccaccaccgcaggcaagaaggcgattaccgtctcctaccgtggtgtgaccgcgaccttcaacgtcacggtcaaggccaacgcagtcgcccctggccctgaagaacagaagcccggcaacaccaacaagcccggtgccaccggcaacggcaacaagaacacggtggccaacaccggttccaatgttgccgccatcgctggcgctgtcgctctgctggccgctgccgcgggtgcattgttcatgctgcgcaagcgtgcatagcaccctcgcacagtaatggtggaaggaacaagccggcaatattgactattgccggccggttcctccgctctttgagcataattggtccgacaagttgaatactgagttttcagtatcggtatattgatttgtcggcccttttctgacttcgcggatagcgacataactgtttgttcaaaaaaccgttatcatcaatcaaggaaccaaatcaatgaagataaacaataagggcaagggcgctcttatcgcggcaattaccgccgcggcaacgctattgtcatgcgggctggccgctgcaagtgccagtgcggcaggtgtggattacctgcctaccatcggccaagtgccgacatacaccaagttccagcccacagccgatccgggcaagaacgctagcgattacttccagccatattggtatgccaagaacgccaatgataatggcggcacacacatccaagcgcacggtggccaagtggtcaaggttggcgacgcctactactggtatggcgaagaccgttctaacggttacgacaacagccccggtgttcatgcttatatgtcgacagatctatacaactggaccgatcttggtgtggcgctgcgtgcggtgaccagcaaatctcagttgacggataagagcaatgccgattacgcctacttcgacaaggcctacaacctgaccaagtccgacggcagtgtggacgctgccaaggccgacgcaatcttcccgtacctcaacaccaaccccgatcaggatggtgatggcgcggttgattccgtacagggcattttcgagcgtccgaagatcatctacaacaagaagaacaagcaatacgtgctgtggtggcattccgatggaagcaccacgccgggcggttccaactatgcacgtgcacttgcgggcgtggctgtttccgacaatccggcgggcccgttcactatggtgggtgcctatcgtttgcctaaccagaacaattggaaagaagccgcaggtaaccccagctggggtgagaacggtgacagccgcgatatgactgtgttcgtggatccgaaggacgacagtgcctatgtactgtattcttccgaagccaatgccacgctgtatatcgccaagcttaacgatgattacaccaatgtagtcaagaccacgaatgtggaccagtccgagggacaaaagcagtactctgctgacgggcagtacccatacattcttgcagacggtactacggatgccccggtgcgtggcgaagatttccaaatcgtcaaacaaaatggttcgctggaagctcctgccgtattccaatatgacgggcgttacaacatcatcgcatctggtgcaaccggctgggacccgaacaagcagacctactacaccgccgactccatgctgggaagctggacccgtggcgtggaaaaggacgatgccaacgagaacacgtggtacaacaacatgccggaaggcgcggatggtctgttgtctgtgggcgatacccgcggcaccacattcggttcgcagtcggctagtgtgctcgcagtagaccaggagaaaggtcacttcatctaccttggtgaccgttgggattccggtaaagccgattccacctatgtttggctgccgctgaccatcggtgagaacggcaccatcgaaatgcataatcctgctcaagaaggcgagcccgacggctgggatctgaactattgggacaaccatggtagcgccaagggcaagctggtcaactggactgtggaaaccggcgatgatctcccgaagaccgtgaacacgggcggaaccgttactctgccggacaccgtcaacgtcaaggaaggcgacgataccattgctaccaaggtgacatggaatgtggaaggcggtacggcagtcagcaagtcgaccaaggctgccggcagcacctacgcattcaatgtgccgggaacctacaccattacaggcactcttgccgagagcagcaacttcaacccgggccgcacattccgcagaaccatcgacgtttcctgctccaacccgatttccggaagttggaaggaagcccattggaagggcggcagcgcgtgccaggtcgccgcatccggcggtacctatgacttcaccgttacggacaacgccaatcgtggtgtctggacggatcgcaacgagggcagcgcggtgtaccagcctgatgctctggacgtgaacgaaacgttggaaaccacggtcaagccgctcgacttgggcggtaatggcgatccgcgtgccggcctggtggttcgtaacggtcttgctgacgctaacggcggcaagggatatgccacgttacttgccagcccaagcggcatttacatgcagtacgattccaatgccgatggctacatcgataaggaaacatcgcatgttggtgccggcttcggcgaccaagtgcaactcaagctggagcgcgccgcaaccgataccctgaaaggctactggcgtgcttccgcgaacgatgaatggcaggatgtcgctacggtaacgctgaccggtgcggacgcaaccgggctcgatgccggtgtcttcgccacgtcgaacagcaatgccggcgcattcaccgtggccttcaacggcactgcgttcggttcgcagactgctgctgtggagtccatcgcggctaaggaccctgaagccactatcgccaaggggcagatgctcgcgcttcgggacgtgacggttaccgccacgctcaccaatggcaaaacgcgtgtgctggagccaagcgaatacacgctggaaggcttcgacaccaccaaattgggcgagcaaaccgtgacggtgcgtcttgtcgctgattcttcagtaaccgccacgttcaccgtgactgtggaaagcaaccttgcccggttgttctgctcgtccgctgcggcctcgaagtatgagccggccagtagctgggcctccgcttctacggccgacctgacttgcgacaacaacctgagcaccaactggtcgaactggggcaccggcgacacctcgccgtggctcagctacaccttcgataaggcatatcagctgggcaagctcagcgttgcggtggataaggccaagggcgaggccgctccgaagagcttcactgtatcgtacctagctgaagacagcgccacgtggactgatgccacgctgccggcagtcactgtgaatggtgctgctggagccgtgacggaagccgatgtgagcgctctgcccgccaccaagggcattcgcctcaacttcacctacgccgatggcaatgactatgccaagatcgctgaagtacgcatcgccgaaggtgaagcgacaccagagccgcagccgtctagtaacgccaatcttgctgatctgactgtggatggcaagacggttgacggattctccgcggataccactaaatatgccggtgcgctggctggagatgctgcttcctacccgacggtggaggcgactgctgctgacgcaaaggctacggtgcaagtggagcaggcttcggccgagaacaacggcgtggccacggtgactgtaactgctgaggatggcacggcgaaaacctacacagtgacattcggcgaactgcctcagttggctgagcttgctgtggaagtgaccaaggattcctatcaggtaggcgataagttcaacgctgccgatgtgaaggtatccgccatttacaaagtcggcgatactgaaacgctgcgcaagctgattgatccaactgatggtgatctgaagttcactggctttgattctgccaccgcaggcacgaggaccatcaccgtctcttatcgtggcgtgaacgcgacgttcgaagtcacggtcacggccacggaggtcactcccggccctggagagcagaagcccggcgataccaacaatcctggcaacactgctaagcccggtagcactgccacgaataagccggctgctaatggcgctgcgcccctttcgaatacgggtgctgccgtggctgccattgcggtcgtggttgtggtgctggcagctgcggctggtgccttgctcgtcatccgcaaacgccgcgcataaccatggcaactgctgagtagcgtggattgcgttgctattgagcaatctgcgattcacgccactcagcgagtgcacccgagtgcgcccgagcttgcgcaatgcaggcgcaatacagtgcaaacagtacaaagcaacaataatggccggtctgagccagctgctccatgcgagggcagttggctcagaccggccattgtgtctgcaagtacatgcaattagagcatgaacatgtggaagccgttgagcgttactggttgttttgctttgttgttgcgctcagcagtgcgacggacgtccgcccgcagtgtagtgcagcgctccgtgaaccagcgccgatgtgaaatgcatgttgcacatgcccgcttcttctgcttcgtgcgtgcagccggcgatgctgcataggttcataccccgaatcatggtcataccccctctttgggatggcatccgtgccgccatctgccttcagagcatagcggacaattgttgctttgcctaggcggtacaacgctttctgtggcctgtatcacatccttgccggcgttctgcggcgtggttgggcgtgtacatgtgctcttgtgcggttttgttgtgtgtgatttgggtatacggatagagtttcttctctgcagtggcaagggcctctcggccggcgagccggctgatttctcccatgcgttgctcaatgatttccgttttgcgagtctgaacggcaaaatagctctggagaagtgccacttcttctttctttggatcaccgttttgagcaatgagatagcaggcgtatcgggagtgctgagttcgctggttttgcgtgtgatttcgtcgcggttcatgggtgtgtccttatgtttttcatgaccattttcgtgactccacgaaaatggtcaaagccaataattgcaatggttttgaggtatgggcgcgctccgcccaactggtctgtcttcgtccgccttttcgaccggatacctcatggagcacaatgccaacgtcgctaccgttggcccagcaaatattcttagacgacgccccgaagtgaatatctatgcggctttcagaatatcaaagagcgtggagtgtgtgcattatgcgttccaaaaatagtttctagtaatgaattgtttacggtgtgagatattcttggggtgtttgcggcgctctgccgtgtggcgaatgggaatggatggtgctcttatgggatttgagcaggaagcagttagtgaactgtatgccagcgtgtggggcaatcgttcgacaatgcagagggaattcactcgtggagcccatggtgagcagttcgtgctccgggagctgtccatgaaggggacgcaaacgccatcgcaattggcatcggcgctgcaggccagttccggccgcatctccactgtgctgtcgtctctggagaaaaaaggctgggtcacgcgtgacattgattccaaggatcggcgcattattcgcgtgaatctcactgattccgggcgcgagcagtctcatcggatgatagaggaaatgcgttccgcaatttgctggattttctcgcaaatgggggagcggcgcacgcgcgaattcgttgacctggtgtctgagttcaccacatatatgtcgatttgccatccgggacagcctcggccgactgctgaacaggtgcgtgaggcattcgtggagcggggcaagcgcgtggctgaacacatggcagctaagcgcgcggagaactaatcggcaaggctaattgaggacgctcacagcgaacatgcagaagtgcgcgtaatatctcacagtgtaagtaatcaaacaatagaaactattaagacatcgtgaaccgataatcgccgataacccagccaacttaagaaccaatcgtcaataaccaataaccaacccaaccaacacaaggggaaaccaatgcttcgcatcatgaaatacctctccaaagcggagatcggtcagatgctcatcgctctggtgaccatcgtcgggcaggtctacttcgacctgaaactgcccgactatatgtcagacatcaccacgctggtcgaaacgccgggcagccacatgaaggacatttggattgccggcggcaagatgctgctcatctcgctcggatccgcggcgtgtgccatcatcaccggctacatcgctgcgcgcgtggcggcctcgttcacccagcgtctgcgctcgctcgaattccgcaaggtcgagtccttcggcccggccgaaatgagcaagttctccaccgccagcctcatcacccgctccaccaacgacgtcacgcaggtgcagatgttcatcaccatgggtctgcagctcatcgtcaaatcgccgattatggcagtatgggccgtgtgcaagatcgccggcgaaggcttcgaatggacgctcgccaccggaatcgccgtagtgattctgctggcggccatcgtcatcatgatggccatggtcatgccgaaattcaaggccatgcaggccctgaccgacaacatcaacctcgtggcccgcgagaacctcaccggcctgcgtgtggtgcgcgcctacaacgccgaggactaccaggaagccaaattcaccaaggccaacaaggacctcaccgacacccagctgttcaccaaccgcgtcatggcgttcatgatgccgctgatgaacaccatcatgaacggtctgatgcttgccgtctactggatcggtacctacctgatcgatgccgccgggctcaaggacaagctcaccgtgttctccaacatggtcgtgttctccaactactccgtgcaggtcatcatgagcttcctgctcatgagcatggtgttcgtgctctggccgcgcgccgacgtgtccgcgcagcgcatcatggaggtgctcgacactgagccaatcgtcgagaacggcaccaaaaccgccgccgacgtggccaaaaccggccagaggggcaccgtggaattccgcaacgtcagcttcacctacccggattcgcgcgaggcgatgctggaaggcatcaacttcaccgccgagcagggccagacggtggcgttcatcggctccaccggctccggcaagtcgtctcttatcaatctcgtgccgcgcttctatgacaccagccaaggccaggtgttggtcgacggcgtggacgtgcgcgactacgacctgaaggccctgcgcgacaagatcggctacgtgccgcagcagtccgtgctgttcaagggcaccgtggcctccaacgtgagctacggcgatcagccgggcgacccggcggaggtcgagatggccgatacctccaccccggccgggcgcaagcgcgaggccgcgttgatcgccgctggcgaggccgcggaaggtgccgatataccggccgagcagctgaatcgcgtcagggccgccgccgacgtggcgcaggccagcgagttcgtggcgcgcatggacggcgggtattccgccgcgatcgcccaaggcggatcgaacgtgtccggcggccagaagcagcgcctgtcgattgcgcgcgcggtgtaccgtcacccggaaatcctgattttcgacgactcgttctccgcgctcgacttcaagaccgaccgcgaagtgcgcgacgcgctcgcccgcgaggccaaggattccaccaagctcatcgtggcccagcgcatcggcaccatcatgaacgccgaccgcatcgtcgtgctcgacgacggcaaggtcgtgggtcagggcacgcacaaggaactgctcgacaactgcgacgtataccgccagatcgccgaatcccagctcagccagtcggagcttacggcgtaggggggggcggcagcggtagctccccatgtcaggggctgagccgtaaagggaacagcccagtgggctgttcccaggcgaagacgagctgataagcgagcgaataaaacagcacagctgactgaggggtagtcgcgtacggcttctctccctccggcgcttcgcgccacctccttcatcagagggaggtcaatacggacttttaaggagtaaaacaaatgccaagaggaccaatgggcggcaggcgtgccgtcgaagagccccatgatttcggcaaagtcatgggcaagctcgtgaactattgccgcaactatcttcccgtcatcatcatcgcgctcatcctgggcgcggccggcaccgtctgccagatcgtcggcccggacaagctcaaggacatgaccaacgagatcgtcaaaggtctgcccgccatcgttaacggcagaccggtgatgaactcggtagatttcggcacggtgggccacatcgcctggactttggtggccctgtacgtgggctacgccgtgctcggctacgtgcaaagctggatgatggccaacgtcacccagcgcaccgcccagcgactgcgcgaatcgatctcggtcaaaatcaacaaactgccgctcaaatacttcgacaaggtcagctacggcgacgtgctgtcccgcatcaccaacgatgtggacgccatcggccagacgctggggcagtcgctcggctcgctgattacctcggtgacgctgttcgtgggcgcgctggtgatgatgttctacaacaacgtgatcatgaccctgtgcgccatcggtgccagcctcatcggcctgatcatcatgatggccatcatgaagtcctcccagaagtacttcgcccggcagcagatggcgctaggtgacgtcaacggccacgtggaggagatgtacgccggccacctcatcgtcaaggcatacaacggcgaggccgattcgatccgccgcttcgagaagtacaactcggacctctacgagtccggctggaagtcgcagttcctctccggcctgatgatgccgctcatgaatttcgtgggcaacttcggctacgtggtggtgtgcgtggtgggcgcggcgctcgcgctcgacgggcagatcgagttcggcgtgattgtggcgttcatgatgtacatccgcctgttcactcagccgctttcgcagtttgcgcaggccttccagaacctgcagcgctgcgcggccgccgccgagcgcgtgttcggcttccttgaagagccggagatggaagacgaatccggcaagcaggccctactcggcaagaactacatgggcggccacgaagtgaagggcgacgtggaattcagccacgtacagttcggctacgaaccgggcaagccgatcatccacgacttctccgcctccgtcaaggccgggcagaaggtcgccatcgtcggcccgaccggtgccggcaagaccaccatggtcaacctgctgatgcgcttctatgagatttccggcggctcgatcgcgattgacggcgtggacaccaagtccgtgccgcgctggaacgtgcacgaccagttctccatggtgctgcaggatacgtgggtgttccgcggcactgtgcgcgagaacatcgcctactccaagcccggcgtgaccgacaagcagatcgaggatgcgtgcaaggccgtgggcctcgaccacttcatccgctcgctgccggacggctatgacaccgtgctcgacgacaagtcgtcgctctcccagggccagaagcagctgctcaccatcgcccgtgcgatggtgcaggacgcgccgattctgattctcgacgaggccacctcatcggtcgatacccgcaccgaagagctgatccagaaggccatggacgcgctgaccgtggggcgtacgagctttgtgatcgcgcaccgcctctccacgattcgcgacgccgacatgattctcgtcatgaaccacggcgacgtgatcgagcgcggcacgcacgacgagctgctggcggcgggcggcttctacgccgacctgtacaacagccagttcgcactcgctgactgacggattgtttcctgcgttagcggattagcggattagctatactcggctcccctctccgaggggagccgtcagcgtagctgactgaggggagcaacccatcggtccacccgagggatgtgatactgatgatttcgtacattagtgtgtgaaaaagccgccgggaaaattgggggattgggcggcggtgcggttggcgttgagaatggcgcattcgaaggggaagtgagcgcgcagctgggtggccggggtggtgaacagggcggtggcgaggccgtcggccagtgtgacagggacgtgtgccgcaacggtgttcgacgaatcgtcggtatcgcggtttgccgttgtcgaggcattgctgccatgcgtcgatgtcttcgtggttatggcgctcgatggcggcgtgacggccacccatgtggcggctacatcgtcaaccggtagtccgtcgatggcgttgagcagatggtgaagttggtgacctgcggcgtcagaccagtggcggcggctgggggagctcgcgcagaatgcgccgtggctgatttcgaccgtacctacggcgttggccggatcggcaggatcttcaagggcgatggtgattggttcgtccgtgtgcactagcaaatcacccccggcgtcgatgacgtattgaatgggttgagggtgacccgcgccatcacccaacatccccgcaagcaaatccaccaaataccccttaccgcacgcgccgaaatcgagcgcgaccggtccgcgcgtcaccagtgttgtgccatgccgctcaacgtcggctgaccaaatggctcgtccgtggatcgcgcctgcatgttcagcggcatctggcgcaggcgtaaacgaatacgactcgtcatagccaagccgaatcaaatcctcgcccacgcacgggtcggtcgccccatcggttgccgcaaacaggcggtcgtacaggccaaacagacccgatgcccagtcgggaaaatcgaacgtgccgccatgtgcggccgtgcgcatccggccgacgatggaatcatcgcggaatcgagataatacaacctcatattcatggatgaacgagccaatacgatcgcgtatctcatcgtccaatacgctctcggtgtgcaccagtaatccggtccccaacgcatcaggaaaagcgtatacgtatggcagttgctcggtcagacttgtcatgcccactatcgtagagcgcatggtgtgccggtgtatactggattttgacactgtgtcaatgttgattcggaggttgtgagaatgggcaatgcgactacagcaagtgtaacgggtgtgcaagttgcaccggcgaagtcagccatcagagatctccccatcgccaaagtgtgggcgtttgcggtcggccagttcgggtgggcgctgctttccggcatcatctccaactggctcgtgtatttctaccaacctgaccaggagaccatctcccaaggtcagaccgtattcgtgccgcagggcctggtcgttctcggcatcgtgaccgtggtgggcggcatcaccgccttcgcccgattcttcgacgcgttcgtggacccggccgtggcgtctctctccgaccgttgcgacgccaaatccggccgccgtatgccgttcctgaaattcgccgccctgccgctcgcggtggtcaccgtgctcgtgttctggagcccgatcaacggcaccagctgggtgaacgcggcgttcctgttcgtcaccgtgatcggctactacatcgccctcacgttctactgcacgccgtacaacgcgctcatcgccgaactcggccatgactccaagcagcaactcaccatctccaccgccatctccttcacttgggtggccggcacggccatcgcgtacgtggcgccggtgatttggggcgcgttcgtgccgatgatgggccgcatcaccgccatccgcgtgaccttcaccatcatggccgccgtggcgttcgtgtgcatgctggtgccgccgctggccatccgcgagaaggactacgtcaactcccatcccacctccgaatcgaccatcgaatccctgaagcagacgttcggcgacggcgaattccgcaagttcgtatgctccgacgtggtctactgggtggccatcaccaccttccagaccggtctgccgttcttcgtgaccagcctgctcaagctgccggaaaccaccacgaccatctacttcgtgctcatgaccggcgtctctgtgctgttctatctgccggtcaatattctggccaataaggtcggcaagaagaggctgctgctggttgccttcgtgatcttcacctgtgcgttcgcatttgccggcgcccttggttcggccgtgctcggcttcattccggcgatggcccagggtttggtgctctcggtggtcggcgcgattccgatggccgcgttcggcatcctgccgcaggccatcgtggcgaatatcgccgacgccagttccaagaccaccggccaggaccgtcagggcatgttctacgcggcccgcacctttgcgatgaagatgggccagtccgtggccatgctgctgttcaccggcgtctccaccatcggcatggcgtccggcgcgggctaccgcatcgccgccgtgtgcgcggccgtgctgtgcggtctgggcggcatcgtgttcgcgttctacaacgaaaagaaggtgctgggcgtgctggagacgtgatgacgttgccgggtgccgccgcggtatccatgcggagcggtgtgggtgacttgccccgtctgcgacaccgaaacgttaccgtgtcgacacgcgtgcgacacttcggcgtcaaattgcgtttgaccgtactccgtactatattgttgcgagttgctttgcggagcaaagtaacatccaaggggctgtagctcagttggtagagcgcttcgttcgcatcgaagaggtcgcggtttcgactaccgtcagctccacgagaccctctgcattcattccaccgcagagggtcttttcatttgttttcgttgaaattctgccatctcgcgtttcaaggggctgatttggggtttgccggaggtctacttgcgtttcgaggggctgatggtcaagtagatacgccgccaaaatggcggaatagcgttgcgtcaaagccgtttgtatcggtgcttcaccggatgaggagccccttgaaacggaagtagacctccggaacatgtgaaatcagcccctgcaaagggagaatgcctcgatttcgccatggattgtcgtggattgctctgtggcatgggcaatactgggagtatgacaagcgcagatgagttgaatgagcagtatgacgctgacggtagcgtgacgcaagtgcctgaacgcaatgatgaagttcatgccggcgaatccgccgtcgcccaatcccgcgaatcggccgtgaccatccccgccggcaccgtggtgctcgccgccaccccgatcggcaatgtcggcgacgcttcagcccgtctggtggccctcttggaacgggccgatatcgtggccgccgaagacacgcgccgcctctacgatctcgcccgtcgcctcggcgtctatgtgaacggtcgcgtcatcgcctatcacgaccacaacgagcgcgacaaggccgacggcctgctcgaccaggtcgaaaccggcgccaccgtgctcgtcgtatccgacgccggcatgcccaccatcaacgaccccggcttggccatcgtgcgccgtgccattgaacgcggtctgcccgtcacctgcgcgcccggcccctccgctgtgctcgacgcgctcgccctctccggcctgcccaccgaccgcttctgctacgaaggcttcctaccgcgaaagcattccgagcgcgtgcagtatctgcgcacgctgttgcccgaacgccgcaccatcgtgttctacgagacgcctcatcgcattgccgattcgatggacgatctgctggacgcgttcggcccgaatcgcccgatggccctgtgccgcgaactcaccaaggattatgagcagattcgtcgcggcccgattgacgagattcgccaaagtgtgattgatgatccgccccgtggcgagatggtgctggtcatcggcggcgcgtccaacgaggaggccgaagcggccgcgcccagcacgttgagcgtggatgacatggccgtgctctccatcgaccgtgctttggaggacggcctgcgtatcaaggacgccatcgcgcaagtggtgcaggagcatccactggctgacggatcgttggccaatcgcaagcaggtgtatgcggctgtgctgaaaatcaagggatagcgcagcagccggcgattatctccccgttacgcttccatcgactcgaacaatatttccaacgcctgccggaccccgggcccaccacgctgcgagaccaattccagcaaaggcgcgtcggctttgggattggcaaccagccatttacgcagttcgggcacgtgatatgcgatgtgccagagcacggcaacatccgtatcgggcgaacatgccaccgcgggcgtaagtctgatgggcggttcaggcggcgcggtcatatccgagattgcgcgcgatgcggattcggatgagtgtgccgccgccgcgtggcgaggcaaccgttgcgcctgccgcaaatgccgtaaacggtgagcggcatggcggcctctgcgatggcctctgacaatgaaccccctcgtcatgcgcattgctccaaagccggttcgtccatctcctgctgcaccgattcaaaaaacatgcgtgcgcgtccggcgtacttgtgatgccgatgctccttgacgatttgcagacagtcgtttggccgaaactggtacgcggacatcagctggcacaccagtgcgttgacggtggaaggatcggggatgtcttcaggactcatcaccaggtcgcaagccgtacgggctggcgtggtgacaggcagcccgccgagcttgatgatttgctccggcaacgtcaatcttttgaatacgcggatacggcggctgacggatgccgagcggaagtgcgatgtggaaatcacgtctatggtactcggaaagtcggggcctcccagccatacccaagcggcggtcatcgaacacaccacagtgccaaacggggcgacctccgcgacgattttcgcgcgaccatacagtgtgcccgaatgctcgatccagtagccggcggaatcgtcgagcttatgtaacgtgccgaaggcggccagacggttaaggctgagcggtcccggcagatccttggtaaacagtatcggcggcaccgcaggttgcgcggttgccggcgaggcgactgttgtgatgtccgtcatcggacctgctgtgatatccatgaccgaacaatatgcagaaatgcggcttgcgcgccaccggataagcgaaaacggtggataagtgcataactttactaggtgcgcaaatgatgtggataactcggtggatattggcaggcggaagtgtgtgcggatgtgcgtggacgtgcgtacggatgggtgcgtggatacgtgtgcgaatgcgtatgtggataagcgcgcaagaggtgtacagataagtatgtggggaagttgcgggtggataggtgagtgggatgaggatggcggcgcggcagctatccgggcgtgtccccgccgcgccggataatcaagccttatgagtcatgttttggtgaatgttgcttggccgtatgcaaacggcccccgtcatatcggccacgtcgcgggatttggtgtgccctccgacgtctacgcgcgctacgagcgcatgaagggcaatgatgtgctcatggtgtccggcaccgacgagcacggcaccccgattctcgtcgaggcggagaaggaaggtctcactgcccaggaactggccaaccgttacaaccgcgtgatcgccaaggatctgtgcgacctcggcctgagctacgacctgttcacccgcaccaccaccggtaaccacgagcacgtggtgcaggagatgttcaagcagtgcttggagaacggctacatctacaagggcacccagcaggtggcgattagcccgtccaccggccgcactctgcccgaccgctacatcgagggcgagtgcccgatttgccacgccgaaggtgcgcgtggcgaccagtgcgacgcctgcggcaacgagctcgacccggacgagctcatcaaccccgtctccaagattaacggcgaaaccccgcgcttcgagcagaccgagcactacttcctcgacctgccggcgctcgccgaagccaacaaggcatggctggagacccgcaagggctggcgtaccaacgtcatcaacttctcgctcggcctgttcaaggaggtcaagccgcgcgccatcacccgtgacatcgactggggtatcccggtgccggtgaagggctggattgacaacccgaacaagaagctgtacgtgtggttcgacgccgtgatcggctacctgtcggcctccatcgaatgggcccgccgccagggcgacccggagaagtggcgcgaatggtggaacgacccgagctgcccggcctactacttcatgggaaaggacaacatcaccttccactcccagatctggccgtccgaaatgctggcgtacaacggcaagggctccaagggcggcgaaaccggcccgatgggtccgctcaacctgcctgagcaggtggtggccagcgagttcatgaccatggaaggcaagaagttcagctcctcccgcggcatcgtgatctacgtcaaggacatcctcgcccgctaccccgtggatgccgtgcgctactacatttccgtggccggccccgaatcctcggattccgacttcacgtgggccgagttcgtgcgccacaacaacgaggagctcgcctcctcgtggggcaacctggtgaaccgcgtggccaacctcatcaacaagaacttcggcgagattccgccgctggacgaggattcgatgaccaacgaagaccgtggccttctggaagaggcttccgccgcgttcgacgtggtcggctcctccatcgaaacccaccaccagaagcacgccctgtccgaggcgatgcgtgtggtcggcgacatcaacaagtacatttccgccaccgaaccgtggaagattaaggacgaccaggctcgtctcggcaccgtgctgcacgtggccgctcaggccgtgtctgacgcgaaccacctgctcgcgccgttcctgccgcactccgcacagaaggtgtgggaggcgctcggcggcaccggcaccttctcgccgctgcctgagctcaaggaagtcgaggatctcgacaagcccggcttcacgtacccgatcatcaccggcgattacgagctcggtgtgaacgtgcacccgtggaagagcgaggcaatcgaggtcggcgccatggtgcctaagcccgcaccgatcttcgccaagattccgaccgaggccgtggaagaggagctggctcgcttcgatgaagcgttggctgctcgccgtgccgccgaagccgaacgtctggccgccgagaaggccaagctcgccgccgagtgattcggcattgctagctcgtagctgacgggccacctcgcacatgaagtgttgcggggtggcccgttgccgtatgtgcggcctagccccgacaatgcgaggccggttgtcgggcggcgttacaaacccgtcacagtttgccaagacttttctcagacaagcacatcgaatccccaagaaagagacggttatatagaagatgtcaacggaatgaagttcataccggtggcgaggttcttccgaaccccataactgaacccttcttctctcttctctctcacccggcggccccctccgccgggtttcttcgttttggtccgcatcatgcaacgcaagttacgatgctgtcggagcattgcaggagtccccccatacttccggtttggggtgctgcttgattcctctacttccagcgaaacgttgctatcgcggtatggtcgcatgcctgttaagcattgaagcatcttatctatgcgcagtcggtgtcccggtggtgacggcaaccgattgacgtgcgaaccgggccagatttcgttgtcccggttcgtgattttggcctctttttgggaaccgggacagaccatcccgtgagcgctcaatgtatgcaaatccagaagcccggaattccgccgatgtgtgatggcggatattgtgcggtagggccgaattggcgatttttcgagggtgtttctgtcccggttgctcaaaaagaggcgaaatggagaaccgggacaacaaaatctggcccggtacacacataaatcgattgacgtcgttaccaggacatcggacaccgtgacgtatatcgcgaaccgcataatatggcagtacgcaacgcagatgatgtgcggattcgccggacgtaacatggcgtgtgacacacaacagtgccatgcggtcggggccacgcgaccaaatggggtgcgatgaatggcatatgcgttgcagcaagcgcgcgcaatcgtatcgatgtcagctcagtgcgccccggtggatttccgtcgtttccgccgggcaagttcattgagcggcgtcgctgtcaaggtgaaatcgaatatggcgcctcgcaacgccagctgtcgcccggctcggtaggcgagttcggcttgagacggttcatcagccatattcgcggcggtggcgatgaggacgatccaatgatgatgccgtaacagttcgcgcttgtcgttgtctcgccgccactgggccttgtctgtgcgatgatgatcgccgtcatattcgatggcgacgcggaattcgggccaagcgagatcgagtgttatcggctcaccattgctgaacgtcgcgccgggcactgtgtaatttgtcacggctcgtggaagcccgtattgcgtggttgtgatacgggtctctgattccatcggagaatccacgcgcggtgcaataaattcaagatcatgcatgtggctttcgcgttgaatttcggaagttcgctgacctgccgcacaaagtcctgataaatttcgtcggcggtgcggccgcccgataggctcggcttgcgcgctattgccgtaagggttgcgtcgccaagtatgaccaatgattccaatgacatgtgagcggcgagctgcgcccaagtatgtaccagattcagcgcgtgcacatgcttgttgatacgtgcattgtgcgcggcgcttagcggtttccagatgtgcggtgttgttggcggaacgacggcgcgtatccgggtgcgatgcgagtcggagacggtatggagctcggtggcattgagatcgcaatccttgggaagcggcacggattgcagtatcagcgatgtggtcatgccgaagagcaccggctttccgagctgttgcgcggcgtccgtgcatcgtttaagcatttcccgcttacgttgggtgagggtttcgctcatagcgggcgcagtgggggttgccatacgcggtggtgagtatggctcgggcttgacggcgtgcgtggacgcagcactcggtgccgcggcattgttggtccagccgggtggttcatcgtcgaatacgccgggtggcggggtgggaaatccgctgttcataacgccaccgtagcgtagcggtcgcgtgttcgccatgaaaaacggggtatgtggttctagcttgctgaggatgtggataactctgtggataactaaagtgctcctatgttttgctcactctgtgaggagtcggcaaaacataggagcacttcagccgcggccaatagacggaatatatcagcggcagcgacgggtgaggggctgccagggatcgagctcgactggttcggtggtgagcagggcgcgggtggcgtcgtcgaggtattccttgcggatgatgagctcggtaacgtagcggtcgaaccaggcgtcggacatgacgtagtagccgtccttgccggcgtccttgccccagctgttctccaccttccagcggttcggcttgccgtcctcgccgaggttcacgccggtgaaggtcatagcgtggttgctcgggctgtcgccgtattcgaggccgtgggccttgtcgccggtgaattcggtgccgaacagctggtcgacgcgcaccacggactggtcgaagaaaccgtccttgcgcagggcgaactgcgtgcagtcgcaggcgaaccagatcgggtggccggcggtgagctggtcaagcgcggccttcttgaacacgtccagcggcacgttgacgaattccatatcgccagcctcggccacgttcgcgctgaagcggatgcggtagcgctggttgaacgggcggttcttgagcggggcgttggccagcgtcacgaaatcgttgacgtccaccggcacgtacttcttgtagaactcaagcggggtgatgccgatctcgcgaatctgcgggcgctcgtccttgccggttttcggcttgtcggacttgtccttatcgcacttgcaggccttggcgtcggatttgccctcgcacttgcaggattcgccgcacttgcaggattcggccttgccgtctgcgtcggcctcggccttgcacttgcaagcttcgcccttcttatcctcatcatcatccttggtgcgcgcgaagaagtcgaacttctccggcggttcgccgagcgccacggcgcagatgcggtacacggtgcccatgtactcgtccttcaacgcacgcagctcgtcctcagacgccccggcagccgaacggcggcgcagctcggccgcgaactcgcgcagcttggagttgaggtactgcttgaaatcgtcggaattgcgggagttctcggactccggataggcgctcttgggcactaggccgtacttgttcaccagtgcagcgaacatctgccaccagccaccatcgtctgcaggcgactcattgatggcctcgaacagacgcgaatcggtcgcctcgtcgagcgtgtgcagcacgttctccagataagtgttcgacttctccatcgcgtcccagaagaacaggtaggtctcggagaactcgaaatcctcaagattccagcgatgcatgagttcgtaacgcagcgtgttcagggaggcgaacatccagcaacggccggaacgctcctgattggtgatcgaaccctgcttgagttcgatggagaagtcgcgtggcagcgcacgcacgccgcgatagtcggtggccgccttgagcacgccggccgagaccgccgcgtccgccgcgatcaggttggcgcggtccttgttgaagtcttcggtgtacgtacgcagaagttcgggtttgatggcccgtgcgctggcgtttgctgtcatgatgattgatcttccattcatgtaggcgacgtttgtggtccgtcggtagtataagtcgccgtgtattcgtcgggcgattcaccgggcgaaatcgtacgggcggatatgcgccggcgattccaccccgccaacgatttgtccaccttgctgctcgcgcgggcgcacgtatcatatgtaccgatacatattgttgacgaatgtcgcatagtccaaaggagtacgtcatgacttcgctgcatagcaagccgctggccctgaaaaacgtcaccgtcaccgattcgttctggcgcaccgagcaggaactcgtgcgcacggctgtgattccctatcagtggaacgccctgaacgataacgtccccggcgcggcccccagctactgcatgcacaacttcaaggccgctgccgcgcaaaacaagcgtaaggatacccagggcaaggcgttcgtgccgccgaagtacacgttccgcggatttgaggcgctccccgaagacccggccaatcccgacccagacaagttctacggcttcgtgttccaagacaccgacttctccaagtgggtggaggcagtcggctattccctcgcccattacccggaccccgcactggaacagaccgccgaccaagccatcgacgtcgtgtgtgccgcccaactcgacaacggctatctggacacctgctacattctgaacgacatggatcgcgcgttcaccaatctgcgtgaccatcacgaactgtactgcctcggccacctcgttgaaggtgcggtggcctactaccagggcaccggcaaagacaagttgctcaaggccgcctgccgtttcgccgattacgtagacgagcgcttcggtcgcaagccgggccagctgcgtggttaccccggtcacgagattgccgagatggctttggtgaggctgtacgaggtcaccggcgaacagcggtaccttgatctggccgaatatttcgtgaccgagcgaggccggcagccgtacatcttcgatattcaggcagacgagaacgcaaagcgcgacgccgacgccaactacaaacccaacacggaccccaaccggtacgcctaccaccaggcgaacaagccggccaccgaacaagacgaagccgtaggccatgccgtgcgcgccggctacttctactccggtctggcggacgtggcccgactgaccgacgatcaggacctcgccgatgcggccgagcggctctggcgcaatatcgtcgataagaaactgtacgttaccggcggcatcggcggcacggtggacggcgaggcattctcctacaactacgacctgcccaacgactccgcctactccgagacctgcgccgcgatttcgctggcgttcttcgcccgtcgcatgctcgagctcgcgccaaaggccgagtacgcggacgttatggagtcggcgctgtacaacaccacgctggccggcatggcgctggacggcaagagcttcttctacgtgaacccgctggaagtcaatccgtatgcctgccataaagacagccgcctgcgccacgtcaagccggtgcgtcagaagtggttcggctgcgcatgctgcccgccgaacatcgcccgcatcgttgagtcggtgcaggaatatgcctacacggttgccgaggatggcggtacgctgttcacgcacttgtatatgggcggcgtggccaaagctgagttgaatggtacggctgtggagctggatgttacggcgaacctgccgtggcaaggcgatggcaaggcggtcgtgcgcttgggcggtgacgctgctggcacctcggctcaggctcctgctcgctttacgctggccttccgtctgcccggttgggtgggcgatgagtccgctgctgccgccgcgattacggccacgggcgagtctgagtctggggccgatagttcccgcgtgacccgcgaaattcgcgacggctacctgtatctgaccggtgagtggcgcgacggcgacaccgtgacgttcgacttcccgatgccggtgcgtatgctggccgccaacccgctggtgcgcgaggacgccggcaaggtggcgttcgtgcgcggcccgatcaccttctgcgccgaggaaaaagacaacggcgccaacctgcacctgctgcacgcggatgtggaggcactgctggccgacccgagcgcggccaaggtcgaggagttcgacttccacgccggcgccaagggcatcgacgacaagggccagggcgaggtggaagacgtgacccgccgcatggtgaagcttgaggtgccggcttggcgcgagccgttgccggctgctgtggccgccgcgggtgagggcgcggccgaggttccggcgttcgcgccgctctacgccgtgtacgcgccggtcaagcgcgagcccgccaccgccacgctcatcccgtacttcgcctgggccaaccgcggcgaaaacgaaatgaccgtctggctgcgcggctgatatttgctctcggctactctggtagccatgggcatcacgacatgtcggctcgaagggccggtggacttttactcggtcgggcagtttgtgtccggaccgggctggcgccatctgcggcgcaccatcgacaccttcgagctgatgttcgtgcgtcggggcgtcctgccgatgcgggtgggggagcagaccctgcatatcgaggccggccaaatcgcactcttgccgccgaatgtggagcatgcgggcgccgacatcatcacgtctgacgtggacttctactggatgcatttcaaattgccggatgcgcgcatgctccccgatgacgcgggtctgccgcaggacgaccattgcctgttgctgcccgatgaacgcaccctgcccgaccccgaccggctggcggtgatgtgtgggcagctcatcgacatctatgcgcgattcggcccgtattccaacgcttactgcgattacttcgccaccggcctgctgctggaggtcagcgcgcaggagcggctgaaggcggactttgccgcccatcgtacgcttgccggctaccggggcgacggcaagcccatcaccagtgccgaccgcgtccggcagcaacaggaatgggccatgcatgtcgattcggccggtgccgctggcgattcgtccggcctggcgccgatgctggccatccgctcgtggattatggccaatgccttcgacgacatcaccgtggccaaagtggccgcgcgcttccactattcacccagctatctgaccgcgatgtaccggcgcgtgttcggcgtgggtgtggccgagcagatcatcgaatatcgcatcgaccgtgcgcgcgaactgctgagttctaccgcttccagcgtggcggatattgcgcgagaagtgggctacgccgatcccaagtacttcatgcgcgtcttcaagcgccgcactggcctgacccccggccaataccgcgacgctttccccgcccgcctctacaacaccgtgtgattagggaaggtcatggtcctaaccctaggaaaagtgcgcatgggcgccactaccacgtgggagcgctgggaacggtttgacgcatgccgaaacctcgcacgtcacgctgcacggcacttgggcagtgggtgcggcagtcgggaatcgccgccctatttcggcgtttcagcgttacctgtttgccgaaccgacagtggactcgcgcggaaccagtgtgtatccaatggtggcgcgcgtggccggcatgccagcggattcgtcggacctgccgtcgccctggtcgcgctgctccacgcggcgggtgatcatatcaagcgcgaattgggcgagctgatcgagatccacttggacggtgctcagcgtcggtgtggtgtacgagccggccgtggcgccgtcgaagccgatgactctcacatcgtcgggcacgcggatgccgtagtcggcaaggcctcggattactccgaatgcggcatagtcgttaatgcagaagatgccatcgatggccggggtgcttcccgttgcccgcgtggtgcccggggaacgggactcagcagtgtcatcagccgattgcgcacgagcctcgagcatcgcctcggcgatggcatgaccggcttcgatgccgctgtcgctaccgtaaccaatgaagttcgtcgattcgtcatacggcagcccggcgtcaagcagtgcgccgctggccccgcgtagacgcaaaccgctggaactttccacgtgcgccagttcggttcgtggcgaatacccgtcgccgacaatggcgatgcggtggcatccgcattcgatgagatgctgcactgccgcccgcgcgccgtcttcgttcgggaaattcactgtatcgaacgtgggcgtttcctcgcaggcgtcaatcagaaccagcggtcggccgtggttgatcgcggaaagcggcacaccggcattcaggcccgaagcgtggataatctcgccgtcgaacaactgcccggagaacgggttgttggccagcgcgtgtttggcggcatccggagagtaccgggtttgctccacgaacggcgtcagcccgcgcgcggtggtttcggtgacgagcgattcgacgagtttggagtagaacggcgaatcgaattcgttgacgatgatgtggatgatgttgctgcggccggacttcagcatgctggccgtcagattgatgcggtaatcgagcttttcggccactgccagcactttggcgcgagtggaatccttaacacccggcttgccgtgcagcgcattcgaggcggtcatgggggagaacccggcggccttcgctacgtcgcgcaatgttggtttgccgctcggcataacgtcacctcatgtttcgcctgtgatgggcattggacaatgcccgtaatgcttccaatggttgtaacggtattcacaacatcgtgttttggcaaatggtggctgtgcgccggaatcgctgaaaatgctgcgcttaggcgatgacgcgccgagcgtaacatgcgcttgcttgatatcgttccggtggaagaatatgtaacggtacatacgtcggtgtgccaagaggccatgaagttcgtcgtacgttgggatgggactctccgggggagtggcgtcactcttcacctatccgtacgtgcgcgatgccgattggtttgcggctggcgtaccgccgtatggcaacttatacgaatatcaacgaaagcaggatacgatgacggatcttccgcagagccttcctcaggcatggcgtccgccgatgggctggaacagctgggattcgtacggcacgactctcaccgaagacgagctgctggccaacgcgcggttcatggctgaacacctgaaaaacgccggctgggatacgttggtcatcgacatcgactggtacgacccgaccgcccgcgcacatggttacaacgacaacgcgccgctgattctcgacgaatacggccgtcagctgcctgacccggtgcgtttcccgagtgctgccggcggcaagggattcggcccgctcgccgccgccgtccacgaactgggcttgaagcttggcatgcacatgatgcgcggcatcccgcgtatcgctgtggacaagaacctgcccgtatacggcaccaactacaccgccaaggacgtggccgacctcgaccacgtgtgcaagtggaatccggacaactacggcctgaaccaatcccacccgggcgcgcaggcctggtatgacgcgcagctcgacttgttcgcctcctggggcctcgacttcctcaaggtcgacgacatgcagaccccgttccactccgacgaaatcgccgcctatcatcgcgccatcgccaaagccgaagccaaatacggccgttcgattgacctgtctctctcgcccggcggctgggtggcgacgagctacgtcgacttcctgcgcgagaacgcccaaatgtggcgtatttccgacgatctgtgggaccgttgggaagacatctaccagcagttcgcccgcctggcccgctgggcgccgttccagaccaccggccactgggccgacgccgacatggtgccgttcgggcacataggcctgcgcgccgaacgcggcgacgaccgccaatcccgccttacgctggacgagcagaagacactgctggccctatggtgcatggggcgtagcccgcttatggtcggcggcgatctgcccaccagcaacagcgacgccatcgcgctgctgcagaatcccgcgttgcgtgaggtgcttgccggctccaccaataaccgcgagaccgtgcgcgaacggatttttggcaaatggtgggatgagagcacctaccgtggcgagttcatcgtctggtccgccgacgcagccgattgggctgatggcacacgttccgcgcatcacggcggccattacgccgcgctgttctggaccggcagcgacacatacgagatcggccgcaacatccagctccaatccattgtggggcttgacgcccgtaatgacgattggacgctatccgatctgtatgccgacgcgccgggcgagtccgccgacgtgcgtcttgaaggcgtgggtgccgaccgcgtcatcaccggcacgattccgccgcacggcgtactctgggtggccttggaccgacgctgataccgaacctgcctccgccaaccaacctcctgaaccgaccgcccgaatcgtatggagaaacctgccatgaatgcgaacatcgcaaacgaacaatccccggtagctgttccgcccgcaagttggctcctacgtgcgttcgctggcgttctgacctgtaggtggactgtctctgtctgttcgttgtcttcgccttgcttgcgttttgtacgttttatctgtttcgtgagtttcgtgcgttctgcggatttcacgcgtttcgcgtagtgccgtacgctgatcaccattcagcgtgcggcacttttgcatatctcacgtgttgcgggagatgccgattccgtcgcacaatacgtaaaacgtgaatgaaccactcactatgctgggttgtttgagcgtgatatgacatgcgccactttcccgggaatgcgttgcgaattggacctgttcggaggtgtgcagcgacgcattccggggaatgttgcgcttagagagccgcgtatcgttgctaatgcggggaacacgcagagttgcgggccgttgcgattagacgcaggtcgcctagactagtacgcgtttgcgaaagtcgaacgtgcttcgaccgatgaaggagagcttcggtcatgcggccaatgacaggcgcagtgcgaagcacggctgatcgtgaatcgcggcggcagcgattgccgcgtgcggcgcaggagcatgccgcaccataccacaagcaaacaatccccaagaaacggtgatctcctcacatgtacgtcgatccgggaatcaataccagcgcaagcaatctcaaatgggtgctgccatactgcaaaccagacctgccccgcgtggtaggcgcgcttctactgttcatcgcaaataacacgatggccctgaccattccgattctgtccggtatcatcgtggaccgcgtcatcgtcggcggacatgccgacgaactgccacgtctgtgtggactgatgatcctcatgaccatcatccgcgtgggcgcgcgatacggctaccagatgtggatggagcgtttcggccagaactcggtctaccgcctcgtctccgacgaatacgagaagctgcacgagctcgacttcacgtatttcaaccacacacgcaccggcgacatcatgagccgcctgacctccgacaccgacgcgatccgccactgcctgagttgggtgagctatcagattgccgactgcgtggtcatgttcgtgggcgccctgtgcgtgatgttcgccatcgattggcgactcgcgctcgtcctggcctgcgtcacgccgttcatttttgtgctcacgcgcggcctgtccacgcacgcccacccgctgttcttcgccatccgcaactcgctggcctccctcaactccatggtcgaagagaacatcgagggcaaccgtgtggtcaaggcattcgtgcgcgaaccgtacgagaccgaaaagttcgacgagcacaacgacgattacatgcagtgcaacatggccttggcctacaactcgcgcaagtacatgccgtggctggacggcctcggcttctcgctgcagctcatcaccctcggcctcggcggctttctggtcatcaagggctacatgaccctcggcaatctggtgagtttcaactccttcctgtggatgatcgacggcccggtgcgccagtccggctggctgatcaacgactggcagcgattcaacgccagctgcatcaaaatccgcaagctgctcaccgaacagccgcgcatcgtggagaagcccgacgcggtcgaagccgtcaagcaggcggtcacgatcgtcgagcaagtcaagcacgatgatgaggctaccggggctaccggagcgcccgtggcttccggaacatccggtgcccagcagtccaccgaacgcaagtcctgcccgctgcacatcaagggcgacatccgcttcgaccacgtcagcttcgccttcccggacgacccggagaccccgatcctcaaggacctcgacttcaccgtgcccgccggctccaagctcggcatcctcggcgaaaccggcgcgggcaagtccacgctcgtcagcctcatctcccgcttctacgacccgaccgttggccatgtgctcatcgacggcatcgacgcacgcgactggccgctggccaccttgcgctcgcaggtgtgcatcgtggcgcaggataccttcctgttctccgacaccatcggcggcaacatcggttttggtgccagcggtgatagcgacgaccgatatatccagaaaatggcccagatcgccggcgcggacaatttcatcaggtcgatgccacagggttatgacaccgtcgtgggcgaacgcggcgtgggcctgtccggcgggcagaagcagcgcctgtcgctggcccgcgcgctcgcggacaatccgtcgatcctgattatggacgatacgacctcggccgtcgatatggagaccgaggcggagatccagaagcacctcaaggagatggacggcggcaagaccatcgtcgccatcgcccaccgcatctcgtcggtcaaggattccgacctgattctggtgctcgagcacggacgtatcgtcgaacgcggcacccacgccgaactcgtggccgcacacggccgctactgggacatctaccacaagcagctcggactccagtccggcgtcgcacaaggtttttagaagaggacttatggcacaacgcaatacataccgcgaggatgaggaactcgaggagcagatcaacttccgggacatcctgcgcgtcggcaaatatctcaaaccgtatatggcacaggtggcgcgcattctcgtcgtcgtcatctcgatgagctgcatcgtcgtcgccgtgccgtacctgaccaagatcatgatcgacgaggcgatcccgaacaaggacctcggcaagctcggcatcctcgccgtgatcctcgccgcgctgatcgtgctgtacgagttcgggctgcgctaccgcacggtggcgatcacgcgcgtcggccagctcatgctcaaggacatgcgccgcgatatcttcacgcatatccagacgctgcccttcagctacttcgattcgcgcccgcacggcaagatcctgatccgcgtggtcaactatgtgaacacgctttcggacacgctgagctccggtctgatcaacgtgatctccgacgtgttcaccttcgtgatcacgctgatcgtgatgttcgtgatcgactggcagctggccctgtggagcctgatcctgttcccggtgctcatcatctgggtgcgcgtgctgcagatcttccagcggcgcgccttccagaagctctccaacaagcagagcaacctgaacgcctacatccacgagtcgatcgccggcgtgaagaccacgcagaccttcgcacaggagcaggcccagttcaggaccttccaggaacagcagggcgaggtgcgttccgcgtggatgcacgccgtgcacatccagttcctcatgtggccgggcgtgcagaccatctccgtgatgaccatctcgttcatctacttcgtcggcgtgatgggcttcgggggcgtgaacgtgaccaccggcgtgctcatcgcgttcgtcggctacgcgaacaacttctggaatccggtgatcaacatcggcaacttctacaaccagctcatcacctgctcggcgtacctcgagcgcatcttcgagacgctcgacgtcacgccggagatccgcaacaagcccgacgcggcggacctgccgcagatccgcgggcgcgtcgacttcaacgacgtggtgttccgctacgagaaggacggccgcaacatcctcaacctcgtggacttccacgtcgaaccggggcgcacaatcgcgctggtcggcccgacgggcgccggcaagacgacgatcatcaacctgctgtcgcgcttctacgacgtgtccgagggctcggtgacgatcgacggctacgacgtgcgcgacgtgacgctcgcatcgctgcgccggcagatgggcgtgatgctgcaggacaccttcatcttctccggcaacgtgcgcgagaacatccgctacggcaagctcgacgccaccgacgaggaaatcgaggcggcggcgaaggccgtgcacgcgcacgagttcatcatggaactgcccgacgggtacgacacggtggtggaggagcgcggatcgaccctgtcggccggccagcgccagctcatcgccttcgcgcgcgtgctgctcgccgacccgcgtatcctgatcctggacgaggcgacgagcaacatcgacacgcgcaccgaggaggcgctgcaggccggcctgcagcatctgctcaaggggcgcacgagcttcatcatcgcgcaccgcctgtcgacgatcgagaacgcggatgagatcttctacatcgatcacggccagatcgtcgagcacggctcgcacgcgcagctgctcgccgccaagggcgcgtactaccgcctctacgagtcgcagtacgcgatgattcgcgtggccagcggggcgccggaagagtgacgagatgttgcgcacaaggatgcgtttagcggcgtttcacatagcgggtgctgcgaccggcaccgattttgatgatcgtaccggagtccaacagtgatttcagcgtgcgctcaatggtggtggtgctggtatcgggcatgcgagcgagaatatcggccttggaaagtgggactagggattgatcaagcagtgcttcaatccgcgttcccttggtggctactcgcggtgctccctgcgctctgccgcctgccgtgagattgatgcgttcgtcgaattccttgcacgcggacagtatgatgccaagcaggtagttcgtgaatggcgcataatcattggcgttgtcgtcccagccttgagtgcttgcgtccagcgcctcataataagtgcttttactttgctcgataaggtgttcgatactgatgtatttgccgaccatatagccattgcggtacagcatcaggagcgtgagtagccgactcatgcggccgttgccgtcattgaacggatgtatgcagatgaaatcgagaatgaacatggcgatggcaagcaatggatcggtatgtccatctcggattgcttgcgtgtaggcggaacacgcgcgttcgatcagttccggtgtgacaagtgcggacggcggggcgaatcgcacggtgctggtcccgtgtgcatctcgttcgatgatgacgttgtcactgtccttgaaatgccccgcaaaggtcagtggtgtgtgtcggaagaggtcgcggtgcagttgaagaatgacgttcggggtaatcggaatatagtcgtggctttcgaataaccgatagcgcgtcacggtaaccggcaatttcttcttcattgcgattgcgcggtgtgactttctccgagacgagatcgttgagcctgctatcgctggtagaaataccttcgatgcggtttgaggcatctgtgctttggatgcgcgcgacggcaaccagcgtccccaatatatccggtctgatcgttgtctgtatgctttgacgcccttttgcctcgtgaatagcggcaagcaaactcgtggtgtgcggggtgagcaacgtcttacctgattctatgtagtcgaatgatctcatactgcctcattttctgcatcatacgaacttttctgcatcatattttatcaaaatgatgcagaaaatgggctgatgagacagaaaaggcggcaggatggcggccgtctcgcttgccggttgcgttactttcccgggaatgttgcgctcgtggcaagaaacggcaagttcaggcggacgcgaccgacgatacccgtcgtgtagtcgaacgtcttaccggactgccttacgagcgttgctggcggtagcctacactgagaaaccatgagcaagcatcaccatcgcgaccgtagctgggccccggcacctgaagcattgccggacgacgcccagaccattgacaaccacactcacgtggcctccgtaatccctttcgcgcgcgctatgagccatgaggcgcaggagaagggacagcccgaagtcccggtgtacgacgtcgaccaattgctggcgcaggcgcaatctgtcggcattgggggtattatcgactgcggttgcgagctgccgcacctgatgaccgccctccagatggccctcgatcatccaggtaatgtgcacgcggcgctcgcaatacaccccaatgagtccgtgctccacgggcatcgtggtgtgccggggccggatggtctgcccctcaaatacaagccttaccatgacacgtctttcgaggacgcgctcgccgaagtacatcgcctcgccaccacataccccgagcaagtggtggctatcggcgagaccggcatggacctcttccgcaccggcgaaggtgccaaggaactgcagcgcgaggctttccgcgcgcatatcgccttggccaaggaactgggcctgcccatgcagattcacgaccgcgactcccatcgcgaggtcatcgaaaccctgctggccgacggcgcgcccgaacgcaccgtattccactcgtattccggcgaccgtgagatggccgagatcgcgcgcgaacatggctggtatctgagcttctccggcaccgtgagctacaaaggcaatgacggtatccgcgaatcgctacggattgtggggctgggccatgcgatggtcgaaaccgacgcgccgtatctgacgcccatgccgtaccgtggccgcaccaacgcgccgtacatgattccctacactctgcgcgccatggccgacacgctcgacttgcccatcgcggatgtggcgcgcggcacccgcgataccgcccgcgccgtatacggactgtgagggccgggtgtgcggccgtcgcggcgcgtgtagagacgatgtgttgacttgtaaaatttgtcagaattgtgaacgaggtctatcatgatgtgtttgacataagcgagggggatgatctccacctcaatggaggactgaacgtatggctgagtcgaaccaaaggaccgcacgcgcccaaaaagccttaaaggcccagaaagcccagtctggcgccgccaaagccaaggcccgacaggaagaagaagcactgctgagggccgacacctttaccaacgctcccaaggtgtcccgccgcactctcaccaaggaggagcgcgaggcgctcgccaagcagagggaagctgaaaccaaagaagccgagaaaatcgccagcgcatggtcgaaaggcggcctcggtcgatggtgggcccgcctgcaatccagcccagacaaggtcacctggggcatggcaatcgtggcgctcggcgtggtgtacggcgacatcggcacctcgcccttgtacaccgcgcagaccttccttgccggtcagggagggcttggcggcgtagaccgagaggccgtgctcggcatgctgtcgctggtcttctggtcgattacgctgatcactaccgtcaaatatgtgctcatcgccatgcgcatcgacaacaatggcgaaggcggcatcttcgcactgtactcgttgattcgcaagtacggcgcatggctcgcgattcccgccatgctcggcggcgcggcattcctcgcggattcggtacttaccccggcggtttccatcagttccgcagtcgaaggcttgcagaccctgccgccattggaagggttgttcgacgaaaacccaagcctgaccctgatgatcaccgtcgtgatcatcgtgattctcttctccgtgcagtcgcgcggcaccgaaagcatcggcaaagtattcggctcgatggtgctggtctggttcggcttcctcgccatcgtgggcgtcacgaatctctctaacgactggtctgtgtttgaggccctgaacccggtgtacggcatcaaattcctgttcagcccgcacaatgctgccggcatcgcccttatgggcaccgtgttcctctcgaccaccggtgccgaggcgctgtactccgacatgggccacgtggggcgcggcaacatctacttcacctggccattcatcaaggttgcgctggtgctcaactacttcggccaaggcgcgtggatgctggccaatagcgataacccgcaatacactgcgacggagtcactcaacccgttcttccagatgatgtctccgaacgtacgttatctggccgtgattctgtctgtttcggccggcgtgatcgcttcccaggccctgattaccggcgcgttcaccatggtctccgaagccacccgcctcaattggatgcctcatctgcaggtgcggtacccggcccgcacgcgtggccagctgtacattccggtggtcaacggcgtgctgtgcgtctccacgctggccgtactcgccatcttcaaggattcggaacacatctctgccgcatatggactggcgttgaccattacgatgatcaccaccaccgtgttgctcggcgtccacctatggcattccggcaagcgggtcggtgccatcgtgttcaccgtgctgttcttggcgattcaggctatgttcttcatcgcgtctatggccaaattcctgcatggtggttggttcaccatgttgctgaccgccgcgattctgttcgtcatgtacacgtggaatgagggcaccaagctcgaacgtgcgcaacgccgtcacatgcggcccaacgacttcctacccgcgctcgacaagctgcacagtgatttccgcatcccgtattttgcggacaacatcgtgtacctgacctccgactcggaaaccaagcgactcgacacggacatcttcttctccatcttcgccgaccaccccaagcgcgcccgtgcttggtgggcagtcagcgtggaaaccaccgacgagccgttcacccgtgaatactcggtggaggacttcggcacgaactacatctaccgcgtgcgcttccgtctgggattcaaggtttcgcagtccatcccggcgtacatccaccagatcatgcacgacctgtccaaaaccggcgaactgcccaagcagaagtcgatttaccccaaggtcgacgccgatccggacatcggcaccatccgttacgtgctgattcacaaggccctgatgccggaatccaaggtttctgcacgcggtgccctgtcgttgcaagccaagtacgcaatccgccacatggccggctcgccggttaagtggttcggtctggcaccttacaacccgttggtcgaggtgcagccgctgttcgtctccacccgccgcccaccgcgtctgaagcgcaccgatacggccaagaccatcccgacgcccacgccgactcgtgcagtggccgacccggccgccgtccctgacccgatggacaccacgtccgggcttgggcgattggtacaggagctcgatgccgccgtatcggccgaggcgcggaagaccgctgaggccgctgccgccgatgcgcccgctgagcagggcgataagggcgataagggcaaggccgagaacggcaaacccgccgccaagcctcagcgctccgccaaacagaagcgataacataccagtttgcagcggcgctgatgcgctctataaagaatgcctataacggtcaccgcacgtcgccacacggtttcggtaagttgaaataccatgtgcagattactgggatacgcgacggcaggcttcaacctgagtctcaacgctgtgttggggcaagacaatgtcgaggatttccgtgaactgtctgaaatccacaatgatggctggggtgtagcccagctttccgatcctgccgaagcaccgcacgtgcgcgacggtggcgcacccaccccggaaaccggcacccgaatctacaagtcgaccatcgcggcccgtcatgacagcacgtttgaggcgctggccgacgaaccgtctcgcggtgccatctggcacctgcgcttggcaagttccaatctgccgctcatcatggagaaccagcacccgttctatgcgaacggcctgagcttcatccacaacggcgatatctcggacgccaatggccgcaacatcgtcaccaaccgctcatacccggtgaaccacagcgtgttcctctccaccggcggccgttccgactccgccatcttcttcgcggtgattctggaatacatcggcttcggcttctcgctcgacgaggccgtggcccaggccgtgcgcgaactgcgccaagcctacccgaagtccagctacaactgcatgattcagtccgaggaccagctcatcgccctgtgcgccgccggtcgtgagaagaccagcccgcgcatcgtggaaatctacgatgagtacggccgtggcgagcaggccgccgactaccgtgtgatgcgctaccgtgagctgcgcgacgacaacggcgactccgccggtgtggtggtctcctcttccggctatgagcaggaaggctggaacgtgctggagaacgaccagatgatcatcgtctccaaccgcaacggcacctaccgtctccgttccatctgaaataccttcataagccccctctgacgagggggctgtcagccgacaggctgacttggggggagacccctagagcctcaaatcatccgcatcccatacttctccgccaacgccggaatatccggcacgccatacttggctaccagatccagccatcgctgtttgttctctccgccaaatcgctcggctcgggccgtatacgcctcgacctgcaggaacttcggcggcactgacttgctatggaacttgtcggcgtacatcaccacttcctgctcgagattcatcggcacatagtcggctggtggcaacggcagctcctggcgcaccacatcctcgcgcgtaagtcccacgccggtatggttgcggcagaactgggcgatggactcgtccacgccctcgtcgagcagatactcgtagcccttaagaccgtgcagaatgtagcgtttcttgctgaatttgagcggttcgccgtcagagccgtcatgcttgaacacgcggtaggtgccgatgtcatgcagcagtccgccgatgagtaccaaatgctcgtcgagcagacgcggcggcacatggccgccggtgacgcctgtggtgggcggtacctccgcgtccttcggtaatgtgcagcggcgcgtgaacagcgcgttctgccggcgcacgatctggcagccgatggtcgctacaatcacgcaatgcgtgtgcaccagctcgtacgccgccttggacggcgcgattttgcggtgcaattcgtcgatctgctccagtgtgggaatatatccggtcataattatcaggtttcgcctcgtacggtcagatttatcctcagattagcgcggcaatgagccgcagcattgaaaaacccctgcgattcggcaatacgaatcacagggggctctatggtctgaacatcagatttcgaagagtgtgtcggctgcttcggcgatctcgcgcgacgcagtgagcacgataacgcagtgcttcgggtcaccggtgtgcgccagcttggccagcgcggcgaacacggtcacctcgtcatccgcgttcagccctcgtgtcggctcgtcgaggatcagcacctcggcctcggtgctgattgcacgggcgatggccaccaaacgctgctgcaccaaaggcaatgtgccgacagccacgccgctggtggcctcagagaagccgaccttggccagcagttcgcgggcgatcaccggcttgggcttcaggaagttgcggttggacgcattcatggcgtacagcacgttttgttcggcgtcgagcttcggctgcacggcgtgcagctgcggtacgatgcccagacggtggccgcgcagttccacgggctcgagctcaacaatgttggcgctcttgttcatcaccgtgccagacgccggcgtggtcaaaccgctcatcacgcccatcagcgcgcgacgcttggcgtcggcggtgatacccgaatcggggtcgtcgctgatcagcagcgcgtatgcgtgtccggaatagcagaagaaattcgcgccatcgaggatgttgaccttgcccttggggccggcgaccgtcaccttgttcagggcgaaggtcgggtaggtcttgagcagaatgtcgtcagaaccgccgcccaccaacacgcgatcgatacgcgaggccagcgtcatggtgggttcggacgctttgccctgaggctccgcatgctcggccaatgcgtctttgtgatcggttttggccagtcggagtgtttcgttgacgcgggcggcattgcgctcggtcacttcggcggatgcgttggccgaagcgatggcgtctgcttcggcctcgctggtctcgtcggtttctccggtctcggcagatgccagtgcgctgtaaataccatcgtcaacagtgccttcgtcatcaacgtcatcgaaggtcacgctgaactgcatggagtcagctggaacggattcaatggcgtcgttcgtctcagtctcagaagtcacttcgtcagccgttgcgtcagtggtcttctcgagttcctgatcgttgttcctgtcgctcatgcctgtgcctccgcatcgtcggttgtggtggtcgtcttgttggtctcgctcacggtgccccagtcgccatcggcggcaaacagcttgtccgcgctgaagaacgcaaggcgcagggcggcaagaatcgcaaggatcaggattgaacccagtccataccagaccatggtccaaatcaggcccgatgtcaccggggtggcatggccggatgccagggcagatccgatcggattggcggcgaacgcgcctccgaccagaccaatcacgtagaagggcagggtgacgatgaacacttccagcatgaactgccatcccaaacgcccgcgagtgacgccggacaccagtgccatgccgatctcgtcgtcacgcttgggcgcccacacgcccgacagcacgaggatgagcaacagcacgccgcccacggcaaccaacacaatggtgccggtcttcgcgcgcgaggatagcgtatccagcggctccagagaagcgttgtaggattccagcgaaggggaagagaactcgtaacccttggcgggcagcttggatttcttgagggtggacaccaaggacttgtatgtagcggaatcaccggcgtcgaacaccacgtccagatccgggactgcccagccggagacggtcttgtcggtggactgtgggtcgagtccggccttggcgaaggtctgatagttggtgaaaatcgcgttctcgcggttgcgggcggccgtcaccggattggcgacggcggattcggatgtgtacttgtagatgccgcgcaccttgagtttggccgtggtcttggcgtccgaggcggccgccaccttgagcgtatcgcccaccttcaggttgttggcggaggcaaacgcttcagagaccagtgcgccggtggtgttcgggttggaggactggttgttgtagctcaggtccttgccgtccacgatttcgaaggtgccgaggtcgctggccttggcggaatccttggtccagaaggctcgccaaatgagctggccgccggtctcgtcatcggaggccgagcccagcgatccgccgtccagggccttcaaatcaccgctcacgcgggccggcacggtttcggtaaccgtgaagttcaacgagttggtggccgactggacgagcgtggcgtattcggtgtatgaggtccacgtcatgtaatgcttggtggaagccgagtccgtagcggagaccttcttccacgtagccgcagtcgggcgaatggccaacgtggccttctgctgatcgtacgcggtggtgtgtgcgttggtatcttcttgaatgatggccagtccggcgactgtgccgaaggtgaccgccaaggtgatgaacgcggtcagggccgtacgtcctttagaacgtgtcagggcccgccaggcgttgctgaggacgaacatgtaattacctctcccgttctcctaagccgaacaaatcaatacggctctaactattgttgcgtttagtgaccgttttcttgcgcaatactgttatacccctcaatgaagtctgagaacattctgacagcgatgtggtggtcatgcggggatttgcacccagtatgggataaatcctcggtctatttcggtggcatcggtacactggcatgagatatgcgtggcgtcacgtgtgctccggcatgtctgcgattccggatttgcccggagtccggcatccggaagcgtggcctcgcgccgctggataagagtatgagctgagcagattttcgggcagggtaagtatgcgattcacttcagggcattcgagccataaggctgtggggcgtaggagaagacgtcatgccggtaacggaaaattcaatcgctccgcatctacgaatagcgctgtgaatcagcagacgggtcccgtaaacctgaagactccccagcacgtgggtggtaacggccgttcgctgatcagccgtacgccgatatgggcgcgagtggtggttgtactgctgctgacgttgctggccagcgtcacctgtgtgggcacgctctacgcggcatccgtctcgagaatggccgcggatgcgcagcgtgtgctgacatccgccgaaagtctggccaattcggcacttggctgtggcagcgataagagtctgtcggacatctcccaagagctggtcaatgccaccaatgatctcaatgcggagctgaacggcccacagtgggacttcttccgcgaccattcgcgattcggaagcgacatcaccgccgcccgcgaaatgctggcttccgtggatacgctggtcaacggtccgttcactgatctgctgaacctgtccaaacgattgcagggcttctccctgaagaatggctcggtggacgtcagcgccctgatggatatgccggatatcgtcaagcaggcgcataaggatatctcgcagcagctcaccaagctcaacaaggtgccgactccgagcgtcgccaaggtggccaccgtgctcgaaaccgaaaaggctgcgctcaagaccgtggattcgatgctcggcgaatacgatggcctcattaacttgctaccgcaactgcttggcgaggacggcaagcgcacgtatttggtgatggtgcagaacccggccgagctacgttcggcgggcggcatggtaggcaccatcgccgcaatcacggcagataagggcacgattaccatcggtgatttcgccaccacttctggttgggacattcctgaggagccaatggatgatacggtgctgaaggagcgccaggtatttggtggcacttttgaccagtacccggccaccacgaccatcgaccccgaattccagcgtgtggcacagatgaacaaatacatgtggctgtatcagaaaggcaacgaagacgagaacgtagcgggtgtattgtcactcgatcccgtatttctccaggcattgctgggagccacaggcaaggtcaagctttcggacggccgagtgctggatggcaccaccacggtgccgttcttcgcttcagacctgtacacggattacccggacttcgagcagcagaacaacttcgtttccgaagcggctcaagcaattatgaaccatgtgcttggcaacgcgaatgcctctaccgcatccccgctgttgaaggcaattagagataccagcgctagcggtcatttcaagctatggatggctgatccggatgagcaggaggcgctgattgccaccggacttatcgacgataaggccagtggcgagttgtctgctgacagtcaggtgcccgaagccggcatctatctttcggagctgcagcaaggcaagcaggattggtatctgaagacctccaccacggtcacaaaaacctgcggcgacgcctcagccagccagaacgccctgtattctggcgtgctggataagcgcatcatgacagccgtgcgtaacacgcagctgggtcagtttacggaagatcagctcggtgacgaatacacggtcaccttcaccatgaagaacacgctgactaaggctaaggccgaatcgttgcctgatttcgttaatggcggctcggagaatccagtgctcggcggcatgttgtaccgcgtggtgcttaccgccccgtacggtggcgaaatcaccgctgtgcaggctgatatagattcatggggtaccaacaccgcgagcctgtatgaccgtcagtacattatgttcaaccagcagtggatcgagcccggaaaagaattgacgattgcttataccgttcgggtcagcagcgatgccacacatccactgaacgtggtaaccacgccggtggtgaatgcggatggcgtcgagacgggctccaacggtaatgtgaccgatgagtgcacggcggatacgaacggcgccgatggtgcgaacggtgccgatggtgcgaacggcggcgcggacggcggcaagaacgacgcgcataaggacgcgtcctccgatccctcggccggcctggacaccttggacaagctgaagagccagatcagctgcccggtcgatctgaagtccctgacgggatccatgtgatgaccatgcccgattccgtttccggcgtcgccgtttccgacgccaccgtttccggcgtcgccggcaagccgcgcgatgtgaactacgatctgctgcgcgtggtggcgatgtgcctggtcatcggcgtccacgtgatcaacaactacatgcccgtcaagatgaccctcgccggcagcgcggaaacggtgcgatccgtgctgttcgcgttgttcatggtctgcaatccgctgttcattatggtgtcgggccggttcaacctgacattcgatgccgaccggccggtgagcacccactcagcgggccgtctgccgggctctggctctgatgcccgggcaggcggcgatgccggccaagccgatcccagcagcctcgcgccgtacgtgcgctactactacaaacgttttatctcgctgattgtgccgtatctgctgtatgcgggcggcatgggattcgtcgcctacctggtgatcgatcatcgttcggttggcggcgctgtgtctggaacgttgttcgatctgttctccgggtatgacgattccgtctattggttcgtgttcatgctcgccggtttcgtgctggcgacgccgttcctggccgcgatgatgcgtacgataggccgatcgggcgcctggttgctgatcggcctggccgccgccgtggccgccgccgagcagatctgcaatcttgccggatacccgttgacgttcctgcagtcgttcccttggcgggggctgctggtctactatctgctcggtttcgtgctggaatactatccgccgtccacgcggatgcggcatggtttgtacgtgttggtgccgttcgccctggcctggacagtcgccacgccatatctgttcgccggccagcagatgcaggttggccgcacggtcacggttgcgttcgcgatggtggtaatggcgacgttcctgttcttccggtacgacgtgcacattacgtcggcgcgggtgcgtaaggcgattatctggctggctggatattcctacacgatttatttggtgcactcgccactgtccaaggtgctgattggcccgaggattcccgtgcctacggacggatggtcgtatgcgggtatcagcgtgctgatgtttggcgctacgttgctggcggcgctgctatttgcggtgattgccgataccgtggtgcttaagcccgtgcagcgtctgctgcggaaggtacggctgtagattcggatacggcgctatgccacggtatcaaagccaggaatcccagcagcagaagcggggtgaacgtgaatttcgacatgccaaggccggcatcaaacggttcagccgcttccacgcagcgctcgccgccactcgtgagaacacggtcgaaggagtagaaacagcatcagaggcatcggaagcatcagacatatgtcccactatatatatgaggtgttggtggtgattgagcgatatttgaaggcagttctggaagggtcctagacgtatgatttggagaacggttccaccattaatggtgccaacgttcagctctattccagcaacggtactaatgcccggcgttggatgttgcgtaagtaggtttgatgagcatgacttcatctgatgagaagccttgaacccgtgtccacatttatgatggagggcgaataacatcaacgatttttagcacggctttgtctccgtcatttaatttcttggcgctatcgatgccgctcgcacgtccacacatgaaaagagccatgtcaatcatctgcagcccgtacagtatgcgcgaatcctcccactggaaaggcattttgatgcgtgccaaatcagaggggaaatatccttgcttatccaaggtatgagagatttgtggtacctgtggctggaaaaggataatgagggactccgaaaggatgcttaatggtaggggaggaagaacggtatattgattcaatcggcttgtcgtatgtggacggataccgattatgcgcttgaggttggtgcgcgtattgagtgtgtggtcgaaccagctgaagatgagtgggggtgtcattgttgacgttcaagaaagcatggcagataccaggtaaatgatttgcccaccttcatattttgcggtttgggctgacactaaaagatggggtgcgactcacggttgcgccccatcttttagtacgtcgctgtcagtgcctcttgttgtatgcgattttgttggtgtcaatgacgaaagtcttgcggtcattcttggccatgacatccaggataataccggcgatgatgagcagaagaccagcgatgaccagcatcaccgcgccgatcagcgtggggaagtgcgtgaccacgccggttttggcgaattcgaaggtaactgtgccgcacagcacgatgccgacgatgccaatgatcaggcccaaccctccgaagaagggaaggggcttgtattcgcggatcatgcggaagatggtgctcatgaccttgatgccgtcacctacggtgtccagcttggacactgagccttcggggcggtcacggtactggattggcatctcgtagagtcgcaggttgttgttcagcgagtggattgtcatctcggtctcgacctcgaagcctcgcgagagcacgggataggtcttgacgaaggtgaagttgaacgcgcggtatccggtcatgatatcggtgacgtgcgcattgaacaggccgttgatggaaccgcggaccagccggttgccgaagttgtggaacggacgcttgttctcttggaaataagtggatgagaggcggtctccaatcaccatgtcgtagccgtcgagcacctt

SEQ ID NO: 896 - DNA, 23991 bp, Unknown
  gut microbiota DNA sequence
gttttttgtagacgttgcgctccgtggctcggcgtgtcgcctgtgaggcttgttggtggttgccggatcatccggtggctacctcccgttattcctgcggtcggaagccccgccattccctgaaaaggggttggcggggccatggccggaaagtttgaagggaggggatgaacagacaaggttaacggaggttcatttacatgaactttagtaggaagatgaaagccggtgtcgccgcgttggccgcgatcgccacgcttggtgccggcggcgtcgtcgcttcgaccgctttcgcgggcggtggcggcggcaaccagcccggcacgggcggcaacctggacgcggtgcaattctggcagtacaaggacgacgcttcgggcgcttggggcccggccacgagtcttgactcggtgcgcgccgccatgaacaacgccggcgtcactttggagggcaacggcatcaccaaggcgcagaccgcattggaccaggcccgcacggaatgcgagaccggtttccagcggcgtcaccccggcgagggcaacggcgactgccgagtggtcgcagtcggcgcggtgccagccgtcatcggcggcaactacatctacaacgggtccggcgtggcttcgccgaccgggaccggcggctggtacgacaactggaacaaatacgtcgcaccgaacacctataagtatgcaggcactcagaattaccacacatccgatggcttctcagatgatccgtcgaacagcgtcgatgcgatcatgcgtcgtaatgtggaggcttccagcaagccctcgatcgtggtgatcgtactggacaagtaccagccagcaccaccgacctatcacttgagcgtgagcacgcaggctgcggagatgtcgggccaggcgggcgacaccaaggacgcctcggacacgatcaccctgtccagcgacgggtcgaagaccgagaacgtgaacggcaccgcgaccctgcactggcgtggcatcgacggcaccgagaagacggtggcgaagcagttcaccgcatccaacaagggcagcgccacagtgagcgcgtccttcaaggacatggacgcctcgtgggagtcgtggcctgcgggcaagcgctggtgggacgttgacgtggcgaagcagggcaacatggccgaggcggtctcccacaagggagagaacgacggcaaggagtccggcgagaagaccaccaccccgcccgagaaatggctgaccaacgaggccggcgacacggtgcgggacggcaacgactccatcgcgtccggctcgctgtacacggcgcacatcaaggcgcattccaacgcctccggcaagttctggatctacgacacgatcgacaccagggacgtggtgatcggcggcaccgacaaggacgacgtgagcaaggtgaccgtgaccgacgcgaacggcaacatcgtgccggcggacatttccatcgacgattccatcgatggcaagcgcgtggtcaaggcgcacgccaccgccccgcattccggcctctacacgctgaacgtgccacagtcggccaaacccaccggcggcgactacaagatcaacgacggttccgtggcgtgctggaacggcgacaacggcaccggcagcctggccgactgccagaccggcaacaacgacagcgtgggcaaggtcacgccgaccccggacaaggtgtgggtgctggacgagtccggcgctctcgtggccgaggacaagcaatggaccaaccagcagggcgtcgaccagaagacgttcctcgtgggcgaccaggtgggcgtggtcgtcaacggcagcatccccgcgcacctgctcaacccgctggcatcctattccatcaccgatgatctgaccggttcgaaccagtggatcgactggaagtccggcaaggtgttcgtcgacggcaaggacgagacctcgaacttcaccatcgcgatcgaccggaaggccgggaccgcgaccgccaccgcgaagtccgcctacatcgcgaagacgatgttcaggaacagcgcgagcaaggtcaggttctacctgacgggcaccatcaaaaagggtgccaccgagggcaagaagatccagctgaccaacaaggcgtacgagaagtggaacaacgagacggtgccgaccaacgagccgccggtgttcgtgtggacacccaaccccaacaaggcgtgggccatgaaggtcggcggcaagtggcggctgaccgtcgatccgaccaaaagcgacaaggtgggcggcgacgacaagtactaccgtctcggcgacgaggtggcggcggtcatctccggcaccctgcccaccggattgggccgcgtgcccgagatcgcgtggaccgacgacttcgccaacgtcgatagcatcctcgacctgaaggacacctccaacatcaaggtctacgagcaggacaccaccgacgaggccaacgccagcgtcaacgacctgaacaagaccggcaaggacgtgaccgaccagttcgacatcaccgccgagggcaccaaggtcacggtcagcgcgaaggactcctacgaggccgcgcagaaggacctgaagaccgcgaagcagatcagcgtcgtgatcccgttcgacgtgaacttcgacaccgtgaagctgctcgaatcctacggcaaggcggagggcgacgagctcaacacgtgcgcggacccgaagggcgacgacctcgacaacaagggcggccagacggtcggcggcagcacggtggacaccaacacgccgaagatctgcgtgaccgtgcccccgatccacaagcaggtcatcgccgaatcctcccagggcggcgaccagtccagcatcgacacccagaccgtgttccccggccagaccgtggaatacaccgtgcgcgtggacccgcagatccccgcggaccaggcatattcggtgaccgccatcaagctgagcgacacctattccgagtacaccaccgcgaacaagcagaccctggagatcaccgacctgggaaccggcggcatcatcccgaagagcgcctacaaggtgcagtgggacgaagccaaccactcgttcgaggccacgttcaccaaggactgggttgccgccaactggaaggccggctccaacccgcgcgtgctgctgcgcttcgaggccaaggtgaacgaggacgcgcccaccgacaagaccgtcggcaacaaggccgcgctgaccgtcaacaacggcgtcaccccgtccaacaaggtcgagaacgagccgccggtcatcaagccctccaagcaggacacgcagaaggacccgaccatcagcatcgacggcaagaccgcgctgctgggcgacaaggtgtactaccgcgtcaacatcgacgcctccaggctcaccgacaccgcctacaaggtatggcgactgggcatgacggacgactacgaccaggagtacctgaccctcgacgcgaagcacgtggagatccttgacgagaccggcagggaccgcaccggcgagttcaacatccaggacaaggacggcgtgctctacgccttcgccaggaccgttgacaccatgatccccgcgaccggcgagaccgtgcccggcgacccgcagcccgacgacctgaaggcctacggcgagaagaccgacaaggattacgatccgctgaaggacccgagcatcgaccagtcgctgctgggccacacctaccaggtggtcatgccgatgaccgtcaccaaggtcaaggacggccacacggtggagaacaccgccacgcaggtcacgaacgacaagcgcgacaagaccaacaccgtcaccaacccgctgaaggagatcaacccgaccaaggacgtgaccgtgaaggtcggcggcgacagcatcgacggcaagagcgtgtatttgaaccacacgttcctctaccgcctggattccagcatcctgcccccggaccgcgcctaccagaccgtcacggactggggcggcacggaccagctgaacaccgagtacgaccagtacctgggcaactgggccgtctacgccagccgcgacctgtacagggacggccagatgctcgcggccaggggcgagaagatcgcgggcagcggcttcgactcctcgaagttcggcggcaacctgttcaccgtggacgccgacgacaacggcaaggtcacggccgacgcgacccaggcctacctcgacctcgtgagcgccgacaacgagcacgaggccggctgggtgctctacctccagtgcaagcgcatcgccttggccgacgaggtgcccaacacgtggaccgagaccatcaacggccagccgcgcgaatccaacaaggtcgtcaccaagaccccggacatgaccccgagcatccacctggagaaggtcgataccccgaccctcaagcaggaaggccaggagcaggcggaccgcgacgacccgaagcaggcgctgaagatggacgccgacagcatcggcatcacgttcatcatcacgaacacctccaagaccgacccggccaccggtgacggcgcatggtacaaggcaagcgacctgaacctcgacgactccaccatcgtcggcgacgcgcacgtggacatggattcgctcacctatcccgccgactgggacaccctggtgctcaagccgggcgaatcggtcagcgtgaccggcacgctcaagggtgtcaaggaaggcgagacccacacggatcgcgccatcgtcaccggaaccccgctcgtggaatgcgcgccgtccaacggcgacccgttcaacgacaagaccgacggcggcgaagacaccgatccggaatactccaccggcgacgtgaccgagatcgacggcaagcagctgtgcgccgacacccagaccaccagcaacaccgacgactggaacggataccgtgccaagccgttggcctccaccggcacggccgtgctcggccttgccggcggcgctctggcggtgctgctcgcgggcggctccctgctcgtgttccgcaagcgccactacgcacagggttccggccgccacacggccgtgaacgcgggcgagtgaccccgtggcgttccggcctcgtcgtccgatgacggccgggacgccctccattgacttcacatgccggaaaggggcataaagctttccgaatcccgtgccccggacggcgtgtgaaccccaggcccttcgccagcctctcccccggcgaagggccttttccatgcccggaacccgtgaacccgtggaaccgtggagccgcagacccgtggaaccgtgctcccgatggggcctgtagacggtgcgccccgcagcggcccgcgacccggcgcatcatcgactctgacattgttcgcaccatcatcattcttctggaggttgcacatggctgacaggcaaaccgcattggccgtattcgattttctcgactcgctgcgcgccggacaataccgcatcggcgcggacgcggaaaaggaccatgccacggcgggactgctggcatcgctgtccggcgacacggggctgcgcgacgccgtgtgcgcgaagctgatatcgccgggcatggaacgcgcccgtttcctcatggtcgccgagcatgatccgcgcgccttgcccctgttcgcctcgggccaggtcaaaccgtggtaccaggccgactacaacgtgcgcgagatagccaacagcgagttccaccaggacatacccgcactgctgtggcggctgtccaacagcatcccggattccgcgcgaagggagggcatgcttgaggcggccgcgtacatgagcttcatgcagggcgatcccgaggccgcgttcaccggccatctgggccggctcgcggcggtttcacccgagggcgaggtcacgcgctgcctcatggacgcgcacgaacacggccagcatcccgcatgggtcatggaacagcggcagctgcgcgaacggcaggccgacgccgccgacggcatgaccgccaccgcaccggaccgcccgagcctccgccagcgcctcttcccgaaccgatgaacacctccggcacggacccatgggagatgggccccataatcgccgccggcaccgccgtcgccatcgacacggcacaggaaccggaaccggaacgccggccaccggccgaacccgaacccgagcccgggcccgggctggagccggatgcgcgatgcgtggacgacgccggaagcgaagaccgggcgaacccggccgtcgatccgtgggagatcggcccgctgccatcggcctcgaatccggtggggaatgatatcccggccgatgccccggcatcggaaccgcagcacgtcggcggtgccgtggagccggccgatctcgccgacacgatcgacctcacgccggtcggcgaccgggatgccgccatgcccgtgcgcgaatggaggcgcatggccacgaccgcgggcggcatcctgctcgcggcctgcgtcacggtcgccggcatgtccgcgtggagatcgcatgaatccgccacggccgcacgcgagctggaacaggcgacggcggactgcgccaccgcccacgctgcggcgaagaaagccgaacggaagctggtcgaatatctcgacggcgaccggctcgcacaggcgaaagcggtcacggccgacaagctcgccgacccggaaaccctggaaaccctcgacaagctggccgaacaatattccgagggcgagcgaatccccgcatgtgccgccacggacacggaaacggccaacgccaccacatccaagctgcaagccatcgaaaagaagcacacgggaaatctctcgcggctgaagaaggcggcgggcgcggtgttctcctcacggctggcccataccgtcgaacagggcgaacgattgtattcctcctccgaaggcaaggtgcaggacgaatattctcgcgccctgctgcgcgcctccatcgacaagcgcgacgagaaggccatcgccgacgccatggacaaggtgaacgcctccatcgacgcgaagaccaaggccgacgaggaaaggaaagcgcaggaggaggccgcagcggctgcggcgcaggcgcagagcacgccggcaccgcaacagtactcgtacacgccctccggctccgcttcgggcccgggttccggcccgtccggcggcggataccattcctccggcggttccgccggctcgaccggtggttccgcgtctccgggctggtcggtgcccgcgaacccggacccctcgcaactgcccggcaccgacccgagcctatgaaaggaccaacaccatgccacaactgaccacgttgatcccgtcgttcgcggcacccgtcaccgaccgcgtgtggctggtgggcgcgcacggcggtgccggatgcaccacgatccgccattcggatccggaacgtttcgccgacgccggccgcgcgctgccggtgagccaggatccctccatgccctcgcgcatcatcctgtgcgccatgggcacggggcgcggcctcgaatcgttgcgcgcgctgctcgccgaccagtcggccggactgttcggcgcatcgatcctgttgggcgcggccatcaccgaccccgtgccccgtatgccccggcctttggtggcggcgcgcatccaactgtcatccgccgtccgcgtgtggcggctgccccatatcaaagggcttgaactcgacgggtttccccggcgttatccggccgcgtactcacggctcgtgaaggacgtagacgccatgccccgcgccacggcccatgtcggctgacgatggtgcatgaacctaacacgaaaggaacaacccaatgctgcatgaaacatgcgtgatcctcgccgagaccctttccgacccgaccccgtgcctgcctccgggattctcgggcccggtatccaccgccctgggctgggtgaaggcgatgagcctggtgatcggcgtggtcgcgctggtgcgcatcggcgtgcacatcctgcgccagcagggcgacggcgtgccagaccgcgacgacaccttcgacaagctcgtcaactgggtgatcggcatcttcctcggtgcgggcgctgtcgccatcctcgccgcactcggcctgtccgtcaccgcaagctgctgagaaaaagccatgaaagggattcgacgcatacggcagcgcctgtgcgcgctgccgctcgccctcgcctgcctcatgggcctcgccgcctgcggcggacccgacttcggatcgttcagcaaggagctcacgttcggcgacaagcagatcagcgacacccagaccacctacgtgatgaagatacccgaaggcaagctcggcgacctgatcggccccagccagatccaatgggtcatcgaccagtacggcgacccgcccgcccataccggcgcggtcgcggtcggcaccaagcaggcggcgaaggatctgctgaggaagtctccggaactgcaatgcagggcattggagaacacgtatcaggaggagtcgtccgacgagggcaaatgggagtacaaggactcctcgtgccggaagcagcgcaagctctcctggctggagaagaccctgtggaacatgtaccaggtccaatcggattccacgatcgaatggctgtccaccagccgcaacacgctggtcgccgcgaacgacacggtatcaacgttgcaggcgaacgccaccccggactacgattcatggttcgcaccggtgaaccggtacctgcgcatcgcgcagggcgtgctcgtcgcagccgccgcgatcagcctgatcgtgctgagcgcgcgcatcgtgtggaacatcggccagggcggcgagggccgtctgctcgaccgcatcggctggatactgctcggcgtgctgctcggctcctcgtgcgcgagcatcgcgctcacgttcttctcccgctcgtccggcggcaatccgggcctgccgtcatggacgccgggcggcggcaccacgttcttcctgtcggactacatccgtatgcaggttgacccgttccttatcatcgcggccgtgtgcggcgtgatcgcggccggctggaagctcgtcacccaacaggagggccgtgacctgatcccgttgggcaaggcgttcatgtgggcgatcctgagcgccgtgtgccttgccggactggtcaacacgttccaggccacattcgacacgtggaccgccgacgtgctcaggtccgcctcgggcatgatgaacgacgcctgggaatcgaaaagcctggccgcgagctcgttcttcaatctcggcgcgcccgtcgccatcgtgctcaccatcgtgatgtggatctgcgggctgatcagcaagatattcgcctacttccgcgccgggatgctgccgatcctggtgggcgtggcacccatgtgggccgccatgagctggatggagaccggcaagcaggctttcgccaagaccatcggctggctggccgcgttcctggcctacaagcccgtcgccgcactggtcatggcgaccggctcggcgatcatggccacggccgggcccggcgacgacagccaggccatcacgctgatgctcaccctgagcgtcatcatcctccttcccgccatgatccgcgtgatcgtgcccgcagtgcaatcctcggtcggcggtggcggcggcggaatcctgccctccatactcggcatgggagtcgccgtggccggcggcggcctgcgcaaggccatgggcggcaagggcggcaggaaaggcggcgacagcggtggcggcgaagcgtcaccggacggtgccaaacccggtgccggccgaggtttggccggactgctttccggactcggccggggcgacggcaaaccacagggaacgaacggcggcggcaagcacgccaagccgctggaaggcaatcccacgggcggcgaaccacagaacaccggcgacaagccgcagggagcgaaccgcaagggcaacggcggcaaaccgcagggaacgaacggcaatggcacgggaagcccggttccaccggcacccgatggcgcatcccctgacccgtcaggcggcaacaggccgcagggaacgaacgatgccggcgggttcgcccgcgagggcgcaccggacggtgccgaccgctcgaccactcgcaagggcaagacattctgacgcatacgttttgttaaggagattcggataatcatggcgtcgaacacgacatacggcgattggatgcggccgatgccgggaggcatccgcaacatcggcatcccgctgacgatagcgggcatgggtgtgctgacctgcacgctgctggtcagcatggcgagcgtggtcgcggccatcgcgatcctcgtggtcggcatgggcgtcatcctcgtgttggccatccgcgaccgcgagcaccgcaacatggtggaccgcgccgtggagaaacgcacgtggatggccgcgcagcgtaccggcgctaacctgtaccgttccggcctgctcgcgccgatcgacggcggcaaggccatgctgccgggcatcctctcacgggtgggcctgacctccgccctggacgggctgggcggcgagttctgcctggtcaggcacgcgcacaccggcgaatactcgctgctcctgtcatgccagccgcagggcgcgagcctcgccgacgacgacgtggaggactcgtacgtggcctcgtgggccgggctcatggaatcgctcgcctccgagaccggcgtcacccaactggccgtgaccgtggacacggcacccgattccggcgtgaggttccgccgcacgttgagcagacgcatcgtcaaggacgctcccgagctggccgcgcgcgccatggcgcagatcatggaccagtacgcagccggcggcgcttccaacgacgtgacgctcaccttgactttccgctacaccgaccgtgacggcaaatacctggaggccggggaggccgcgcgtcgcataagcctgctgctgccctcgatccgcgagcagatagcgcaggcgggaggcggtgccgcgagggccctgggcatggaggagatcactcgcatggtccgcgtcgcctacgatccggccgcgcaggagaccatcgaggaatccgacgagcccccgtacatcgcatgggaggattgcgggccgctcatgcacgaggccggctggagccattattcgcacgattccgggctgagccgcacatgggagatggtggacccgccgcaaagcaacgtgaccgccgacacgctcacccgactgctcagcccattggcggactgcgaccgcaagcgcgtcaccgtgctctaccggatgctgccgcccgacaagaccatgttcatggccgaacagaacaggcagaaggcagccaaccaggtcagccaggagaaacgcgccacggtgaggtccatgagccagataggcaaggccaaccgccaggccgtcgaaacgaaccagggcgcggtcatggtgttcttcgggatgctcgtcaccgtcaccgtgtccaggggcgaacaggaaagccaacggctcgaagccgcgtcacgcgccgtggaacaggccgcaggcggcgcgaagatcgacctgcgcccctgctacggggcacaggacacgggattcgccgcaagcctgccccttggattgaacgtcagatcatacactccagccggccccctcggccggctcctatcctgaacggaggacacatgatgccgatgccatggaagccgtcgaaacgaaaaggaaccatgccaagcgccacggccacggaccccgtggcacgcatggaatccatgctgctcggtccgttgaaggccaaaccggacgagcccgtgcccccgatgccgtggcgggggaaacgctcgcgtggaggcggctatgcggccctgatgcccacgatagacgagttcttcggcacgtcgaaccaggtgtgcggcggattctggccgttcggcaccgacatggccctgccggccgagggggtgccggtcgggcgaagcctgatgacgggtgccggcgtgtgctgcgacccgatcagctggttcaaggccggcatcatcaaacagccctctatgttcctgctcggcctgccggccatcggcaagagcacgttcgtgcgccgcgaggtgctgggactgagcgccctgggcatgaacgcgatcatccccggcgatctgaagcccgactacgcctcactggtcaacatgctcggcggccaggtcatccggctgggagcgggcatcggcgtggtcaaccccctggaccccggcgacctccaccacgcactgcaacaactggagggcgaggcgcgcaaggacctgacggactactacaacgacacgagggcggcgctcatggaggtgcttttgacgatcatgcgcaccggccgcgagaacgacaccgatgccggtgccaggggcgtgaccgcacgcgaatccgatatcctttccgtcgccgtgcgcgtgctccacgaccggcatggcggcgacccgcagcctcccgtcatcgcggacctgcgagacctgctgagggaagggcccgacgaggtgcgcacggcggcggtctgggacgacccggaaaacgacgagctctacagggcgcaggttcgcggccttctggccgacctgcacgggttctcgaaccgcatgacgaagttcggccgtctgttcggcgaccagaccaccgcgcgcatcgacctgtccaggcccgtggacttcgacatcagcgccctggcccagtcgggcgacgacgtggtcgccgccgtgctggcgaccacatggacgagcgcgttcgccgcgaagaacgccgccgacgtgctcgccgaggagggattacagccccggcgcaaccacgtgatcatcatggacgagatgcaccgcgctttgcgcgccagccccctcatggtcgaaaagctcgacctgctcacccgtctgaacaggcagtggggcgtaggccagatcatgatcacacacacgttcaaggacctgatgtgcatggagaccccggcgcagaacaccaaggcgcgcggcttcgtggaacgcagcgagatcaaggtgctgggcgctttgagccgcatcgaggtggaccgctacctgcgcggcgaatgcggactgcccgtatcccggcgcgaggaggacatgctggaggattgggccacgcccgtcaacttcggctccgacgcctcgcacaagggtctgggccgtttcctgatcaaactgggaggactgcccggaatccccatcaacgtggagatgtgcccgctcgaaaaaagcgggttcaacgacaccaacctcaaatggcacgcctagaagggaaccccgcgatgacagaccacctcgccaccggcatgaaacgcatgatccgcaccgtggcacgctccgcatccctctccgaccggctcggcgagcgatcccggctgctgcggctgacgggcaaccgcagcactctcgacttccgccccgccgagcacggcgcatcctcatgggacttcgaaatgtcgataacccccaccgagcccaagccgtacggcaatgcggaaacccgtgaacccgtatggcgtgagacggtcgattccgccacctatggcgaatcgagggcgcgggtcgcgcacgccgtcgaaacgttcagaatatacgacaacaccggcatcctgccggaaacggaaaaccggtgaaaggaccacgatgaacgacgccgcactgctcgactcgctgcacgccgcgctgcgcaatcccgacctcgcatggtacacggaattccatgccggcgaatccatcgtcgccggctacctcgattccctgacggacccgtatgacgacgatgccatacaggttcccgagggctggttccgctactcggtcgtcacccgtgaaggcgaccacgcccttccatggatggagcactggaacgaatacgagtattcgatcacccatcacatcgattggaacggcaaagggttcacgccatacgacctgtactgcacacaggacctcaccggcatgatcgccgacggctcgctggcctcgatccgggaggacgcgcgaaccatattcaaggaccggcccctgacggacgactgccttttcgccaactccatctggcccgaaccggaactcctcggcctcgtggacgacctgaccggccgcacgggacgaaacctgtaagaaccctgtagacgccatgccccaccccgccatggccttggactgatgatcggggtcatggcgggaacagcgggttgccgccgaggattgtcaaggagccgaacatgcctttggagaacaccgatgccgaagagcggatcacacgggagacgatgatcggatggatcgagcattggggcgaatcgtatgacgacgtgcgacccgatgacggtgccatgcggctggcgaaccgcatcatcgaatacaacgcggcgactgaaaccatcgaggcgttgcggaaccccgatgccgtgtacgacgaactggcatccatcctccagccggtgctctcctcgatggacggcacctatttcgcgggctccgaatggttcgccggcgaagtggaccgcatggaagcggaccgcatcaacggggagcagccggaagaaacggacggcctggcctccgaagaaccccgcatcccgttcatcgtggagagcgaggccacagccgccgatacggacgaaccgccgttggacgagctgatcaccgcagccacgcacgaatatctggactcaggcatgacctacgacggattctcggaacatgtgcgcaccacctggcgcaacgcggcagcctacgactggtcgaagctcatggccgaacagcgctccacgggcgaatggtcgtccgacgcgaaccggctcgccgtattgggcgtgacgatgcagttcgcgcccgaatcaacatgcatgatgatcgccagcgacatactggccgagaacgctcccctatcccttccggcattgcgcgaacgcatcaacacgccggacggcatggtgaacaccgacctgctgttttcccggctgatcgacaacggcaccacgcccgatccggcgcgcatcgacatggcgatggggatcctcggcccgttggaggccaacgcgccgacggacgcctgctaccggatcatcggcctgaaggccatgctcagcctcgccatgggcgacggcgagaaggcgcgggaactcgccgaacaggccatcggctacgacgcctcggaccggttcgcgtcaagcgtgctcgaccgtctgccggaaaccgatcccgccatggaggcggcgaacgtgtgggagaacggcgggcatctgggccgctgacgggtggcgtagacgccgtgccccgcgatgccaccggtccggccggatgatgggagtcgccgccgccattgaaggcgctggtattccccgaatgaaaggaccatcatcatgccacagtcaatgcaagtggttcgcggtctcctcgccgcgaaccccgattactggccggcgaaaaccaacgcggacggcaccacgagctcggcgtacctgcgcgccaccgtgtatgaggaccgcccgcgagtccgtcagaaggacggcagctatacggacaatccgctcggcccggtgagaaccaccgtgaaattctggggccgggccgccgagctcctgcacggcatggatttccgccagggcgacgccgtggtggcgaccggccgcatgggcgatcccgacgccttcatcagccagaaggacggcaaggcatacgcgcgcccggtcgtgatcggcgattccatgcagatcgattccatcgtgtcccggcgcatccagctcgcccgcgaacgcaaacgccagaacaaggaacaggccggtgccgtggccgatgccgggcgaacggatccatggacggaccaggttgacgcctcgcgcggcgaatacgttggcgacggcgttccccgcactttcaacggcgagcccttcgaaccgctgtcgggctatccgacaccgggcgcggctcccgctccggcggaccctgcggcaccggatttcctttccaccccatccgatttcacgacgggcaacgcccgctagccatgacgcaagccctggcgcatcgacggcgggaccgcttccatcggttccgccgtcatgcttgaaaggagaaatgaatcttggccgacgtcgatccgaaactgcaatcgaaccgagtgaaggatctgggcggcacggtccgtcccagccgcaagatcgaactggcgatcatcgtcgcggtgtccctgatcctcacggtgttcgccctcgtgtgctcccatgcggggcatcccttccagatcttcgcgctcatgtacctggtctccggccaatggtcgctgaccgcaggccagtgggcgctggccgtggccgtgctcgtcgtactggccgtggcgtgcggcgtgggcgcgtggctgatcgccagcaaggccgtgccgtgggcaaccggcgccaaggcacgcacccgcgtggacgtgtacgcgcctgccatgggccatggcgaggccgtggagaaggtgacgcgccagcgcgccgaggccatggcgtcaaggctcatagaagcggaccactggcgcaagggcatgtcgccgggatatccgctggggctcaacatcgtggacaacacgtcgatgtacaccagctgggaggacatggctatcgttctggcgggccctcgttccggcaagtccctgtgctacgcgatcccggccgtgctctcggcaccgggcccgtgcctggcgacctcgaacaagggcgatatcctcgacgtgaccgccccgatccgcaggctcgaccatccgaacggcgaaatatggacgttcgaccccgaacgcatcgcggacccgaaccggaagagcgcgccgtgggtgtgggacctgatcgcctcggtgcagtccatcgccgacgcgaaacgcatcgccgactgctggcgttacgcctcgggccagccgcagaccggcggcgacgacttcttccccggcaccgccgcccagcagctcgccgactacctgttcgccgcgcatctgggaggccgttccgtgtccgacgtgttcaggtggtgctccaacgagcgcgacacgtcgccggccgacatcctgagcgaatacccgcgctacgcgggcatcgcctcgcgcgtgtccagcgtgatcgcgctgacgccggaaacccgaagcggcgtgttcggcagccttcagaccatggtcgcgttcctcgcggaccccgagatcatcgactggatcgacccgcaccgggatacgaatgggaacatcgacgagcggcgcggcctgttcgacccctacgagttcgccacgagcgaggacaccctgtacctgctttccgcccagggccgtccctccaccgcgttgaccgccagcctgacggcggtggtggcgttcaccgcgttccaacgcgcccaatccgagttcaccggcaacaaccgccgtctgccggtcccgttgtgctgcgtgctggacgaggccgcgaacatctgccgctggcccgaactggccgacgtgtactcgtatttcggttcggcgggcatcccgatcatgacgatctggcagaaccccgaccagggcagggccgcgttcggcgagacgaacttcggctcgctgttcaacaacgcgaacatcaccgtgtatctgggcggcatcaaggacgcgaagttcctcggcgagatcagccagctggtgggccagagggagatcgtgcgaggcagcgtcaacatcgacggcaccggccggcgcagcgtgaacaactcgatccagaaggagaacatcctcgacgtttccgacctgaccgaatggcccgtcggccgcgcgctgctgcttgcctcccaatcccgggcgcagatcgtcaagaccctgccatggacgggcaacaggcaatgggccgacgccctggcgcaggccaaggcgaaagcccgagaagagcagagaaaggccgcataatgagcgaacacacctcgaacaccacgtccggccctgatggggaggaatgggagcgcgcggtcggtgccgccaggaccctgctgtcatcggactgcggatggctggaactgttcacccgcgccatcctggaggagaagggcgtgccctacggcaagggactgcccaaccccgaagcgccgcacatccccgaggacaaggagatcgaggaggaaaccatgccgggccaaggcgagccgacgccgaccgcacccgaggtgccggcaggccggcacgcggcggaacccatccgatccgggattccggccgatgccggggaaaccggcaacggctacgagaacccgccggaagacgcaacggaccgtgacgacacccctccaaaggccggtgcggaggaatccgacacccgtataccgcccgcgcaggaggggaagacggatctcggccgagacgaatccggcgacctcgatcccgcgcgggcaagggacgtgtccggccagttcggcgcgcgaatgcggcgcagcgagacctactacccgaacctcgccgcgttcgtggaaaggttcgtggccaacgtgttctgctaccaccagagcgcgagcgtgaacatgcaatgggtgagcgactggtggcgctatccggcgctcgtgttcccgctcgacgccatgtggcgcgcctacgagaacgcgcgcaaggcacccggccagatgatgatcttctacatccaggcggcgtcgatgctcgaccgcgttttcgacaaggaccgtggcatcgtcgccagcctcgactgcaagcagaatctcaccaggaagggcgaaccgctgccctgcgaacgcccgaaccgggcatggcgcgaaccgatcctggaaacgttgtcggtccccgccgcaggcggcaaggaaaacaaggaaaccaccatcacgccaacaaggaggagaaacaatggctcaaactgatcccgaggacggcttcgaccagatcatggtccagagctggaacagcgtcgcccagcagctgcgcaccctgcacaacgagctgagcggcgaccgcgcgcgccgcagggaacgcgccgaacgcgccgtccagaacgaacgctacgagcagaccagacggcagcagcaatccatccgcctcgaacaatgggagatggacaacagggaacgcctcaacaaggggttcgagtccaccctgaacgcgaccgtgcttgccgacggcgacggctggaggaagatgcgcgactcgtccctcttgcaaggatggatggtcgccgaccaactggagggcaacgaccccggctaccgcaggcagatcatcgaggcgaaggcccggctgaaggacgaatggtcgaaacgccacccggaaacgcacatcgacgccgcagccgaccaattgaccaaccacgtgaacatcacctacaccgaccagtcgcccgcgttgcaggccaccctgaacgccttcaacacggccggcgtgcccgtggacctgcaacgggtggaggacacgcaggcgttccaggccgcgcacggcgacgacgccacgttcttcgtggactcgcggctcaccggccaatggacgggctacgaccacgacaggatcgttgacgccgtgatgtgcgcgccggtcaacggcgtggacgacgccgcctcccgaatcagcttcctcaaggaccagggcctgccggaatcctcgcacgcggacaacaaggccacaggagacgagcccagcaccataagcgaggtcgaacgcaccgagaacgctgacgccgcgccaatcgtcgaaacccccacacccgtgcgggagcatacgaagcccgccgccgatgaacgcaaaccggcatccggacccgagcccgagaccacgggaggcggcgacctgacgaccggggagcccgacggatacgaggaaacgcccctcgacctgaacgaacccgagtcctggtccgggcccgacccgttcggcgaatacagtcccgccacggaatcgtccatgaaccccacggaccagccgatacccgaccagaccaacatcccgacgccgcagatcctgcaacccgagaccaacggcaacgcacgctgacgccgacgccggcgcacccctttgccatgaggcgagcggggtgcgccggcatcggatggccgtatcatggtgtcaacggctttcggaaccggaaaggacgagcatggcacacgtgacgttggatctgtcgaaatatgatgccctgaccgcctacaagggtcttcccgacgagaaggaggagaacccggcgcggttcttccccgacaccacgtcggtccgccgttgcgtgcgcgaacgcatgtccgtcatgggtctcgacgccgccgaactcgccaggagagccggggtccccctctcaagcgccgaagagctcgtggagaccggtctgacctccatccgctacgtgtacaggatgttcgacctgctgcacatccgcaccgaaacgctgccgtccgcctacgcggggagactgctgtgagggaactgcacgcctgggagaacgggcatcatgtgggcgtgttctcggaagacgacgaggagcgcatatcgttcgcgtacgacgcgaacgagggtctgccgatcagtctgagcctgcccagaaccggcggatggagagaccaggcaccgcgtaacttcctggacaatctattgcccgacaatccgaacgtccgccaggccatgcgtgagcacctgaatgcctcctcggccggcgtcttcgatctgctggaccgggttgacgccaccggcggactggtgttctccctctccccggaacctccaatcccatcgccgacgcttcgtctgatctccgattcccagatagccaacgaaatcgaccgcatcgagcggaccaggaactactggtgggacgaggacagccactgccggttctccttgggaggggcgcagggcaagttcacactgtcccgcgtggacggcaagtggtattggccggatatgatgctgccctccacccacatcgtcaaaccgaagccccatgaccttcccgaggcgaccaaggtggaactggcgacgatgcgattgtcggaactgtgcggcatcgacacaccggcacgcggcgagatcacggcgcagcgcaagacggcctatatcgtggaacggttcgaccgtcgcctggaggaaggccgaatcgtccgactgcggcaagaggacttcctgcaagcgttgggattgccgacccgcgacaaatacgatccgtcggccgatgactgcctggatctcctgcaacgcatcgacgcgtcgggttccctgtcctaccggtggctcgaaaggctggccttcaacacgtcgtccgccaacagcgacgcacatgcgaagaactattccctgatcctcgatcccgcatcggggatacgcctgtctccccagtatgatgcggtcgccaccaggtattggcccgagttcaactgggaactcaccatgccgttgaacgaggatcacgccttcgcggagcacaccacgccccaggattgggaggatctggcgacacgtcacggtctcgatggttcgagggtggcggatatggcccggcgtatggcggggaaggtcctcgccggcatatccgaatcctgcgagggcctggacgcgcggatggccgatcgcctgaacgcgtgctggacgaaggcgaacgagtccatcgagccgatcatgccgggagacgagccggcgaactctcccgatccagcatcggctttgcccgattcgctcggttttccctcctcgggccgtaccatctgagctttttccgggaagcgtcctaacggcggggccggttctcctcgtcagaggcgaccatgctccatagaccgtattccggcgcgattccgtagcgttcgcgcagcatgtcgaacgtgtgcaggccctcgcgcatcgctgcccggtattcgtcgtcgtccgccgcgctgttgaggctggcggcgatggcgaacgcttcggatacgaggcgttccatgtcgtgcgtggacaggttctcggggtgtctttctcgtccgtcatcgaggaagggcgggcggttctccatcgcggcgcgccattcctggacggcgaggctgcggcttctggcatcgtccgcccagtcgtcgcgcagtcgtttcaatcgcatgtcgtcgccgagctcgaaggcgttgaaccgttccgtccacccgtccgtgctatgccacgtgatcctgtagccgaccacctggccggggtcggtgaacgagtctttggcggttcccctgcgcagcctggggtcgatggagaagccttccctgcgcacgcggcgtatgaactcgtcctcgctgcgcgatgccttggcgcacgcctccacgatccggccgacatgctggcgcggcatcgttgaggcggcgaccgccgtgacgagccggcttctctcgttgccgtccaacgcatcccatccctcgtcgtcgccgtactcgtttcgcgccttccattcggcccattgacgccattgcccgtactgccagctgacgcgcgtgccggtgtcggagcgtgcgagctcgaccagttcggggcgtgtcttctccatccgcctgcatgatttctgcgcgttgatccggtcgtggtacgggtttatccacccgtcgtcggcggcgagctgcaccatgatgtgcacgtggtcgttgccgttggcggacagtccgtggcggaccgcgagccatgtgacgccctgatcgtcgtcgccgtcgatgatgttcatgcgcgtcagataatcgcggatgatggcctcccattcctggtcggtcagtattccgtggccggccttgatggcgagcgagcagtgccacacgcgcttcctgccatgctctcgttcgggattgttcttgcctcgcatgtcgggcgggaacggatcgtccttgcgttccctgacgcggtagcgtcggtcgaacctgcggcctatctccgcatacgacgccgccggcttgccatccatgtcaaacgagggaaacatgtcgccgctcgcgcacacgagatgctggtcggtgtgttcattgcgccgtcccttgccgaacaggtagcgcaccaggccggccgggtccgaacccctgacgatattcggtatcatacgatgattctccgtccgcgcgcccggcacggcggcgcatggcgtctatgagagatatgcgtcctttgccggcacggccacttcgatagaattatcggaaacggacaaggagctttgatggaaccggtgaggaacgatacgacggcggataggcgcacggccgtggaactggcgaagcggctgctggtcgattcgatctggcgcaccgccaagatcgaggttgatggcgtcaccttccccgacacgcaggagatcttcgacgggcgcgcgcccgagggtatgagcgtggacgatatagtcacggtgaacaacatcaagcgcgcgtggaggttcctgctcgacaacatcgattatccagtcgattggcagtacatccgcgaatacaaccgcatcatcggcgaaggcctcgtgcgcgacgccggccgcttgcgtgaatacggcgtgaggatcggcggcacgggatgggtgccggagatccccaccgtcgaatcctcacaggaaagggttcgcggcatcctggaggagtcagaaggggaggacactgcgatgctgctgttcggcgcggtcacgcggggacaatggttttcggacggcaacaagcgcaccgcgctgatggtcgccaaccaccagctcatacacgacggcatcggcgtcttctcgatccctcccgaagacaaggcacagttcgtctctatgctcctgcgctactacgagacgggcgactactcccggctctccgattggctctcacagaacgccgtcggccatgtgcccggcgggctgactttggcccaatcgtctggggccgcggaaaagacgaatgatgccgcgaacgggatgggcatcgtgcccggtgttcccctcgatggcctcgatggaggttccggcttactgaggtgacggtcgtggcgtccgggggtgctcccgaactccatgggattatttacggtcggcttgcgtgatgatgacttcgagccggcctataacgatgtccctgatcgccgcgacggtgggcggattcagctggcacaagctcgcgtacggggcatggcgtcaatgggccgaatggaaggcgcgaaacgagtacggcgacg

SEQ ID NO: 897 - DNA, 127807 bp, Unknown
  gut microbiota DNA sequence
cctatctggtcgggtgactggcccacctacagcagcaattccgacaaatactatgtgattcttgccggtgagggcttcgactcgacggatgaggcttggaattggtgcaaagccaacaattacggtccgaacgactgcatgcctatagatttgcagtaacaagtggaatgtgaatgtcgctacgttgctgggtctcctgagttacaagacgtacaatcgggagcatggccaaggacgacgacagaaccaacaagcctgaagaggccggcaagtggggtacagccggaaaatcctcaggaaagaacaacaagaacggcaagggaaaggaatacaaaaccgatcgacggatcgacaaggtattacagctcgcggcggatcgcatagacaccatcgactccagtgccagcgtgcctgaacgactggcacgtgcggcgaaatccagtgaactgctcagcgccgtatggtcgttgccgcccgctcaacgtcttatgttccaccacggcatgcaggtcactgatgtcgaaggcgattccactcccggattcgacggcaataaagaggacgccgaggagttcatttcgatcagctcctccgaaatcgcccgataccagcggctcatgtacgcgaatggcgtcaaaggctcgacacggcggctgctcatcgtgctgcaaggcatggatgcctccggcaagggcggcatcgtgcgtcacgtgttcagccaaggtgacccgatgggcatccattaccatggcttcggcaagcctgcggccgaggagctcgaccacgacttcctctggcgcgtgaagcgtgaagtgcccaaggcggggtggattgccgtattcgaccgttcccattatgaagatgtggtcatgccgcacgtctatggcacctatcccgaagacgtatggcgtgcccgctacgaccagatcaacgatttcgaacgtgaactggccgccagcggatgcgccatcctcaagatcttcctcgtggtaagccaggaagaacagaaaaaacacttcctcgggagactggacgatcccaccaagttctggaaattcgacatctccgatctcgaggcccgcgaccgctgggatgagtatatggccgcatggcaggaggtgttcgagaaaaccagcacggccgccgcaccttggtacctcgtaccggccgataaccgctggtattcgcgagcagtggtctccgaactgctgcgcaccaccttgaagaacatgaacatgacctggccgcccctcgaacccgaggtggaccccgacgaggtgcgccgccggttggcgtgagcgatcctcccactggcggagccaagcgcatggcacggctcttcgcacggctccgcccgctggcgggaggcgtcgcatagcgacggagggtggctcgtgccgccggaataggccactgggtagactgagcattatgactgacgagaaggaatacggatccctggggcggctggcccccgaatgggacggtgacgagcgtgaacggaatcttacggccgatgacatctacgaacgattcttcggctgggtggaagacatcaaaggcatcgagccgtggccgcatcaggaagaggccattatggacctcttggccggcgaccatgtgattttgaataccccgaccggttcgggcaaatcgctggtggcgctcggcatgcacttcgccgccctatgcactggccgccgctcctattacaccgctccgatcaaggcgctggtgtcggagaaattcttcgacttggtcgaagtgttcggccgcgacaatgtcggcatgatcaccggtgacagccacatcaacgcggacgcgccgatcatctgctgcaccgccgaaatcctcgccaatcaggctttgcgcgaaggcacccatgccgatgtgggcctcgtggcgatggacgaattccattattacggtgatccggagcgcggctgggcgtggcaggtgccactgctcacgctgccgcagacccagttcctgctgatgagcgccacgctcggcaatgtggacgccatcgccgacaagctctccgatctgaacgacaccccggacgtggatgtaatcgccgacgcgccgcgaccggtgccgttgagctacgaatacacgctcgacccgatggaaaaaaccgtggaactcgccttccgcaacggcgaaaccccgatttacgtggtccacttttcgcaggacgccgcattggagaccgcgcaagcgctcgcctccaccggtgtatccagcaaggaacagcgccaagccatcgcagaagccatcaaaggcgtcaagttcaccacagccttcggcaagattctgcagcgactgctgcgcaccggtgtcggcatccatcatgccggcatgctgcctcgctaccgccgcctggtcgaacagctcgcccagcagggtctgctgccggtgatttgcggcaccgatacattgggcgtcggcatcaatgtgccgattcactccgtggtgctcacggccctgaccaagttcgacggcaccaagatgcgccgcctgcgcgcccgcgaattccaccagattgccggacgagctggccgtatgggattcgataccgagggactggtgatcgccgaggctcccgaatatgaaatcgaaaaccagaaagccatcgccaaggccgggggagatccgaagaaactcaagaaggtcaagcgcaagaaggcgccggaaggttttgtgacctggaaccagagcacgtttgataagctcatcgacgctgaaccggagaccctggtcccgcacctgaaaatcacgcattcgatggtgctcaatgaagtggcgcagggcggtgacgcccgtgcccgtatcgacgatctcatcgacgattccgcgcagacccccgaccagaaggagcatctgcaccagcgggccgacgagatcttccaaaccctgttcgataccgaagtcatcgaaaccgaggaccgcaaggacggcggcaaggactactacatgacccttgatatgccggacgacttcgccctcgaccagccgctctccccgttcctgctggccgcgctcgaactgctcgaccccgagtccgacacctatgcgctggacgtgatctccatggccgaggccacgctcgaagaccccaagcaggtgctgcgtgcccaggagcgtcaggcccgagacaaggcgatggccgatatgaaggccgacggactcgactatgacgagcgtatggataagctgcaggagattacgtatccgaagccactggaagacatgctcgaagccgcgttcgatcagtaccgccacgatgtgccgtgggccaacgactactggctgtcgccgaaatccgtggtgcgcgacatggtggaaaccgcctccgacttcaccggatacatcacccgatacaacatcgcccgctccgaaggcaccctgttgcgctacctctcggacgcctaccgcacgctggcgcgcaccgtgccgcccgaaaagcgtgacgagcaactcgaagacatcatctcgtggctgcgcgtgctcgtgcgctccatcgactcctcgctggtggacgaatgggagaacgccggtgactcggctgaccaatccgaggctgcggcatccctggccgcgcccggcgcaaaaagcgcggtggtcgaggaccgtcgtggtcttaccgtgctggtgcgcaatgccttgttccgccgtgtgcggcttatggaccttgaccagccggacaagctcggcgcgctcgacaaggactggggctacggcgtgcacgaatgggaagatgtgctcgacgactactacgacgagcacgagtacgtgggcatcggcgccgaagcgcgctcgcccgaactgttcatgttggatgacaagcacgagaacgacgagcatacgtggaaggtgcgtcagattatcgatgattccgatggcgaccacgactgggccatcgaaggcatcgtggacctcgacgccacccaagacaccggcgaagtagtcttccacgactacaaggtgagtaactgattcctttcttggctcccctctctgagggaagccagggtgcagctcgaacgtctgttcgaacactggggtactataggacgttatgagtgagaacgatttgtttggggcggctgatgcgccggagtcgatgacgcggccgttggcggtgcgcatgcgtccacgcactttggacgaggtgattggccaaacgcaggtgttgggccagggctcgccgctgcgccgcctcgccaatccggccagcaaaggcagtctcaccgcgccgagctccgtaatcctgttcggccctccaggcgtcggcaaaaccacgctcgccaccatcgtggccggccaatccggccgcgtgtttgaggaactctccgccgtgacatccggcgtcaaagacgtgcgcgacgtactcacccgcgctcacgaacggctcgtgtcacgcggccaggaaaccgtactgttcatcgacgaggtacatcgcttctccaaatcccagcaggatgcgctgcttcccgccgtcgaaaaccgcgacgtgacctttatcggcgccaccaccgagaacccgagcttttccatcatcaaaccgttgctctcccgttcggtggtcgtcaagcttgagtcattggagcctgatcagctcatcgaactggtgcagcgcgcgctgactgatgaccgcggtctcaggggcgaggtcaaagccacggacgaagccatcgccgacatcgtgcgcatggccggtggtgacgcacgcaagagtctcacgattctggaggccgcggctggcgcggtcactggcgacgaagcccgcaaaaagggcgcacgccgacccatcatcacccccgaaatcgtggctacggtaatggacaccgccaccgtgcgctacgacaaagacggcgatgaccattacgacgtgatttccgcattcatcaaatccatgcggggctccgatccggatgccgccatccattatctggcacgcatgctgaaagcgggtgaagatccgcgcttcatcgcccgtcgcatcatgatcgccgccagcgaggaagtcggcatggccgccccgcagattttgcaggtcaccgtggctgcggcgcaggccgtggcgctggtcggcatgcccgaggcacgtattattttggccgaagctacgattgccgtggccaccgcgcccaaatcaaacgccagctataacgccattaaccaggcgctcgcggacgtggatgccggcaagatcggcgctgttccgctgtatttgaggaacgcccccaccaagcttatgaaagagtggggcaaccacgagggctacaagtatgcgcacgattggcccggtgccgtggcgccacaggaatatatgcccgaagagctgcgtggcaccgagtactaccatcccaacgatcgcggctatgaacacgaagtcagccagcgtcttgccaagattcgcccgatgttgcatggcggggaacccgaacagaaatgaacataggggagtaaagtgtaacgcaacaataacagtgggaaagggaagacaaacaccatggcgaccatcttcatcgtggacgacgatcaggccatcggcgaaatgcttagtcttgttttggaaaacgagggattccagaccgtgacctgcctggacgggctgagggctgtggaaatgttccccatcgtcaagcccgatttgattctgcttgacgttatgctccccgggctggacggcacgggggtggcccgccgcatcagagctacctctaatgtgccgattatcatgctcaccgccaaatcagacacacttgacgtcgtggccggcttggaagccggggccgacgactacgtgcccaagcccttcaaagtggccgaattgctggcgcgtatccatgcacgcttccgcatcgccaagccggccgccgaagacggtgccaccggtggcgcaagcggtggcaatgcaaacgtcaaccatctggaacgcggatccatcgtcatcgaccgtttggaacacaccgccaccaaggatggcaaggacctgaatcttactccgatggaattcgagctgctgttcatgcttgcggccgccgccggcgaggccatcagtcgttccagcctgctcaagaatgtctggggatacgagaattccggcgatacgcgcctggtcaatgtgcatgttcaacgccttagggccaaagtggaggacgaccccgagaacccgcaaatcgtgcagaccgtacgcggtatcggctacaagttcgtcactcctgaacaatgaacctgcgccctcgattcagcctcaaacgcttgctgcgccacggacgcgctgaagttcgtcgctcactgcaggcccgcaccgtggccctcaccgtgattcttacactggccgtggccatcgtcttctctggcgtatcgatggtatcagtgcgcgcctcgctgcttacccaaatcacttcgcagtcgcgtgccgactattcaaacatggtgcagcaggcccaaaccagtctggacgcggccgatgtctccaccgcagtgcagatccaacagctggtcaatgacttggcgtcctcgttgcaatccgaggggccctccaacctgataggtgtgtatttgtggagtcgtgataccaactcgcgtgccatcatccccgtatccaccgaacccagctatcaaagtctgatttctgacgacatccgttcatccgtggcctccgacttggatgacagcgtgttctatcagccggtcgaaattcccggtgattccggcatgccgggcagcgggacgcccgcagcggtgctcggcaccgtattggactttggcgtggccggcaacctcgaattcttcgccatttattcgtacacgttccagcagcagtccttgacgcagattcagctcagtctggtggtcatctgtgcgttgctgtccatcgtggtgggcgtagtaatctggctggtgattcgtggcatcgtgcgcccgattgaacgagtggcagcggcctcggaaacactggcctccggcaatctcgatatgcgcgttaccgtggatcgtaaggatgagcttggtgtgctgcagcaatccttcaatacgatggctgatgcgctcaaccagaagatcgatgagctggaggaagcaagcgttttccagaaacgatttgtgtccgacgtcagtcatgaattgcgtaccccggtgaccaccatgcgtatggcttccgacctgctcgaaatgaaaaaagacggcttcgacccctccaccaagcgtacggtcgaactgttggccggccagatcagtcgattccaagacatgctcgccgatctgttggaaatctcccgctacgatgccggttatgcggcactcgaccttgtggaaaccgatttatgcgaaccaattgaaacggcagtggaccaagttgacggcatagcccaagccaaacgggtgccgattcacacgtatttgcccaatgtgcaggttttgactcgtatcgattcgcgtcgagtgattcgcatcgtcagaaatctgttggccaatgccgtcgatttcgctgaggaccggccgatcgaagtgcgcgtcgcggccaaccgcaaagccgtggccatcagcgttcgcgactatggcgttggtatcgacgaagacaaagtcgctcatgtattcgatcgattctggagaggcgacctttcacgttcacgcgttaccggcggcaccggattgggcctggccatcgccatgactgatgccttgctgcaccacggtagtatccgtgtacgttcggcagtgggggagggcacctggttcttggtattgctgccgcgtgaccccgaccaaggtgaggtggcggacgctgaactgccggtgaattttgcttctgaaacgccggatgacctgcgtgttaccggtgggtttggtgtggccaccagccaagtcacacatgattatcatgaggttcgccgcgacacgatgatggggaggccactatgagacgagtgaccagaacgattgccgccgcaggcgcggccatagcctgttgcatcacgatgacggcatgctcaagtccgttcggtttgccgattagcggctcggtgcagactctggcaccggtggaacagcagacccagcgtgtttacaccaatcctcaggggcctgcggacgatgcacagccggaaaccattgtcaaagggttctatgacgctatgcctgctggcgtgcagtccgatggctatcgcgtggctcgcgaattcctgactggctcggcttctgccgggtggaatggagattctgcggcactggtatacagcggcacccctgatttccgccgacgcgccaacaccataagcgcgccacaaggtgcggaaagctcactgattgtggaagtggaacttcaggtggtgggttccttggattcgcatggcgtatacacgccgtcaaacagcacccaaacgcgcaggcttccctatacgctgatgaagaaaagcggccaatggcgcatctcgtcattggaaagcggcgtggtgatttccaccgcagattttgaacaggtgttccgccaagtatccgtgtatcaggtgagtacttccggcaagcaacttatcccggatattcgttggttgagctggcgcaactggcgcacccaggcagtcggtgaagtgctctcggatgcaccctcctggttggaaggagtgctgcgaggcgccggcttgtctaccatcaaactcgcggtcgacagcgtgccggtgaagaacaatgtggtggagatacacctcaacagcggtatcaatgcgttgaacgaggaagaacgaggcctgctggtacatcgcatccgtctgactatgggcgacggcaatgccgaatacgcgctgaggattaccggcgatggagtggactattccgatgccgacgcaaatgtgaaacttactaccgagcagccgacagcgggcgtatacacgttgaccggtggtcatatcgtttccctggccagctccagtccgttgcgtgtaggggaggcccccggatatgacgatgctcggggcttcgttttttcctcatccggcggcgcggtgttgcgtgcggacggcgtggtcgaatgcctgaaatctgatggtgcgtcctgtggggtgatgttctccggcgagccgatgcgatcgattaccgaaggtctggatggcgaagtatgggctgtatccgagaacgggcgcgaattgcatgtgtcagatgggggcaaggaaaccgatctgaagcttgattggcttggtactgccgacagcattgtggcattggcggtttctccggaagggtgccgattggcgttggcagtcgagggcgaggacacgaacggcgtgatgatgaccggtgtggcgcgcaacggtgataaaacactgagcggtctgagcaaagcggccacccaagtgagtgtgctcagacacgtcaccatgctcacgttctacaacgatctgaatctggtgtacgccaccacacctcctgagggaaacagcgaacaacaagaggcatggcgtcaaatggcaccaggcccggccaatgcgcagcgtttacccaatggaatcataacgtcgatggcatcggggcagatcagcctgtcccgtcgcctggccattgtggacgatttgggtattgttcgctccgtttccggctcactcgacggttcctggaccatcgccgatagccaggtcactgccctcggtgcgcagtagatggtataagaaaaacggtgttcataataacctttcttgttgtatgaggcaacggctttgtcgctcggctggcgagcggcattgccgctgcgcaaccaatcactattattggtctgttatcaaggcaaaacagtgttgcgacgccatttttgaaccactgttattaatttgttataaacctgttatcaaactgttatcgcatgcgattgaacatttggcctgtgagcgtcatactagaggctgtcgatgacgaacagtcaccaaacaggatgaaagatcatcaaaaaaataaacactgctcgaggaggagtatttatgaagaattggaagaaggccattgccctcgttgcttctgctgctgcgcttgtcagcgttgccgcatgcggttccagcaacgcaggtggcagctcggactccggcaagaagacggttggcttcgtggctgtcggtcctgagggcggcttccgtaccgccaacgagaaggacattcagaaggcattcgaggatgccggctttgacctgacctactctccgacccagaacaacgatcagcagaagcagattcaggcgttcaacaagttcgttaacgacgaagtcgacgccatcatcctgtcctccaccgaggattccggttgggatgactccctgaagaaggccgctgaggctgagattccggtcttcaccgttgaccgtaacgtggacgtcaaggacgccgaggccaagaaggccatcgttgctcacatcggaccgtccaacgtctggtgcggcgagcaggctgccgagttcgtgaacaagaacttcccggatggcgccaacggcttcatcctcgaaggccctgccggcctgtccgtggtgaaggatcgtggcactggttgggacaacaaggttgcctccaacgtcaaggttcttgagtcccagtccgctaactggtccactgatgaggccaagaccgtgaccgctggtctgctcgacaagtacaagtccgacaacccgcagttcatcttcgctcagaacgacgagatgggcctcggtgccgctcaggctgttgacgccgccggcctcaagggcaaggtcaagatcatcaccatcgacggtaccaagaacgctctgcaggctcttgttgatggcgacctctcctacgtgatcgagtacaacccgatcttcggtaaggaaaccgctcaggccgtcaaggactatctggatggcaagaccgttgagaaggacatcgagatcgagtccaagaccttcgacgccgcctccgccaaggaagccctggacaacaacacccgcgcctactgataagtctgctgcgactcattgataactggaccaaataattgatgtgatggtgtgagaaggatgtcccttccacgccatcactcatgtgtggctcaaatatcacaaaacgataacatctcattctcgtttaaggcaaagacatgacagataaaaaccccatcgtcgtaatgaaaggcattacgattgaattcccgggcgtcaaggccttggatggtgttgatttgactctctacccgggtgaagttcacgccctgatgggtgagaacggtgcaggcaagtccaccatgattaaggctctgaccggtgtgtacaagatcaacgccggctccattatggtggacggcaagcctcagcagttcaacggcaccctcgacgcacaaaacgccggtatcgccaccgtgtatcaggaagtgaacctgtgcaccaacctttccgtcggtgagaacgtgatgctgggccacgaaaagcgcggccccttcggcatcgactggaagaagacccacgaggccgccaagaagtatttggcacagatgggcctcgaatccattgacccgcacactccgctgagctccatctccatcgctatgcagcagctggtcgccatcgcccgcgctatggttatcaacgccaaggtgctgattctcgatgagccgacctcttcgctggatgccaacgaggtcagggacctgttcgcgatcatgcgcaaggtgcgtgactcgggcgtggccatcctcttcgtctcccacttcctcgatcagatttatgagattaccgatcgtctgaccattctgcgtaacggccagttcatcaaggaggtcatgaccaaggacaccccgcgcgacgaactcatcggcatgatgattggtaagtccgccgccgagctgtcccagattggtgccaagaaggctcgccgtgaaatcacccctggcgagaagccgatcgtcgatgtcaagggcctcggcaagaagggcaccatcaacccggttgatgttgacatctacaagggtgaggtcgttggcttcgctggcctgctgggctccggtcgtaccgagcttggtcgactcctgtatggtgccgacaagccggattcgggtacctacacgctcaacggcaagaaggtcaacatctccgatccgtacacggctttgaagaacaaaatcgcgtactccaccgaaaaccgtcgtgatgagggcatcatcggcgacctgaccgtccgccagaacatccttatcgccctgcaggcaacgcgcggtatgttcaagccgattcccaagaaggaagcggacgccatcgttgacaagtacatgaaggaactcaacgttcgtcccgccgacccggatcgcccgatcaagaatctctccggcggcaaccagcagaaggtgctcattggccgttggctggccacgcaccccgagctgctgattctggacgagccgacccgtggtatcgatatcggtgccaaggctgaaattcagcaggtcgtgcttgacctggcttctcagggcatgggcgttgtcttcatctcctccgagcttgaagaggtcgtgcgtctgtccgacgacatcgaggttctcaaggaccgccacaagatcgcagaaatcgaaaacgacgacaccgtctctcaggcgaccatcgtcgaaaccatcgctaacaccaacgtaaacaccggaaaggaggcatgagatggctgaaaaggcaaaagccgagggcaacaactttgtcaagaagctgctgagcagcaacctgacctggtcgatcgtcgcattcattcttctggtcatcatctgcaccatcttccagcatgacttcctggctttgagctggaacagcaacaccggtggtctggccggcccgctgatcaccatgctccaggaatctgcccgatacctgatgattgcaaccggtatgaccttggttatctccaccgccggtatcgacctttcggtcggttccgttatggcagtggcaggtgccgccgccatgcagaccctgtccaatggcatgaacgtgtggctctccatcctcatcgccttggctgttggtctggccattggctgcgtcaacggcgctctggtttccttcctgggcctacagccgttcatcaccaccctgattatgatgctcgccggccgtggtatggccaaggtcatcacctccggtgagaacaccgacgcctccgcagttgctggcaacgaaccgctgaagtggttcgccaacggcttcattctgggcattcccgccaacttcgtcatcgccgttatcattgtgattctcgttggcctgctgtgccgcaagaccgctatgggcatgatgattgaggccgtgggcatcaaccaggaagcctcccgtatgaccggtatcaagccgaagaagatcctcttcctcgtctacgcgatttccggcttcctcgcggccatcgctggtctgttcgccaccgcatccgtgatgcgtgtcgacgtggttaagaccggtcaggacctcgaaatgtacgccattctggcagtcgtcatcggtggtacttcactgctgggtggtaagttctccctcgccggctctgctgtcggtgctgtaattatcgccatgatccgcaagaccatcatcaccttgggcgtcaacgccgaggcaactccggccttcttcgccgtcgttgtgattgtgatctgcgtgatgcaggctccgaagattcacaacctgagcgcgaatatgaaacgcaagcgcgcgctcaaggctcaagctaaggcggtggcagcatgacaacagctacggcaaacaaagtgaaggctcccaagaagggcttcaagctcgatcgtcagatgatcccgaccctcgcggccgtggtgatcttcatcctgatgatcatcatgggtcaggcgttgttcggcacctacattcgactgggcttcatctcctccctgttcattgaccacgcctacctgattattctggctgtggccatgaccctgccgattctgaccggtggtatcgatttgtctgtcggtgctatcgtggccatcaccgcagtcgtcggcctgaagctggcgaacgccggcgtgcccgccttcctggtcatgatcatcatgctgctcatcggcgctgtgttcggcctgctggccggcaccttgatcgaggaattcaacatgcagccgttcatcgcgaccctgtcgacgatgttcctggcccgtggtcttgcctccatcatctccaccgactcgctgaccttcccgcagggcaatgacttctcgttcatctccaacgtgatcaagatcatcgacaatccgaagatctccaacgatctgtccttcaacgtcggcgtgatcatcgcactggtggttgtggtcttcggctacgtcttcctgcaccatacccgcaccggacgcaccatctacgccatcggcggctcccgttcctccgcggaactcatgggtctgccggtcaagcgcacgcagtacatcatctacttgacctctgcgactctcgccgccctggcctcgatcgtgtacaccgcaaacatcggctctgccaagaacaccgtgggtgttggctgggagctcgacgccgttgcctccgtggtcatcggcggtacgatcatcaccggtggcttcggctacgtgctcggctccgtgctcggctctctggtccgctccatcctcgatccgctcacctctgacttcggtgtgccggccgaatggaccaccatcgttatcggtctcatgatcctcgtcttcgttgtgcttcagcgcgcggtgatggcggtcggcggagataaaaaatagcgggcttgcccgctcggtctccgcaccgaatacgacacacaccataactgaataggcgggattagcccggctgctgtgatggcaaggtcacagcagccggcactgcccgccaaagctttctttctccttttcttcctttcattagcgtgtggggcgtgccccggggttctcccggggcacgccccacacgtgtttggaaagctgggactctattgatgatcggatttatgcacgcttacgtgccgcgcgaatgcggaacgcggtggccagacagcaccagccaatcaggcagataaccgtcatcgtggcaaacgtccatgtgccgccgacggcagtggcgtgagcaaactcagcggtgccttcttctcctgcgccggcctgagccacggaaagaatcgtggagaacagtgcggtaccggcagcgccgccaaactgaagacacgtgttgaaaatggcgttgccgtccggcttgaactcgggagagacctccgacaggccactggtcatcacattcgcattgccgatggaatagaacagaccgaaaatgaaatagaatccggcgagcagcaagggcgtaagctgcatcgagaacaccagcataagcactgggcccaaaatagcgatgccgatcggaatcagaatcggcttgaccgcgccgaacttatcgtagaaccagccgccaagcggggcacagacagcgccgaccagtgctccgggcagtaccagagagccggccacaaatgccgtggtaccgagcgagagctgtgccacattggtgatgatatagccgtagccgatggcgaccaatggcagcagcagatatgcgcaggcgtgtaacagtacggcgggatccttgagaatgccaaggcgcagcagcggggagaaggcacgcttggaactcatggcgaacacgatcaacaaggcgaggcccgcaatcagactgacaatggcgataatgccggagcgtgtggctgacttgccggacaccgccgcactgatggccacgccaccttggttgagcgccagcaccagaccgaccaacgcgacaacaatggacccaagctgaatcgggtcaagataggcagcctcggtcggtgtcttctgctcaatgcacttcatgccgatgcatgctgcgattagcaccagcggaatggcgatgacgaaaatcgcgcgccacggcagcactgtggtcaccgcgccgccgacggtcgggccgatggccggagccacggtaatgaccagcgatcctacgcccatcaatcggccgattttcgaacgaggagactgctccaggatgatgttgatcatcaacggcgtggccacgcctgagccaatgccctgaataatgcgggcgacaatcagcagcgggaaggcttgggcgacgatcatgatcagcgagccaacgatggccagaatcacagccgcaagaaaaatggttttcagcgcgaatcggcgcttcaaaaacgagctgatgggcatggtagcggccaccgccaacagataaatcgtggtaatccattgcacagtggccgtgtcgacatggaattcgcgcatcagtgcggggaaaagcacggtcatcacggtttcggtcagaatgccaatgaaggcaagtgagccgacagccacaatcgcgccgataagacgtgtgggaatcttctcgttatcaatatgctgctcaggcatacatgctcctaaacgttcggttgcaaggtatggaatgtaaggtttaccaaccggcgtaggtacctgtgcgtgcggataaaccggcaatcgtactgccttggctgcacgctatggaatcacaaaaccacctgtgagtgtacggttcggggcggacgctacggtcgatgcgcaatgggttgtcccttggtttggtggggtttgatggggcggattcggcattggtccggtagcagttcggcattggttcagcatgaggaaaccgcgataatatctgccctgccgcctagtttggtgaaccatgggtattgagaacacgcataagctgattgtcaactgcctgccactcaacgaaggagaacggcgggctttcgccaaggcggctcgcgatgtgccgcaggaattcgtgggcgacgaagcgcaccgcggcgacatggtctggtcggccgctgttcccgaggagcttcgctcccgagctaccgcagtcatcggcaactttccggtctcgcaggcttcccaatacacccgtcttgaatggttgcagaccttcagcgccggtgtggatgcgtacatctgcccgggtgtgctgcctcgcggcaccatggtcaccaatgcgagcggcgcgtatggccaaagcgtgtcggaacacatgttcgccaccatgtgggcattgatgaagaacctcaaccggtatgcctccaatcagcgtgatcatcagtggcaggatgaaggaccggtattgagcccggaaggtggcatcgcgctgattatcggcgtcggtgacatcgggtcgcatttcgctcagcttgcccaatccgtaggtatgcgtactttcggcgtgcgccgtcatgcggacgtgccggccaagggcattgaaaagatgtatggcttcgagcggctggaggcgctgttgccattggcggacgtggtggcgatggcggtgccgcgctcgccgcagacccatcatctgctgaatgcggatcgtctgggtcgtctgaaatccacagccatcgtgattaatgccgggcgtggcgacgccatcgatcccgaggccttggctgacgccttgcgcaatggacggctccacggtgccggattggacgtcaccgagcctgagccgttgccggcggaaagtccgttgtgggatgagccgcattgcctgatcaccccgcatgtggccggcggcaatcatttggaaaagacttccgaacacatcatccgcatcgccctgaccaacgtttcccgctatgccaaacagcaggaactgttgaatctcgtgcgatactgattcgcctgtgtcgggcggcgggcggccatcgcctgacactgaatacagataaggggcgtataacaccgttgttatacgccccttatcgggcaaaccgaaaaagatggttgatagtcagtaccaatcagtactggttcgcgccgataccctcgaacttcacgttgaagccacgctggtaatgcaggaacatgctggcgccatagcggtcgaccggacggtgcgtgaacagcatacgaatggcgaatgcggtctgcacgtccttaggcagcgccaggaatgcttggtgggcgtcccagtacgggtcgtacaccacggcggcaccgggcacgtaggcgtaaccgtagccatcctcgttgacgtatcccatgaacggcagatcccaggcgttgtgtttggtgagttgtgccttgaagtcctcgacctcggccaacgccgcgtcgctcaggccgaagctcttggccacttcattggccttggttgttttcgaatccgggtccttgccgaacatatccgggttgacgatgatgacttttccctccgccataatgtgttcctttcagcatggcgttccccaagcaagcacctagggaagtactggcattgttcgattcacatatgaattgaacaacatgttaccttctctgtagaaaaggattgtgcactttgttgatgtgctggtttcaaagcctagcatgaaaaatggcggatataagccgttttgccggttattaatctattggtaatgcaattgggaagttatggtagtctgtgatgtctgatgttcatatcttgcaaaagtgaacatgattaatgtttgttttgagggtgaaagcaacaaagaaaacggccgtgtacatgaactcatgtacacggccggcgtgtcgcatcccgctgcgactgcggcatcgagatgatacctgcagaggcgtggttgatcaggggcccaatgaacgtggcccgaggttagtttcagtctgatagttcgtagccgttggcgtctttatgccacggtgagccgggcttgctgcacagaatgatgatgccttcaacaaagccccagatggcggctgcgattgggccaagtccgagcagaatccagccgacaagcgtcagcagcagctgggccacggccttgccggtgttgccgagatagaagttgtgcacaccaagtccgccgaggaagatgcccaacaggccggcagccagcttggacttggacgattgccccaccggggcggcggcatacggagcggcggtgtattgcggctgcgcgtaggcgttcggctgctggtaagcctgtccatagccgggctgctggccgtagcccgctgcgggctgtgcgggctggccgtactgcggctggccgtactgcggctggccgtactgaggctgagcgtatgcgccggcgggctggccgtattgcggttgctgctggccgtagcttccggcggcgggttgagcgtatgcggcgggctgtggggcgccatagccctgcggctgctgtgcggcatcttggccgtaagacggttgtgccggctgtgcgggctgtgccggctgcggaacactgtccgaaccgtacggttgttgttgattatcagtcatgcgggtcagtcccctctcaatcgggaacggcaataccttcttaccgtttctgcacaacatcatctcatgttttgcccaatagtaaaacctgccgcgctacgattgggccatgagaagtttcctgaccagctggttgattatgactatcgccgccgccgtcatggtcgcggtgactcccggcatgaccccggtgggggagcctccgattctcggcatcgccgcgttcgctttgttcatggcgctgattaatgcgtcaatcaagccgattgtgcatctgatcgcactgccgtttgcgattctgtctctcgggctggtcaccttgattatcaattggctgttcatgcgactcgccagctggctggcggtcagtctgttcggcgtgggcgtcttcgtacacggtttctggtggtcggtactggggtccttggtcctgaccattgttgcgggaatcgtcgggtccatcttggatcagtgacggtgctcgctgggcgaatatgagtaatggcggttggaatcggactgattccaaccgccattactcatatcaagctacgggatcgagcggggcgaacattactcgcgcaccaagcggatatgctccacatcgtcgcgccgggagcgacggaacagcacgaaacgattgccgatggactgcaccacttcggcgttcagctgctcggcaagctcggcggcggcttccttggcggtcaggccagaaccgtcctgcacggcgcacttgatgagctcgtgcttctcaatggtctcatcggcctgattgacggccgactcggtcaaatcgttcttgcccacatagaacaggggcttcagcgagttcgccatcgcgcgcagctgcttgatttgcttcttggtcaatgccatgggaatttccttacatctttcgtataaccacaccagcatagcaaccggtgctgtctgcgctgtttgccgccctacagcgcgatgatggccgcgatgtagatgatgacggcagcggcgaatatgagatctcgcgcggcgatggtcagggcacgccagtgggtgcggcggatgccctcctcgtagcagcgggcgtcaagtgcgaggctcaggttgtccgcgtgacgcaacgtgccggcgaaaatcggcacgataatcgcgctcatcgccttgatgcgctgggccagtgaaccggtttcgatggaaccgccacgcgcggattgggcgtcgacgatggcgcgggtttcgtcggtcagcgttggaatgaatcgcaatgccagactcatgaccagcgcgatttcttgggcatggataccgagccggttgagcggactgatcaaggtggcgaaggcgtcggtcatggcggtaggcgtggtggtagtgaggaacaccgcgcccagaatgattaccaatgcgaaacggcaggcgtacagcacggctatggtcacgccctgatcggtgatgcttagcgggccaagcgccaccaccggcgtgccggtgcgtaccacaaacagattgaccacgcccatcagcaccagcaggatcagaatcggatgaatggattcaagcacccgtaacgggttcaggcgtgccgccgcgataacggccagggtgatggcgatgcccagcgcgagctgggttggcgtgttcaccgcgaacatcgtgaacatggcggccaggaagcccaccatcttcacgcgcgggtcaagtcggtgtatcactgagtgcgcagggccgttggaggatacggccggctcggtgacggtggccgtgacggggccgccggatgcgggggcggcaatcggcatacggaccacgcggtcggcgatttgctcggcctcctcccggtcatgggtgatgatgagcacggtcacgccacgcgatttaagcgtgcgcaacagctcatggatacgcttcttggcttgggcgtccagactcgcggtcggctcgtccatgatgagcacgtcaggattgcaagccagcacgccggcaatggctgccaatcgttgttgcccgccggacaggtcgaagggggagcggtcggcaagatgcccgatatgcagcagttccagtgattcgcgcacgcggtcggctacctcggtctcgccaagcccttggttgcgtgggccgtacgccacgtcctcggctaccgtgtcagcgaacagctgatgctctggatgctgcatcacgtaacccacatgccggcgcaattgcgctaattgcttgcgattcgccgacttcgggcgcacgttgcgaccgcgcttgccggtcgaggccaccggaacaccggccacttcgatgctgccggcggtcggcgcagtcagtgcgcacaacatgcgcaccagcgtcgacttgcccgaaccattcacgcccatcagtgccacggtttcaccgcgcgcgatggtgaacgacaggtcatcgataaccgcccgtttggccgaaggatagcgataggtcagatgcgagacgcgaataatggggttcgtcatatcaccgatgccatcggagagcagcggcagttcggagccgtcttcgcgctcccgctggcgggggctgtcgttcgtagggcgactgggggcggcttctgtgccgatactaccctcagtctcgctttgcgagacagcctccgctagcggggatcgattatcgacggctgcagtgataccaatgattcgcccggcctccatgtgcacgatgcgatcggcatgaacggtttcatctggatgatgcgtgacatgcacaatagtggtgccgcgcgcctgcaaatcatccaaaatgcgcataacttcggcgcgtgcggattcgtccagcatggcggtcggctcatccaataccagcattgccgggttcatggccagcatgccggcgatggaggcgcgttgctgctgcccgccgctcatacgggtcgggtcggactggcgtaagttcgccaaccccacggcctgcaatgaatcaacgatacgctcgccgatgagctcgcgctccagcccgagattctccgggccaaaggccacgtcatcctccaacacggtggtgaccagctgatcctcgggattctggaacaccataccgatgccgtggcgggcagcacgataggcatcggcattcgggccggctgcgtacacgcgttgccccagtaacgtcacttcaccaccgtccggcgcggtcaatcccgcaatcagacgggctaacgtggatttgcccgacccgttcggaccgaccaagcataggcgctcgccggcatggaccgtgagtgaaacgccatccaaagcccatgaggtgccgcggtcatagctgaaacgaatgtccttgagcacggcggcgggggaggcaggctcggcggaagcgtgaggttcggcagaatcgtggaactcgtcggcgtcgaaggaatggggtgcaacggtcatgaaacagcaatccgtaactgataggcgaaaacgcagaatcccggcccgtgccgggattctgcgttctggttctttgagtggtctttgagtggtcgttagtcgtggcgggcatcggcccgtctcaggccagtcactgctgcttggacagcaggttggagatcggcttgtagatcaggaaggtgatcacggcgtgaatcgccatcttagccacgttgaacggcagcagaatcggcagaatcatcgcggccacagcttggtaggtcatgtgcgcgtaaatcggcgtgacaatcaggttgctcaccagcgccaccacgatggccagcaccgcacccaccagaatgccgatggcggcacccttgcgcgtacggatcttacggtagatgaacgcggccggcacagacaggaacagcgccaccagcacagccatcagcgaaccccacggattggcgaacatgtgcggcacaaagccgagcacagacacgattgcggcggcggccgggccatacgcaaagccggcaatcaggcagacgatgccggacgggtcgtacttcagccaagtgaccggcgtaatcgggaattcaatgaagctggtgaccatcgccagcgccacgaacagtgcatacatggcgatacggcgcgtggaccagcggccagaatcggccacaccagtggtgtgtgagccaagtttggcgctggtgctggcggtggacgtgctggccgaaccctcggcctcgggtgccacagaacgaacaacttgcatgcgaatacgcgaagatacactcataatgagccctcgtttcttccatccggactataccgttggctccggaatctcaccggatcagccgcttgcgcgggtcgcgggcttcctgccatccccgttatgaaacccggggtgcaggttaccgccagtaaggaattgcaccttccctgaaactgacaggcttattcatacgccatgcgccggacgtatgcaacccgcgtttcactgtgcagaaattcgtcttgtgccggtcaagtgcaacaatgggagccatggctgaagtgaagaaacccaacaacaccatcgacaagcttgccctgatcgtcaccacctacaaacgtcagcagttgcttgagacactgttcgattcgattctggcgcttgaacaggcaccgtggcgcattgtcatcgtggacaatgagcagtccgatcagacggcggacatggtcgctgcgtttgccggcaaggtgaccggccaatggggcaccaccgtggccgaccagtccggtaacgaagaacgtgtggtctatgcgccgcagaccgagaacctgggtggtgcgggcggtttctccgccggcgtggccaaagcctacgagctgggtgccgcatggttctgggtgatggatgacgatgtggccgtgctgccggacgccattgccaagctgtccaagtggaccgacaagcacgaggtgattcagggctcccgattcgactacgatggcggcccgttctactggcagtacgacttcattgtgccgctgggcatcccgaacccgattgcgcccgccgcattcggcccggccggataccgagtgatggacacgctgtgcttcgaaggcggcctgttcaaccgccgtgtggttacggaaatcggtctgccggacccgcgcttcttcatctactgggatgacacgatgtatggctaccgcgccagcaaggtcaccaacccgattgtggtgcccgacgtgatcctgcgccgtacgcgcgaaatcggcaattgggatatcgccggcgtgcgccagctcaactccacatccgacatgaaccggtatcacatcatgcgcaaccgcggatacatggcccggtacttcatgacctatggtgacttccgtccgctggtgtttggactgggtaccgtgctcaccgcggccaaggaagtcattcgcctggtgatggtggatcgcgagcacctcaagaccggtttggtacagattgccaagggctggtgggactcgcgcaagctgatgcacgaccccacctggaagctcatgccgtcgctgaagtagccgtagtagtggctcccctctatgaggggggtcactacaggttacttatggatgaacaggccaccgtcgccccaagcccactggccttggccggcaccgatctggaagtgcagcttggcgatgcccatgtcattgaacgcgtgatgctcatcttccgcactctgatcgatatgcgcggcggcggtatcgtcggccggattatacgagaaggtgattggctgacggttcatcgcgctcggcgccttcatcgcagcctcgacgccggacttgaaccaatccggagcggcctcgcgcccctcatcgctcattgtggcggtgaactgctcataggtcttggtggcgcggtgcgtgcgttgcgcttcgcatagctcctcataggatttcgcctgataatccagatgattcttcggatgcccgatcaccacaccgagatacagctcctggccagaggtgacgcggcaatgcttggccgcctccgccttgtcccatgagccggcgacccataaggtgccgaggccgcgcaacgtggccgtgagcaccatgcgttcggcatagaagccggcacgctctttggcttcctcatcgttcgcggggccgacgatggccagataattcgccgcattggtcagatgacctgaagcattggcttcggcgaacaccttgggctggtcgcgcaccagctgaatgttgagatcgccgagtaagttgatcggctgaagcgccatctcgagctggcgggccgtatcgtcgtcgatcggctcatcatcgtaggcgcgtacggcggtgcggatgttaattgcatcaataagttgggtatgttctgccatacctcccattatcgcgcgcgacacagagtcaggccaccatagacgccgatttttcctagtatgcgaaatcgcatgcattgcccattgtcaggcttgaaaaacgatacgaatagggtacgtagtgaccggcgacgatgcacacgtttgcacaattggtgtgtaatggtttcgtgttgagcgtaattcgcgttaaactgggcgcaaccttacgaactgatgaaaacgtatggaaaggaaggtcaacgatgattgaaactgcacaggctttcggtgttgacattggcggttccggcatcaaggccgcacctgtcgatctgaccaagggcgatttcgccgagccacgattgaagattctcactcccgaggtctccactcctcaggccgtggccaaaatcgtcaagcagcagctcgaccacttcgaagtgcctgaatccgcacccgttggcatcgctttccccgcgccgatcaagcccggccagaagctcgacttcatggccaaccttgaccagtcttggattggcgtggacgttactgaagtgttctccgaagcctgcggccgcccggtcgtcgtggtaaacgacgccgacgccgccggcctggccgaagtccagttcggtgccgccaagggccaggatggtctggtcatcgccaccacactgggcaccggcatcggcaccgccttgatttacaacggcgtgctcatcccgaacaccgaactcggacacatcatcctgagcgccaagcatctggacgccgagaagtatgcctcctccgcgattcgcgagaatgaggaactgggctacaagaagtgggccaagcgtctgaccaagtactacggccttatggagaagtacttcaacccggacctgttcaccgtcggcggcggcgtgagccgtcagagcgaaaagttcctgccgtacgtggatatcaagaccccgatcgtgcccgccaagctgcgtaaccaggccggcatcgtcggtgccgcctactatgccagcaccaagcagcagtgagccagtgagcgtgggtgtgcagcgctgacccgcgaatatgcttcaggccgtccgactagtcgggcggccttttgcattgcataggaaaggtatgcgacgcgttcccgggaatgttgcgcaaagtgggcgtgtgtatggaggtctgtggcgacgcgttcccgggaatgttgcgcgtttgagagcggggcagggggcaccacgctctatcgtgggagggtatgagcgtgcatttctcttctcgtgtggatatttctgcgccgaatcccattgcggcggccgaggcggcagccaaggcaaacggcatcgcactcagcaaactcaacgattccaatccgacccgccacgggctggcacctgaattggcgccgagcgtgtatacggccgacccgcgtggaccgcgtgcggcgcgagaagcattggccgcattcctcaatacggcaaaggcggtagacgcaagcagccctcagtcgacttcgcccgccgccagcgagggcgggaacgagcgccatgccgctttcaacaatgcgaataccgccatcgagggcgttgacccggacgccctgtacttgctgagctccacgtccgaggcgtattcgtggctgattaagttactttgcgatgccggcgacgcggtgctggcacccaaacccggctatccgctgattgagtcgattgcacggcttgaatgcgttgacacggtcgaataccagttgcaattcgacggctcctggttcatcgacatcgccgaactcgagcggctgctcagcgagcccggtggcgaacgcatcagagcattggtgctcatcaacccgaacaatccgaccggttcgtacgtaaaaccaaccgagcgtgcacgtatcgtgacattgtgccgtgagcatggcatcgcccttatcgccgatgaagtgttcttcgattactctctcgaacctttccccggcaacgcacggctcgcgggggagcgcggcgtgctcaccttcgccctagacggattctccaaaatgctggccgcgccgcacgccaaagtcgggtggattcaggtgtccggacctgccgaggacgttgccgaggcacagcgtcgactggacgtcatcgccgatgattatctgccgatgagtgacatcatcgccgaacggattcccgcattattgaacgccgcgcccgcacagaccagacgggtgggggagcgcgtgcgcaataacctggccaagttgcacgagttgcttgacgccgatcccaacgggctggtcagcgtgctacgggccgaaggcggctggaacgtgctgctacgagtgccttcagtcatcgatgagaacgagctggtgctgcggttgattgacgagcacaaactgaccggacagcccggctacttcttcgacatgacttccaatggatacctggccgtttccctgctacccgaaccggacgaattcgagcgtggcatccgcgccgtgctcaataccgtcgccgctttgctgcgataggccggtgtttgccggcaccacgcctgtactccacgtacaatagcggcatgggattcttgtttagaccgaaagaactgccacgcccggcgtcgctgacgttcactttggatcaggccgggcatacgtatgatgatgggcacgtgggacttgctcccacggacatcaccatcagcgagctgcgggtggctgtgatcggactgaacggcgcaggcaaatccacattgctgggtctgctggacggttcgttgaaggccaacgccggcacggtgaccattgcgggcggtgaggaacgtcttgacccggctgtgaagaaggacgcgaagcgcatcgataatctggtcggcaaagttcgccgcgaggagattccgaacagcttttaccaagcggcgaatatttccgaggctgtttccgaagcgctgaaaaagcacaaggtgcccgagtcagaacgtcatgcgcgcatcggcaatctgttcgcgcattttgatttggcgcaggtctccaaggccaaggccagcgaactggactccgagaaacggcacctgctggctattgcggccgcgctgagctttgagccgagtgcgattgtggcggatgagccgagcaagggattggatgagattggcgccgcgcatgtggccaaggcgttgttcagctacaacaagcaggtgattttcgccacgcatgacacggatatgatccgccggcccgaatacgccatcgaccgcgtactggtgctggacgagcacgcggtcgcgtttgacggagcgccggctgaggctgtggcgttttatgaggatctgattcgccgcaagtatgaggctgcgaagcggtagcagataggaatcggccgttggaggattggcatcggccgtgaggtcgatgccaatcctcacgcgaagtagaagccgcggaagccgtactggtagacgcggtagatgtatcccgaactgagcaccatcttgtactgtgccttgaggttgccgtcggtgtcggtgatggtcagggtaatggtgttcttgaccttggggatcagtcccaacaccagaaactcgtgctcggtggaggcgatgtcattgctcgataccgtggtcgtctgactcgccgtgctggtaccgccgacattgccggaaccgtcggcgtcgccggcggcggcctcacggtatgcggcggccgcctcatcgctggtgatggcgttggccgtgtaatccgggtacccctcagcggaaacggtgtagctggaagacgcgactacggacggcagtggacacggggaaaccctcacgacagtatgggtaaacgattagtgaattacgtcacatacattatgccgcaggtcttggaaaacaccggccggaatgctgggagaatactgaagcttggcgggtcgccgagcggtccggtcctatagcagggtgaaccaagactgaacctgatgccagagcgtcggattgttggcgatcatcgaatcgctgcgcgactgcacgaagcaacttagtatggctatgcccagcgcccacaatacggccagcatcacgacccagcgcatcagccaacgccacggagtgacgcgggcgatgccatcgcctgaagcggcgtcgttggcccccgccaatgagcggctcggttcgcgcccattgaccagccacagtagccccggtatggacgccagcgagatcagccagccgaaatcggcggaataccgccatcccaaaccgccgacgcggctgtcgaatacgaccagcaccgccgccacggccaagcaagacatcagccatggccgcatgccgtgtgtttccaatctgcgcagcaggggcagcgccaaagccatcaaggtcagtggcgtggccgtgaaaatcgcgccgaccatcacctcgtaataaccccattgcggcatcggggcgggagagcccgccagccacgggaaacgatccatgaagcgcagcggcaggaacaggtaataccagatgttggcgggcatatccgcggacggggtggtataccgggtcatatcggatatggagaactgatacgcattgccgaaattgaacggggaatcgaaccgaaccatgttccacgccatcagaggcgtcacgacgagaatggcgggaatgattaccgccagcggcgcgcgcaacgcctgcaacggcttgatgcggcgtgtgcgcagaccggtgcccagcgcgcgaatctgcggccagaacagggggaacgcaagcaatgcggccaaggtgaacgtcggtcggcatccgaaattcgccgcaatgcacaaggcgcccaaggccagtcgtggcagggagagaggcttggcatcgcccgcctgccatcggtccgatggtctcagcggacggcgggacgtgtccgcgccgagccatagccatagtcccagcgacgtcaacgtcagcgatgcggcgaacggtatctgatagaagttcgtgcgatacagcaaataccccatttgcgcgctcaccaacgatgagaccactactaacgacgcggccgccaccgaagtcttcggcatcacacgatggatgacgcgcagcaccagcaaggagaagaagatgatgaacagcagcacgagaatatactcggcggcggatgtcggcagattatgaccggccagcagacgataggggacgaacagcagcactgcgggcaacacgccaaaataggaataccagtgaccgtcataatacgcgtaatcccagtagagcggactggctccattggcgagtagctgggcacgtgtggctacgtcataggggtgctcggtggcggccagctgttcgggaaccggcaagtcgagccagggccggccggcgaccagcgcatcggccacatgcccatactggtcgaaatcataggtgtaatcgccggaaacgtggaagacgagcgaagacgtgtaccacagttcgtggatgatggatacgccgataagcagggtaggaatcgccagaagccccacgaaagcaagtcgttgccgagtgctggacgggtcaagcgtgatacgccacaggcgcgatcccggcctccagacggcaatcatcagcaacaccaaggccatggcgagcacgcgcatccaattgatgacgaacggtacgcgcacgttggcgcgggcgtcggtgaccggtacgatcgcgccgcgctcttcctgaatccaaatacgcacgatgccggcacccggcgccttgacataatggctgcgaatagcgtcgggattcatcgactgggccttgccggtgatgccatcgacatccgcgcgcacatgaatggtcgccagcggtttgaagacttccttatcgtcgttcgctttggattcggcctcggcctgctcgcgggccttatcgatgaccttgctgctctcggtatcgatgcgtaggtaatccgacgtgccgtccgcggtcagttcaagataggccttggtcggatcggtgacggtcaacatgccatcattccggcgcgtgagacccgaacccagcgtgttatgcacggcgttcgtatccgtgctcgctccgagcgtacgccagaacggcaggttgaacacgatgcactccatggcggcgatggcggcgacggcggccagcaaggcgatcagcaggcgcaccaaacgcagccggtgccgggtatccgggcggctgggcaggtgccgttcatgattcgacggcatcggacggtctgcgcgagtgtggtctatggaatgcacgcatttattctataggctttattcgggcttgatgtcgggcaaacaagagacaatgtgaatcatgccaaaacgtacatcggaccatgggaagcacaaccgcacgccactgctgggcgggctgaaggattcgatgaacgcgctcgcggccgatctgggactgtccaagccgaagaagcacgatacgaatccgttcggcgatgccttgcgggagaccagtgagcgtaaaggcggcattatcgacgaactgactcgccatgcagtggcgctgagtcctgtaatcaagcggcgcaccttccccgaattggagaacgtgccggaagggctggtgcttggatgggcgcagctgccctccaccagaggccgtggcttttcgcttggcattttccccgaccgcgatcattttgcgcaggtggcgttcgccgatacgcatggccgcgtattcgtgggcaccgaccccaacatggacgtgcaggatatgcaggcgcgattcatgttcggcaaggaaaaggaagtgactctgccggacggtgagcggctgggcgaaagcgacgagccgcgttcacgttccggtttctcccgtgcaggccatggcctgggaagtgcgctgcatcatgggcgtggtttggggcgtggccttggtcatggtgctgacggcgtgaaggccattaccggtggcgtggtggggcgtgacgacaccggacgcatgacgtggctcgcctcatggctcaaggccggcaaccggtacacgcttgagcagatgcgtgccaatctgccgcctgtgatgcgtcatgatttggaataccgcgatgccattaccatcgcgttcttcgccacgtatatgttgccgcagatcaatggtctgctcatcggattcggttccggcaatatcttccgccgtctcaaccgtgaggcgccaatcggtgcgattcgccgttcggtgcgtgacactttggcggcacgagcccacggcatgcgggcctccggtctggaggatcacttcgccgatctgatgcgcgaagccggcgccctcgacaccacgccgggactggaagcggtgcatggcgccgaaccgttgcacctgtacacctcgacgtattcgagcggctatttctttacgtgggataagtccttggcattcgggcaggcgctgaaatccttgaagatcgaaggcaacctcaaccgattcgctgcggtgagcgcttggctggagcgcaacgcttccttggggcgcaaccctacggaagatacggtgacccgtgccgaggccgcgcaaatcgacatgaaactcatcgaaaaccctgcgattatggcgcttgacccgtatgatggcgagcaggagcgtcgggccgtgctgagcctggtcgatatcgccgcacgcacggctggacagattcgcagtgaattccccgatcctcgagatgtgctgacccagcagaacgtgccggattcgggtgtgacgaatgctgcgagcgctgaaagtactgagagtgctgagggcgctgtagaacggaccgataagagcgacaccaacactcaagccgctcgtccttcgtattcgccggcgaggagcgacgaatgggtgtatcgtcagaccctctcttcactgttgcgccggttacggttgccgtatcggtttgacgtggagttccggtcgcgcttggattcgggtgaagtggccattggcttcaccaccgccggcacctcgatgatgcccgatagccggtatgacaccactcgacgtacgtggcgtgcgctgagtagcgccgaacgcgcgtcaatgagcgccgcctacaacctgcgtgtcggcctgatgatggccgcgctaagtttcggcaccagcgaatccgtgcgccaggtgtcgttgcacatcgattccattggtcttgaagaggcgattgccgaacaggattccgccatcgaggcgatgatgagcgaggccctaagcgccttcgaacatctacgcagtggcgatttggggcgtgtgggttccaaagccgaccccaaagatggtgatttccatggcgacccgacccgccccatcacccatgaggagacgttcgggcagacggcgtccggtgacgaacgcggcacggccgggggagcaggcaacggtaccggaccgtctgcggatgctacggatcaggccgcggccgaatctgctgacgccgatggcgctgcgtccatcgattcgcagttcgaagacctgatgaagggcatcgatatcgacgaaatggcgttcggcatgccggacgatactggcgcaggcgacgacctgggcggtatcggcggcgagggcgtcggcactgacggtgctgatggggccgccggcatggacgatgatccgatgagtgtgctgcgccgcaatcccaccgtgcgcaatatggtcaccgtcaccttcacccgtgatgccttcctcaagcgactggacaccgctgggcttgacaatcccgaggaaacctaccgcatgttcggtgccgtgatggacgtggacggcgaaggtggtctgaaacccatcagcgccgacttcgacttggcggacagccggttctctcccaccggatcccaggaggagcccgaactggccgaccgtcaattcagtccggcgaccgctcacgtgctgggcgcacagaatagtgccggactggctatccagcgagtggacctgctgcagcatggcgtcaacgaattccacgatatcgccaggaacacgtcgctcggctccgtggaaaaggcccagcgagccatgcaggtcatcgaatcgatatgcgatcccgaactgaccggtttggcctctcaggtcaccagtgcgttgatcgatggcaaggacacgccggacttcacgttcacgcttgccgacgatcttgacaaggagcgtctgcgcgcccgagatatgctgttctcgggccaagccgatcaggccatcgaagcggccgaagcggccgtggcccatttggaccaggtgtatgcggcaggccatggcgtacctcgatacttcaactcctatgccgagcgcgtggtctacaaccggctgttcgccacattggacgagcgtacggtgcttatcccggacaatctgttctacgcgcacatggagctggctgacgtgttgagtcagatcaagggtgccgaggcggccatcccgcatctcaaccgtatggtggcgtacgcgcccgcctacccgctctcacatctgaagctcgccattcaactggcccgcaatgaggattgggattcggcacgcgccgcctgcctgaatgctctgcgcgtggccttggaccgcgacgatgccgcgttcgcctattaccggttcgcgtacgccgaatggatgcttgaccggttcgacacagccgccgcagcctacattatgagcgatcacatcgctcccggggccattggttcgctggaaagcgaactgcaggaactggtttcccgtgcggactcgcagtgcataccggtgcctgaatcggtggaggccgccgcccatgtgcttgccacgcatgatctgccggtctggccgcatatcgaagtggctgacatcgtgcgtgacgccgctcgcgtgtgcgtggatgaggacatgttcgtgccggcccgcacgctctcggtggctgtggcccgcatgaatgacggcgaaggcgataacatcgacatcatccaagcccagttcctgcgctcgctatccgcgtagccgcctgaggggagttgacggtatagccggccgaggggagccgagcccgctaggatagacaaccatgagcacgaacgaacaactggcatgggatttcgacgatggggatgtggccgaggtccggcctgataccggtattgcacgttttgcccctggctccgaacaatggatagccgcactgcagcccactgacgacgacgcgatacgcctcgaccgtttcgacgtgaacacgatgaccgctgaggccgccgcccgcctgtgggctcgcgtggccgcatgggtggaatccgatcagatcgcctactacatcgacgactcacccgtcagctccgacgccgcctacgacgcgcgcatgcgttgcctcgaacgactcgaagcggcgttcccctcactggacaatccgcagtcgcccacccatcgcgtcggcggctccttctccaacgacttcgcctccgtgcgccaccccagccgcatgatgagccttgacgacgtcttctccatcgaagaactcaaggattggtacgactcggtgattcgcgacctcgattggcctgaatccaagcccctgcccatgagttgcgaggtcaaaatcgacggcctcgccctgaacctcatctatcgcaacggcgtgcttgaacagggactgacgcgcggcgacggcgttacaggcgaagacatcaccctgaatgtgcgaaccatcggctccattcccgcaaacctcggcggccccaaggaagacgttccggacttcgtggaaatccgaggcgaagtgttcatgcgttgggatgatttccacaccctgaacaacgagcaggaggacgccggacgagcgcccttcgccaacccacgcaacgccgccgccggctcgctgcgtcaaaaagaccctcgcatcaccgccacccgtcgcctgagcttctatgcgcatggtctggggcagctcacttgggggccggaccatccgcgcggcacccatgatgtggtcgccgaccagtcgcaggcctacgatctatacaccaagtggggcgtgccggtctccccgcacaatcgtgcggtgacctcattccaggagatcctggacatgatcgagtactacggcgagcatcgtggcgacatcgagcatgcacttgacggcatcgtcgtcaaggtcgatgacctgggcctgcagcgtaccctcggcgccacttcgcgcgcgccgcgctgggccatcgcctacaaatacccgcccgaagaggtcaacaccgaactgctcaacatcaccgtgcaggtggggcgtaccggccgtgtgacgccggtcgccgtgctcaaacctgtctacgtggccggctccaccgtggctcgtaccacgctgcacaatggatttgaagtcaaacgcaagggcattctgatcggcgacaccgtggtggtgcgcaaggccggcgatgtgattcccgaactggtcggcccggtgcttgaacggcgcaaagggcgtgaggaccagctgcgcgaattcgtcatgcccgagttctgcccttcatgcggcgcgaaactgtcacccgccaaggagggggacaaggacattcgctgcccgaatgtggagagctgcccggcccagttgaccgagcgcgtgatttcgctggcctcacgcaaggcgttcgacatcgagcacttgggcgaacaatcggctatcgctctgaccaacccggaggagaaccggcctgattcggtggcgacctacgcgccgaacatcaccgaggttctggtcgcccccggcgaagagcctgacccgtacgagccggtggaagggctggaattgccggccgcgcagaagccggtgttgtccaacgaatccgggttgttcaacctgaccgccgccgatctgcgcgacgtgcgcgtgtggcgtgaggccgcaatcgtcgaggtgcatgagacggtcggtgcgaacggtaagaagaaaaaggtgcgtaagcgtgtcggcggctctggcctgtggcatcaggtgcctgctttctggaccgcgcccacgccggccaaaaagctcacggccaagcagctggccgaacgcgcgcaaggggaggccgcaatcgaatctgccgaaacacagggaggtaccgccagcgagacgaccggcgcacctaccggggctgaggcgccacttggtactatgccgggctttgccgcagcctcctatcctgagtatgacgtgccggccgacgcggttatcgtgcgcgtggatcacaagaccacgcgcactggcgtcacggatgtaccggtgatcattcggcccggcgaaaacacgcgcaagatgttcgacgaaatggacaaggcccgtcacgccgacctgtggcgtgtgctggtcgcgttgtcgattcgccggctcggtccgcctaccgcacgcctgattgcctcggcgatgggctcgctggcagccatcgaaaacgccacgattgaagatctgacggccatcgacggggtgggcccggaaatcgccgaatcggtggtgaactggttcgccgccacccgcgaacccggcgactggcgcggcgcgactttgcgtgcttggcaggccgccggcgtgggcgtcgacgaggccgagaccagttcgttgccgcagacgctggccggcaaaaccgtggtggtcaccggttcattggagggctattcgcgtgattccgccaaagaggcgattatcgagcgcggcggcaaggcggccggttcggtgagtaagaagaccgattacgtggtgattggcgcaaacgccggctccaaggccgccaaggccgaggaactcggcatccccatgctgagcgaaacccaattcgcccagctcctagccaccggcaccatctaaaatagccccctcagacgcttcattaaccccctctgatgagggggctgtcagcctttaggctgactgggggagagaaaaagcgaatcccgccccagtgtgacttactccactccctctggcatgccgccgcatcacacgctagggtagaacaggccctaaaggaggatacggatttatgagcgacgcacgtcagatcgaagccgacatctacgaacgcctgagcaaggtcatcgaccccgagctcggtcgttcggtcaccgacctcggcatgattgccgccatcgaagccgcgcccgcatcgtcggacgccggcacttacgacgtcaccgtgcacgttgagctgacggttcccggatgcccactgagcgagaccatcaccagccagatcaatggcgcggtcagctcctatccgggcgcacagctgctgcctcatatcgaagtcggttcgatgagccgtgacaagctggccgatctggtcgccgacctcaaggccgaacgcaagcagaaccccttcagcaaaccgggtgtcaagacccgcatcttcgccatcgcctccggtaagggcggcgtcggcaagtcctcggttaccgcgaacctggccgccacgtttgcggccctcggcttcgacacggccgccatcgacgcggacatttatggcttctcactgccgcgcctgttcggcgtgcatacacagcccaccaatctgaatggcatgctcatgccggtcaccgcgtggggcgtgaaactgatctccatcggcatgttcgccggtgctgaccgggcgattctgtggcgtgggccgcgactgcagcgctccttggaacagttcctgtctgacgtatggtggggcgagccggacgtcctcttgctcgacttggctcccggcaccggcgacatggcgatttccgtggcccaggcgctgcccaacgccgaactcgtggtggtcaccaccccgcagccctccgcttctgacatcgccgtgcgctccggactcgtggccctgcaggtgccgatgaaggtgcgtggcgtggtggagaacatgagctactacgagcacaagggcgagaagctggagattttcggtgccggcggcggtcagcgcgtgtctgaacagctcactcaggcgctgggctatgacgtgccgctgatggcccagctgccgctggaacccgaagtgcgcgagaccggcgaggccggccggccggcggtgctggacgccgacggcgctttgcgtacggatggcattggccagaccttccgagggttggctgaacggctgttggcagtgtgagcctgcgcagcctcacacttttgtaggcggcgttggcgtttaagtccggttcgctgctggtgggcgaatcgcttgaccacagcacccgcgacctggtggtcgaggcaatggagcgcactgtcggcgtggataggctcattaacctgcaggccattcacatggacgaggacgccgtgccgcgctgccttggtatgaatgggagatctacgttgagcccgatatctggcgggtgcctcgcagtaaataacggcatagcgcattgtcggtgcgatgctaagaggtaatggcccatgagcggttccaatcggcgagattgcgttgccgggacaccacgacatgggccatctcgataaaacgatgccgcgtgtcggctgttctcaggtcatccgcagtgacgagaatgacgatccagccgagcagttgcaatgcgtttcgctttgccgcgtcgattcgcatttgtgccggatcggcgtgataggctccctgatattcgaacgcgacgcggcagtccggatatgccatatccaatatgacgtatgagttgccgatattcacgcgatagttggcggtggggcatcccaagcctgaatccttcagcatcccaaacagcgtgttttccggcggagaatccgtgttctctgtcatgtagggcagtgcctcgtggcatttgttacgacctatgaaccgcggactgatttccaagtaagtatcgaaatccttgcgagtggccattctgcgccgtttatcgcggctcatcaaagaggctccaatggccgcaagttcctccaatgtagagtattgggccatctgagcccacatcatgaccggcgaggcaatccagaactgttcataatcctttttgcggatatccagttttcccttaaacacatggaagaccacgcctttgattcgtctgcgtttgttggcactggaaacacaggcgtgcacggcatcaacagatagcgtgcaatgtcgggggatgggcgcgccgtagtagttggccgcattgatgtatcccaccagcaatggacctttcgaacggcgcgcagcatcattgcagcgttcacgttctgctcggcgtcggccgacaatatcctcatgcataaaagagctcatggtgcgaccgtaaagctgatttggacttgaatgcaagccaggcagggcaatgtggttccagcttatggagttatccacattgtctatttgcgcagagaacggttctcagtagtatctgtgcgctcaaatgaacaagaacataacaatctcacatcatcgcaaatggcgacatggcagtgattagggcatattccatgtgtgcttcgggcgtagagaagtgtgcacagacattattgagaaccgttctctgcgcgcctatctggctacgacctcggtgggcaggagccccgtgcgctggaacggccggtcctcgatctggtcaagcactagggtagccaagctgacgccgaatgcgtccattggctggcgcacggtggtcagctgcgggcacgctggcgtcggcgtcaacgtcggcaagtacgacggtccgatgatataggcgattcgtcgatacccgcgccccaacatatgctcggtgagcttgcgtgaagcgagtcggttgtcgatgtcgacggtggggaaggggtggcgctgccatagccgacgccggaaatggcgactggcacgctgatattggcgaatccctgaaatagcgggtcgtccttatgaaatgtgttgagaatccacgggccgtatcgcatggcgcagcgcagtctgcaccgccccgccgccgaaccaaccccggcaagatcgcgcgccgcgccggcaccactatcctcgccctgctgttctgcgtcgtatggttcttcccggtctactggatgattatcaccgccgtaaagccgcgcgatgagatcatgaccacgacccccgtgttctggcccatgcacctctcgatcgtcctgtcgattattgtcgcgttcttcgcgtgcacggccctgaccctgtaccgcttccgcgggcgcaagccgatcatggtgttcgtgctggccatccagatgacctctggcggcatcatcccgcagatcatcatctacaaccagctcggcctgctcaacaaatacagcggcctgatcctggcgtacatcgccatggtgctgccgttcgcgatctggaacatgcgcgggttcttcctgaacatcccgaaggacatcttcgaatccgcggccgtggaaggcgcgaacgactggcagatcctgtggaagatcaccttcccgctggccgcgcccggcatcgtctcgacctcggtgttcgcgttcatcaacgcctggaacgactacatgatcgcctatacgttcatgaaggaccagtcgaagtacacgctgccggtatggctgtcgtccttctcgacacccaccatgggcaccgatttcggcgggcagatggccgcttcggtgaccttctcgttgccggtggtggtgttcttcatgctcatccagcgcaacatcatgaagggtgtgacgaccggtgccgtgaaatagcgtatgccgccgtacctcaccaaacgattcgtccgctgatggcggcgtgaccgcgtgtcgcctgccgtcagcggatgaacgataataaaaacagtatgaaaggaacagctgtgcccacattcgaatataaggctgatgccgcaacgccgtgtctcaccctgattcccgctccggtgacattggaatacacgcatggcacggctatgatcgggtccttggtgacgatcgagaaacgaattcccgaatatgccgtcaccgaagatgccgatgagacctgggaaacgctgccaatcgagcagctgtccagcgaactcgagcgttactgcggcgtcgccgtccgtacgcgccgagtactcacagccacagatgaagccgacgccggtgccaatgccgccgaaaaagcgcgagatgcgggcgtgggtgcgggtgcgggcgcgggtgcgccggcagcgatgaacggcaccgtcatattgctgtgtgtggatgcgcgattggcgcatgacgaatacacgctggatgtgttcgcctcagataccatcgccgtgcgtggtggcagcgaaagcggattgcggtacggcatgcagacactgcggcagatgatcaggcaaacctcgcggaccttgccctgcctgcatatccaagacaagcctgcgttcgcggtgcgcgcctacagtcttgacgtgacgcgcgggcgtgtgccgacgatggcgttcctcacctggttcatcgaccagctggcgttgtataagtacaaccaattccagctgtacgtggaacatgccttcgctttcggcgagctcagcgaagcgtggcgcggcactgacccgctcacggccgacgacatcatgttcctggacgaatactgcgcacaccacggcatcgaactggtgccgtccttggccactttcgggcacatgtatatgaacctgcgcacccgtgaacatcgtggactgggagagttccccgaagacgccgaccgtccgttcagtttcatcgaacgaatggaacaccacacactgaacgcagccaaccccaagtcgcacgatttcgcctcgcgcctaatcgaggaatacgcgccgctgttccgctcgcggtccttcaatattggtggcgatgagactttcgacttgggccgtggccggtccgtacaggactcgccgggcgccagtcgcgatgagctgtatgccgatttcgtcaaagacctatgcagcacgcttgcccatcgtggtctacaaccgatgctgtgggcggatatcgcgctcgagaatccgcacaccatggacttgctgcccggcgacatcacgatgctcaactggatgtatgagccggatatcgacgaaagcaagatccagaccatcgcatcacaaggccgccgccaattcgtgtgccctgccgtgcgtgcgtggagccggttcttccccgactatgacggtgcctggctgaacacgtaccgcatggcggtggccgggctcaaatatggtgcggaaggcatggtggtcaccgattggggtgactatgggcatgtcaatgatccgcggttgagcgtgccgggactgtgctacggtgcgcaaaacgcgtggaacccggttgcaattgacgcatgcgaaatgaaccatcggatttctaatctggcgtatggcgacgaatccggttggcttatggattcactcgctcgcatcgactccgatggagtgtcgttcccctgggacctcgccgtgcaagtgctggaactggaatacggttccggcaccggcatgctgaatacggatgtggcatcgtatgtggaacggtcgtgcgggggagagctcatgtttgaccgtgcgctgggatgcgccgacgcgcgccgccgattgctcctgcggaaccatgcccgtctcgaacgacgccgggattgcgaccgggcgttgattgattgcggcagtgcggttgtcgcggtgctcgatggctcggcacgaggaggattgaacccggagctgctgtgggtgatgctggatgggcagcggttgttcaatagactgggtgaggaactgctggtattggctggcggcgaggacgcctgtgacaccaaggatgtgaccggccgtgcgctggatgcctcgcgccgcgcccgtcttgccgccgatttggagttgtggttcgaacggtaccgtgtgcagtggctgtccatcggccgttacgccgaattggcgcgtatcgcccatgtggtgtggtcgtttgcggacatattgcgtaggggagcgctatagggggggctcgcagaaattcggtcctgctgagaacaatgtgaggcttacgcgccgtcaaacgcacatggtgatttcaaaaatggcgaattgctgccattcttgcacctgtgcgtttgatgggaaatgtgcgtatgcctcacattttttgcataaagcatgaaaatgtgtgagaccggcgtcaaggtcgaattcgagaagaaggccttcgaacagattcgccagaacgcctcccaggtcctcaactccgacgacgctccggacgttacggaatacaacaagggcaacgccacgtccggcctgctcgccagccaaggcctgctcaccaacctcaacgattacgtgtccgaatatggctgggacaagattatcaccggttccttggccgacaccggcaagtacgatgagcaaggcatgatgggctccggcgactggtacggcatcaccaccggcgcggtgaagtaaggtcattcgcacaacaggcaattcaatcaacaagcagcacatattgattttggtttcggctgccttgttccctggcggtcgaaaccacctctccaccaaggagcagcaacaatgaagttcaccaacggctactggatgattcgtgacggcgtcgacgccctctacgctcgtgaagcctacgaactggcggcggatgccaccaccgaaagcctcaacgtcctcgccccgacctccgtggtgcgcggccgatacgataccctgaacctgcccacattcaatgtggacatcaccacacctgcggaaggcgtgattcgtgtgtgtgccgaacactggcaaggcgccaccgaataccccggattcccgctcaatgccgacgaacccggcaaccgtgattacgtgaccgttcaggcgaacggcaatggtgatggcgaagtcggcgtcaatggcgcggacgtcacgctgaccactggcggacttaccgtgaaggtcgtcaagggcgccccctggaacctgaccttcatcggcgaggacggcaaggtgctcactgagtccgcaggcaagtcgctgggccgattcaagctcggtgccgaatcgaacgtcaccgcccagccggtcagcgaattcggtgtgaccatggacggttccgcccgtgatgaatccgacgtgttcattgccatccagctgcatctgtcggttggcgaagacgtatacggcttgggcgaacgcttcggcgcttacgtgaagaatggtcagagcgtcgacatctggaatgaggatggcggcactgcttccgagcagggctacaaggacatcccgttctacatgacctccaatgggtatggcgtactggtcaacaaccgcggccatgtctcctttgagatcggttccgagaacaccgaggccaccatcaactccttcatcgacggtatggccgagcgtgatattccgctggccgccttccactacgactgctactggatgcgcgagttccattggtgcgatttcgagtgggacaagcgtttcttcggcgacatcgaatccacgctgaagcgcctgcacgaagacaagggcctgcacatctgcgcttggatcaacccgtatatcggccagcgcggcgaaatgttcaaggagggccgagacaagggctatctggtgcgcaagcccaatggcgaagtctggcagaccgacttctggcaggccggcatgggcttggcggacttcaccaacccggccgcccgtgaatggttcaaggacaaggtcaaggcgttgctgaatcagggcgtggacgccatcaagaccgatttcggcgagcgtatcccgcgcgacgtcgtctggtatgacggctctccgaagctctccatgcacaactggtacacccagctgtacaaccaggccgtgttcgaagccatcgaagaaacctacggcaagggcaacgcctgcctgtatgcgcgctccgccaccgtcggcggccagcagcagcccgtgcattggggcggtgactgcgagtccaccttcaatggcatggcccagtccttgcgtgccggcctgtcgctgacctcctccggcttcggcttctggagtcacgacatcggtggcttcgaaggtgcgttcccggatccggccgtctacaagcgttgggtggcgttcggcatgctcggctcccactcgcgactgcacggttccaccgtgtaccgtgtgccgtggctgttcgacgaggaggacgagaagaacggcgtcgcattggtgcccggccagaccgccgtggatgtggtgcgcgagttcaccaagctcaagcttgaactcatgccgtatgtctaccagcttggcctgcagcctcatgtgaacggtactccggtcatgcgttccatgttcgtggagttccccgatgacccggcatgccgcacgctggaccgtcagtatatgttcggtccgtccatgctggtcgcccccgtgttcacctactccggtgaggtttcctatcgattccgctgtgggtgcgcgatagcagcgtaacgacatgaacatttcagcgtggtgctggaacacttcggtgttgcggcaccacgcttttgtgctgatatggggatttgtactagtcgaatccgcgaaatgttcagtaaatgttcacgtagcgaaatcggcatagaatgcgagcaaacgcataacggcacggtgctgttcatgcgtacaccaacgccagacgaaccgccggaaagaaggggtctccgtgattgagacagtggacgatatcaagacgattgcgaacgtcggcacgggaaccatgggccacgcgatcacgttgcagttcgcgttgtccggatatccggtgcatctggtcggccgcggcgaggcctcgctggagaaggcgatgaaggcgattcgttcggatgccgaggactttgccgaagccggactactcaaggatggcgacaccttggacgcggtgctggcccgcatcaccggttacgccgactatgcgagcggcgtggcggacgtggacttcgtcatcgaatccgtggccgagaaccttgacatcaagaagtccgtctgggccgaagtggagcacgccgcccccaaggacgcgattctgtccacgaacacctccggcctgagccccaccgcgctgcagtcggtgctgaagaagcccgaacgcttcgtggtggcgcacttctggaaccccgcgcagttgatgccgctggtcgaagtggtgccgggtgagaagaccgatccgaaggtggtggacatcaccttcgacctcatggccaagatcggcaagaagccggcgaagatcaagaaggaatcgctgggctttgtgggcaaccgcctgcaactggccgtgctgcgcgaggcgttctacatcgtccagcagggcatcgcggacgcggccaccgtggacgacgtgatgaagtacagtctcggccgtcgctggaatctggtcggccccctcgccagcatcgacctcggcggcctcgatgtgttctataacatcagcacttacctgttcgacgatatggacaacggcaccggcccgagcccgctgctcgccgagaaggtcagggaaggcaatctcggcgccaaaaccggccagggcttcttctcctggcagggcgaggacggcaagcgcatcatcgaatcccgcaacaaggccctgctgcgcgcgctgaagaacgacgctgcggatgccgccgctgcgcaggcgtgaggcataaatatcaaggatcggtgacgacgatgacgtccacagaacacagcacgcgagccgacatgctggcccatatgggcagccttcagcaggccgcctacgtgcgcccgatcgaatactaggaaggccgagcccacggcctcaaggccatcgaggtgaagaacggtccgttgcgtttcgtgtccatggccgaccgcgccctcgacgtctgccagttcgaataccgcggcgagaacctcgtactgcgtcgcacaatcaccagcgtgtacggccggctgtcgatcacggtcgaggatgaggtgaccaacgaatccttccgcgacgatcagtcccgaaagcgtgtacctgcacgagctcgccgccgacgagaacggccgcagcttcgccgccgtggtcaaccgcaagctcggactcggagtcgtcatcgacttcgacgccagcctcttcccatacttcatggaatggaagtcgacgggtgcgggcgactacgtggtcggcctcgaaccctcgaactccagcgtccacggccgaggctggcacgagcagcgcggcgacctgcacgccatcgccccgcaggccagcgaacgcaagtccctgaccttcaccgtcatcgaaggcgaggccgcgattgacgggctcatcgcccgccgcgacgccctgctcggctgaattgtgagataatatcggccgatatgtgaatggctgattagcgtggggagcatggttacctgggattcggaacagtatctgcgattcaaacgggagcgcacgcagccggcgcgtgatctggcgatgcagctgccgccggacgacggcagcgtcacgcgcgtgctggatattggctgcgggccgggcaacagcacggccgtgctgcgcgagcgctatccccatgccaagattctcggcgtcgacagctcgccggtcatgatcgagacagcgcgcaaaacctatcccgacatcgatttccagctgtgcgacgtgtccgcgcggctggacgagctgccggccgacttcgacgtggtcttctccaatgcctgcatccaatgggtgccggaccatccgcatctgattcccggactgctcgcccggctcagggtcggggagtgctggctgtgcagacgccgatgaactatgaggagccgattcaccgcatcatcggtggtatcgtgcactcgcccgcgttcgcggacaagctgccgcagcaacgcgagttctacaacctcacgccgcccgaatactgggagctgctgcatgcgcatgccagcgccttccgcatgtggaaggtcacgtacatgcacacgctgccctcgcatgaggcggttatggactggtatcgtggcaccggcatgaggccgtatctgcaagcgcttgacgacgccgggcgcaagaagttcgaggccgaagtgttcgcccaagtccgcgaggaataccccacacagtcggacggcagcatcatcttccccttcccacgtttcttcttcctcgcgactcggtagaagctcgccggattcgcgtactgggcggcgcgacctgtttcccgcgccgccagctgtgggttgacctcgctactgggcttgcggtgatgccgctggctgctgcgctgtttccgattgcgatggcatttgcatatgcggcgcgatgcgggggagcagttcttcggagacaaagtgcccgatctcggtgggggtggtcatgatcgagccgcttagcgctgcacggaatgtgccgatgatgccggaaacgtagaactgcttcagaaggatgcggcgtttgcgttcggccggatcggcgatggagtcgatatccggctcgccggggaacaggaccggttgcaggaatggccaggcagtctcctcggcgcatccggcgccggcaaatccaccacgctgaacatcctgggcgccatggaaaacaacgacaaagtcgcactggccgtcgccttctccacaacgctcggcggcattatggccatcgtcaaactggcgatgggattgtggacgatgtccgtgctgttcatcgtgagcgccgtgtactacgcgatgctgtgcgtctcacgtttctccatcgtcaaatcgcatacccgtacgcgccagattgccgaccgcgtgcagcgactcactcaggagatgagtgtctaccaccgtaccggtgggctcctgtgcttcatcggcctgtggatgctgctgcggcggcgctggacggtgccggcgtcgggcgaagattccccggacgatgccgttcctgcagtcgagatcacggctgaaaccgaggcgtagggcgtcgcaatgcctgtttacaatcgacccgaatggtctttgtggtgagaagaggcatatggtgaggctgccgacgttgaacgtgaattggagtcgcgatcgggtctacgtgattcggcgcggagtggtcgcctgctgtatcctgttctgcctgatcggcgccggagtcgagaccgcggcggcgcagcgcagctggccgcgagccgacaccgcaaccgccgccgcaaccgcagcggcgaacgagcccacggccgttacccgcaagcaggttcccgatagcggcaaacagggcgggtcgcggaagacgcagaacacgcagaacggcgatgacaaagccgcgcaaagcgtggactggaaggggccgaccggcaaacagcccgacctatcccagtactccgacctgagcgtggaggtcagtctcgccaaacaacgggtgtacgtcaagtccggtggccagaccatttatacgatgatcgccagtaccggcgtcgacgacgccaccccgcacggctcgtacaccatcgatacacgcggcgaacacttctacaatgccgaagaaggcatgggcgccgactattgggtgcagttctacggttcgtacctgttccactcggtgccgaccggcgaggccttcggcgactatctgccggaggagggtgccaaactcggccagcccgcctcgcacggctgcgtgcgcctgactgtggccgacgcgcaatggttctatgaccaggtgccggacggcacgctggtcaccatcgcgtagggtggtctctcgctcagtctcgttgcgttcgacagctccctcgtcagagggagcttatcagagggagcttagctgattagcgcgcttcgggcgggcggtattggtcgtcggcggtgaagcaggtgcggtagatcatgaccatgatcaggccgtcggccagcagggtcagcgcggcgatggcgtcgaggaccacgaactggtacttggcggcgttgagcgggtcgccgccggcgatcacctgaccggccatcatgcccgggatcgtcacgatgccgctggacgccagcgaggcggtggtgggcagcagacccaagcgaatcgacgagacgatggacgggcgggccgactcccacggggtcgctcccagcgccagcatcatatccacctcgtcacgccgctcctccatgctctcgtagaaacggctcaatcccaccgccaaggcggttacggtgttgcccagcagcatgccggtcaggggcaccaccagctggggcgcgtaccacgggtgcgggcgcacgatgagctcggtgaccagcgccagcatcagcagcatggtgatgaccaggctcaggaagatcggcccggcaaggcccttggggatgccgcgtgcgcgggacatcacgatctgcacggccgccaccagcatgaccgccatcagggagaacaccatccacacgttgttcgaccggatcacgtagccgatgatgaagcccatggcgcacagctgcaccaatgcgcggcacgacgaccacatcagggtcttgccgatgcccatgtgcatcagttcgctgatgatggccgccacggccaccatgcccagcgcgatgagcagaccccagatatcgatgttgtaggaattgcccagatcgccgctcatgcctgcgtctcctcattttcatcggcgccggcagacaccgcgttcgcgtcctgcgccgccgaatccgtcatctcgcgttcggtcagccgccccttgtccagcgtcagcgtgcgggtggcccgtccgtccggcggacggtggcggatgcggatgatcgccatgccgcgtgtggcggcatccgccatgatcgtagccaccttggctgcgttgtcgtcgtcgagaccggcatctacctcgtcggccagcagcaccttcggatcggtgagcagtgtgcgggccagggccacgcgggccgcctggccgccggacaggtcgtgcggggcgcgctccagatcgatgtcctcgcagcccatcgcgtccaacgtcgtgcggatgcgctcgtcgggcagcagatgctcgcccttgccgcccttgccgcgaatcgcgagcgtccagggcaggcggatcgcctcggccacgttcttgcccgtcagaatcggcttctgcggcaggtaggcgacatcccgccgccactgctgcggcgtgaactcgccgctgcccttgccttcaagggcgaacgcgccgtgcgcatgcgggttgagccgggcgcacgcggtcaacagactcgacttgccggagccggacggtcccaccagatcgacgatctcgccgcgctccacagcaaaggacaggttctcgaacacagtgcgttcgccgcctgcctgcggttgcgcggggacgacgcaggacacggatatggcttcgaagaaggatcgcatattcatccagtctagccggggcacatgggaaaccccagcgttcacttcctgtatacccggtgtggcataatagccgaggcaatttttgggctttgcctaagctagtttgaatttgaaataggtgaataacgtggcacagactactaacgacatcaagaacggatccgtcctgaacctcgacgggcagctgtggaccgtcatgaagttccagcacgtcaagccgggcaagggccccgccttcgtgcgcaccaccatcaagaacgtgctctccggcaagatcgtcgacaagaccttcaacgcgggcatgaagatggaattcgagaccgtggacaaccgcactctccagtactcctacgaggacggtgacaacttcgtgttcatggacatgaccacctacgatcagatcatggttccgaagaccctcgtgggcgacaaggccaagttcctgctcgaaggcaccgactgcctagtctccttccacgacggcaccccgctgagcgtcgatctgccgggctccgtggtcctgaccatcacccacaccgagccgggcctgcagggcaaccgctccaacgccggcaccaagccggccaccgttgagaccggagccgagattcaggtcccgctgttcatcaatgagggcgaccgcgtcaagatcaacaccgaggacggttcctacaccggccgcgagaacaactgatctccgcatcctcaacagacgaccgaccgtataaaggactaggacagcagcagtatggcacgttccaccgcgcgcaaaagggctctgaacaccctgtacgaagccgacgaaaaaagccaggatattctctccctgcttgacgagcgcatcgcacatcccggtgcccagaccccgcttcccgactatgccattgaaatcgtcaagggcgtggccgagcaccgtcgtcagatcgacatgaccctggacgaacactccacgggttggaaggtccgccgtatgggcgtggtcgatcgcaacattctgcgtatcgccgcttgggagattctgttcaccgatgatgtgccggacaaggtcgccatcgacgaggctctggcattggccaagaccctgtgcgatgacgattcgcccgctttcatccatggcctgctgtctgcagtgtgcaccgccaagaacgcagcaccggcaccggagtccgtggcagaagaggccgatgaggaatcgtccgattccgctgccgccgcatccgagccgaccgatgagggcgatgtttccgattcgcccgattcgtccggtgcatccgacgagcctgctgccccgtccgctgagattcagccgacggtcgattagtcatttgttgttcagcctccccattcgggaggctttttcatgggcggacacttgtgccgccgtacattctcaagtcggcaccttgccgacagccccgccagcgggggtgagactttgcgcccaacggcgtgtgagtctgcgctggccgttaaccttggtacgaatacccgaaaaacataagggggttttggtgagccagaacgagtccgggaccatcgcaattccgatgtatgacaaggacgatgcagtcctcgttttggaagacggacaggtatatgtgggggagccatacggcgcccttggcgagacgaccggtgagatcgtcttcgccaccggtatgaccggataccaagagacgctcaccgatccgagctacgatcgccagatcgttgtgcagacgttcccgcacatcggcgataccggcgtcaacagcgaagaccctgagtcctcccgcatctgggttgccggatacatcgtgcgtgatccctctccgaacgtgagcaactggcgtgccgagggcagcctggacgacgacctcgccaagaacggcatcgtcggcctgagccacatcgacacccgcaagctggtgcgtcacctgcgttccgcaggcgtgatgcgcgccggcatcttctccggcgacgccctgaccgatcaggccaccggcgcgctcaagaccatcgagcagctgctcgaagacgtcaagaacaccccgcagatgcagggtctgagcctgtacgacgaggtgtccaccaaggagacctacaccatcgaaccgtgcggcgagtacgaaggcaaggagccgctgtacaccgtggccgctgtggacctcggcatcaagggcatgaccccgcaccgcatggccgaacgtggctgccgcgtgcacgtggtgccctccaccatcaccttcgccgaaatcgagaacctgaacccggacggcgtcttcttctccaacggcccgggcgacccggaacaggccggtcccgaaatcgagctgctgcgccaggtacttgacgccggctacccgttcttcggcatctgctttggcaaccagctgctcggccgcgcactcggcttcggcacctacaagctcaaattcggccaccgcggcatcaaccagccggtcaaggatctgaccaccggcaaggtcgaggtcaccgcccacaaccacggcttcgcggtcgacgccccgatcggcaagcaggtcgacgcgccgtttgaaaacggcaagtacggcaaggtgttcgtctcccacatcgatctgaacgacgacgtggtcgaaggcctgcagtgcgtggacatccccgcattctccgtgcagtaccacccggaggccgcagcaggcccgcacgatgcggcctacctgttcgaccgtttctgcgaacttatgaagaacaactccaaggaaggtaagtgatatgccgaagcgcaccgacatcaaatccgtgatggtcatcggctccggcccgatcgtgatcggtcaggctgcggagttcgattactcgggcacccaggcatgccgcgtccttcgtgaggaaggcatccgcgtcatcctcgtcaactccaacccggccaccatcatgaccgacccggagatggctgacgccacctacatcgagccgatcgccaccccgatcctcgagcagatcatcgccaaggaacgccccgacgcgctcctgcccaccttgggcggccagaccgcactcaacgccgccatggcgctgggcgaggccggcgtcctggagaagtacaacgtcgaactgatcggtgcttccctggaagccatcgaccgtggcgaggaccgtgaactgttcaagaaggtcgttgacgaggccggcgccgaatccgcccgctccgacatcgcccacagcatcgaggaagtcgacaagatcgccgagaagttcggctacccgctggtcgtgcgcccgagcttcaccatgggcggcctgggctccggcatcgcccacaacgaggaggagctgcaccgcatcgccggcgccggcatccattactcgcccaccgacgaagtcctgatcgaagagggcatcgagggttggaaggaattcgagctcgagctcatgcgcgaccgcaacgacaacgtcgtggtcgtctgcccgatcgagaacgtcgacccggtcggcgtgcacaccggtgactccatcaccgtggccccctgcttcaccctgaccgaccgcgaataccagaagctgcgtgacatcggcatcgccatcatccgtggcgtgggcgtggacaccggcggctgcaacatccagttcgccgttcatccggacaccggccgcatcatcgtcatcgagatgaacccgcgcgtctcccgttcctccgcactggcctccaaggccaccggcttcccgatcgccaagatcgccaccaagctggccctcggctacacgctcgacgagattcgcaacgacatcacccagtccacgccggcctccttcgagccgaccatcgactacgtggtcaccaaggtgccgcgcttcgctttcgagaagttcccgggcgccgaccccaccctgaccacctccatgaagtccgtgggcgaggccatggccctggccggcaacttccaggagtccctcggcaaggccatgcgctccatcgacaagcgccacatgggcttcaattgggatggcgagaagccgtccgccgaagaagtggccgaactgcttgaggccatccacaccccgaccgaacaccgttacctgcagctcatgcgcgccatctggggcggtgccacgctggagcaggtgttcgcggccaccaagatcgacccgtggttcctgaagcagatcttcctcatcaatgagaccgccatgacggtgcgcgaggccgaaaccctcaccccgaagctgctcaagaaggccaagctcgccggtctgtccgacgtgcaggtggcccacctgcgtggtttgggcgatgaaggcgagaacaccatccgcgaactgcgctggacctacggtctgcgcccggtctacaagaccgtcgacacctgcgccgccgagttcgacgccgccacgccgtactactacagctgctacgccgacgaaaccgagctgcgcccgcgcgaacgcgaggctgtgatcatcctcggctccggcccgaaccgcatcggtcagggcatcgagttcgactacacgtgcgtgcacgccgtgcaggagcttggcaaggactatgacaccatcatggtcaactgcaacccggagaccgtgtccaccgattacgacatgtccgaccgcctctacttcgagccgctcaccttcgaagacgtgctcgagatctacgaggccgagaagaagatgggcccggtcaagggcgtcatcgtccagctcggcggccagaccccgctgtccctggccgcgcgtctgaaggccgccggcgtgccgattctcggcaccaccccggaatccatcgacttggccgagaaccgtgagctgttcggcgaagtactcaagaaggcggagatgaacgccccgcgttacggcaccgccctgagcctcgaagaggccaaggaagccgcccaccgcatcggttacccggtgctcgtgcgcccgagctacgtgctcggcggtcgtggcatggaaatcgtctacgatgacaagcagctcaacaagtacgtggaccgcgcacttgccgaggccaaggccgataccgtggtctccggccgcctgccctccccgctgctcatcgacaagttcctgcaagacgccatcgaaatcgatgtcgacgcactgttcgacggcgaggaactatacatcggcggcattatggagcacgtcgaggaggccggtgtccactccggtgacgccgcctgcaccctgcctccgtccaccctgtccgacgaccagattcgtcgcctgcgtgaaggcacctacgccatcgccaagggctgccatgtgcagggcctgatcaacgtgcagtacgccttcatggccaacacactgtacgtgatcgaagccaacccgcgcgcctcccgtaccgtgccgttcgcctccaaggccaccggcgtggcactggccaaggccgccgcccgcatcatggccggcgaaaccatcgccgatcagcgtgccaacggtctgctgctgcccaagggcgacggcggcgacatccaccccggccagcaggtcgcggtcaaggaatccgtgctgccgttcaagcgcttccgcaccccggtgggcaagaccgtcgacatcctgctcggacctgagatgcgttccaccggtgaggtcatgggcttcgaccgtgacttcccgcacgccttcgccaagagccagctcgccgcctacgacggtggcctgccgacccacggcaacgtgttcatctccgtgaacgacaccgacaagcgtcagctgccgttgatcgccgttcgtctcgaggagcttggattcaagctctgggccaccgagggcaccgcctccgtgcttcgccgttacggcatcgagtcgaacatcgtggacaagatcagcacccgcgtggacaccgatccggaagccccggtcgaggtgcatcacgctgccggatccgtgggcaagaacgtggttcagctcatcgaggaaggcaagatcgacatgatcctcaacacgccgaactcgcgcggctcccgttccgacggctactccatccgtgccgccgccattgccgccgatctgccgcagttcaccaccatcaccgagttccaggccgcactgctcgctatcgaggccgtgaagcataatgattatcagatcatgagcattcaggagcattcgaagcagctgttcgaattggagcgacgggagttctgatgactacactcagcagtgaggaattgcaggcacaacgttcggatttcggtctgcgattaagcaattcaatggccaaatacgggccgctgtgtgtgggcattgacccgcatcgcaagctcctcaccgactggggatacaacgtcgacgccgaaggcgccgaactcttctccatgcgtatgctgcaggccgccaacgggcgcgccgcagcagtcaaattccagacgccgatgttcgagcgctacggagccaaaggtttcgaagcgctcgagcgcgtgctctacgcggcacgacaaatgggcgtcatcaccatcgtcgattgcctgcgcggcggcctgtccaccacgatttccgccatcgcagacgcctatttcaagcccggtgcaccgttgctggccgacgccatcacgctgctgccgtactatggcgcgcgttcgttgaacggcctgattaccgaagcgctggaaaacggacgcggcgtgttcatcgcctccctgacctccaacccggaaggcatgagtctgcagaccgcgttgcgccagagcggcgattacaagggacgtaccgtggcctacggcatcgcctccaccgcgcagaagcataacgtggatatcgaaggcatgggctcggtgggtctgatcatcggtgccaccatcggccaatggatgcaggattccggcgtggacccctccaagttcaccggtccgattctttcccccggttacggttggcagggtgccgaggccaaggatctgaaaaccgtgttccgcggtacgcgcggcaacgtgctggtcaccgtgtcccgctttatcgcctcgcatgggccggatatcgccgcactgagccaagccaccgagtcgattgcgcttgacgtacgtcaggcgctgatggaagccactgtcgaaggctcggaaaaccagtaatcagaacggaatcagatgtcgcggcatgcgtacgtgtctatctcatcgcgtacgtcgcatcacgattcatattcttccctgttcgtcggggctgtagcagttaccggtcatctcgccggtgagccgttaccacattggattcataatcgctgcacaccacatcatctccggaggaacccatgactgaaaacacccatgctggccgtctaatcgtcctgactggccccaccgcagtaggtaagggcaccgtggaagccaagctgcgcgccgaccaccccgaagtgtgggtgtccgtctccgccaccacacgcgctccgcgcccgggcgaggttgatggcgtcaactattggttcctcactgaagacgagttcctggcccgcgaagcggccggtgagttcctggaaaccgccgtggtgcacggcatggcccactacggtacattgctcaagcctgtggaggaacatctggccgccggtatgcccacgattctggaaatcgacctgcagggtgcccgccgcgtcaagcagcgcgccgccgagctcgacctcgaagtggtgtacgtgttcatcgcgccgccaagcttcgaagagctcgagcgccgcctgatcggccgcggcaccgaaaccgccgaacagcaggcccgtcgcttggagaccgccaaggtggagctcgccgccgaaagcgaattcgacgtcaccatcgtcaacgaaaccgtcgatcaggccgctgccgacctctggtccgtcatcgccaaggaatacgggctgtaaactacctctttaccaccaactgctggtggaggatttcggcgctgtttttggccggcgcctgcttccagcggatcgcttcggattcgtgatgctcggtgacataatgccgcatccattcgaagcactgctgggtttggatggcatcgcttaatgcgcggtgctcctcattgtccgcgatgccgaagcgtacgatcaggtcggccagacggtgatgccgctgcgcggggaacagggcgcggctgatctgcatcgtgtcataatccgcgcaggcaaagccgcagccggcgatatgccgggtgttgtaatccaggaatcgcagatcgaagctgacgttatggccgacaatcggctcgacggcgggaccggcagccggggtagcgagccatgcgatgaatcggggaagcacctcgtcaatcggatcgaggtcggccaccatcgcatcggtgatgccggtcagcgtggtgatctgacgcggaatcggccgcaagggattcaccagctgctggaattgatcgacgatatgcccctcccgcacgcgcacggcaccgatttccgtgatggcgcaactgttcgggtaaaagccggtggtctccaaatccagcgccacataatcggtggggaagacggcatcgtccatggcgattcgcccgccggcaccatgattgggctgggatggttggccgaaaacggtaatgccggaagtggtcacggaggctcctcatatcagtcggtgttcggtgacttattgtaccggcatcccggtctgacggtaaaattattccctcccggtttttctcggatatattggttaggcggccggcaattgcgcggcgcatcgggaagggagcacagctgatgaaacagatagtggcaggcatcgtggcgcatgtggacgcgggcaagaccacgctgtccgaggcgctgctctaccgtaccggtgagatccgcaaattggggcgagtagatcacggcgatgcgtttctggacaccaattccttggagaaggcgcgaggcatcacgatcttcgcgcaccaagcgttggttgaacacggcgacctgcgactgaccctgctggatacgccggggcacgtggacttcgcagccgaaaccgaacgggtgctgcgtgtgcttgattacgcgattcttgtggtctccggcacggatggcgtgcaaggccataccgagacactgtggcgtctgctggccagatacggtgtgccgacgttcatcttcgtcaacaagtgcgacgccgccggattcgaccgcgaggccattctggcacagttgcgcaaacgcctgagcgatgcgatatatccgctgccggcaatggagcagtccactgagggcagcgcggtaccgttggacgcgcttgccgaggatatcgccaccctggacgaggaggcgatgaacgactatctggaacatggcgcgctgtccgtggacagattgcgatcgatgatcgccgtgcgcgagctgttccccgtatatttcggctcggcattgaaactcgaaggagtcgaggaattcctggacgggctggagacgttcacccgcgaacgtgaatggccggccgccttcgccgcacgcgtgttcaaaatcgcccacgacggccagcacaaccgtatgacgtggctgcgcgtcaccggcggtgcgctcaaagccaaggagatcgtctcttcatcctcgtgcgccgcggcgtcgacagcaccgtcgccggtacagggggatgatggcacggtatggtccgagaaagtcgatcaggtgcgcgtctacaatggcgccaaattcgagacggtcaccgagatacctgccggatcggtgtgtgcggtgaccggactgacgcggaccttccccggcgaagggctgggagcggaaccggacgccgaatcaccgtcgctgcaacccgtgttgacctacacggtgttgcccgccggagcggaatccgatacggccggcacctcgggagcggccaaacgcggtggcgccggccataacagcgtgaatcaggacgatgccgagcatgatgccgccaagtcgggaaccggccgcaatgaggagaacgacaccgctcgccagaccgcggcggacaatagctcgccggcccgtccccagttcgatgatctgaccttgcataaggtcatcaccgcattgcgtgagctggaagacgaagacccgttgttgcatgtggtgtgggtggaacggctggccgagattcatgtgcaattgatgggcgcagtccagctggagatcatccagcagaccctgcacgaccggttcggtctggatgtgtcgtttggccccggctccatcctgtaccgtgagaccatcactgcgccaatcgaaggcgcaggtcatttcgagccgctccgtcattatgccgaagcacatatcctgctggaaccaggggagccgggcagcggagtcactgtggcctcggccctgtccgaaaacgatttggaccgcaattggcaacggctgattctgacccatctgaccgagcgtgagcatctcggtgtgctcgttggcgcgccgctcaccgatatcaagatgactttggtggctggccgcgcgcatctgaagcataccgaaggcggcgacttccgccaagccacctatcgtgcgattcgtcaggggcttatggaagccagagctggagtcagtggccggcccgagacgccggtcgagagccgtccggacaccgcaggggagggcaactgccgactgctggaaccgtggtaccggttccggctcgaagtgccagcagacatgatcggccgtgccatgagcgacatccagcgcatggccggcaccttcgaatccccggtcaccgatggcgaatacgccgtgatcgaaggcgaggcgccggtgtccgagatgcgcgactatgcgatggacgtgaaccagtacacgcacggccatggccgtttctccgccactttcggcggctacaagccatgccatgacgccgaacagatcatcgcagccgccgcttacgatcccgaagcagatctggacaacacccccgactcggtcttctgcgcccacggtgccggctaccccgtcaaatggtataaggtccctgaattcgcccacgtagactacgccatgtgaggtggtgactaccaaatctgcggccgaatgaatccgttggtctccaagaaccgttgaatatcgcgcatttccggcatattaatggaatgggccatgcccggatacacttgttcggtcaacgtgccgtgctcgtgccagaactcacccatcgccgtcacatcggctttcgggaagatgtcgtctgcagcaccatgcccgtagaacaccggcggcttcaacgcagccagctcggcgtctccagagaccggccccggagccaaccagccggagcaggagaccgctgccgcataccgttgcggattgcatcgcaaaagatgcgcggccaagaggccgccctgcgagaatcccatggcaaccaccggccgagtggcgggaatatgctccgcaacccatgcatcaatggcttgggcggcttcagtcgcctgcttgtctaatgattcgccctccggcacaccttcatgcgcccacgcaccgaaccatgtatatcccatgccataggcgatgggtgcctgcaaactggcataatcagccgaaccggcaccgcaatagttcagcagatcgggcaaatcgtattcattggaaccccagccgtgcaacagcacgaacaccggggtggtttcaggaccggtcaaacgggtcagagctttggtgatcttcatagcctcagtgtatccaccgtttgggcgacaataatgccctgatgttcgcccatcgagtaacgtcccataagtaatgcgtatagcgcagcggccgtgccacgtgttctgatactctacgatgacacggcaggggggacaggtatgttcggcccccgaaatcgtacatgggtggctaagaccgtttatgcgcaggagaagaaacgagaagcaaaggaaggagcgcgtccaatgacattcgattggtcgttcgtgcagcgttacgcgcctttcttcgtcaacggcacattgatgaccttattcatatccgtgtttggcatattacttgccatcgcggtgggtctggtctgcgctggcgtggaaatcgcgcgtatcccggtcgcccggcaaatcgtgagaatctacatcgaacttagccgcaatacgccattgctggtacagctgtactttctgtacttcggcctgcccaaactcggcgtagtatggtccgccgaaacctgcgcgatagtcggccttggattcttgggcggttcctacatggccgaggcaatgcgcggcggattggaagcggtgcccaacgtgcagcgcgaaaccgcgtacgtgctgggactgacttccacgcaaaccatcacccgagtcattctgccgcaagcagtgtccaccgccattcccggcgtagtggccaatgtgatcttcctgtttaaggaatcgagcgtcgtctccgccattgcgctcgccgacgtgatgtacatggccaaggatctgatcggcatgtattacagcacctatgagtcgttgttcatgctggtcgtggcctatctggtgattctgctgccgatttccatcttcggcacatggttggagcggaggttcgattatgagcggcgctgaaatactgctccagccaggcgtattcccacgtctgttgcaaggcctgtgggtcaccgtgtggatagccggcgtatccgtaggcgcgtccatcccggtcggcctgttgatgggctggttgatgacgctgaagaatcccgtgatccgggccgcgatgcgcatctacctcgacttcatccgcattatgcctcagctggcgttgctgttccttgcctactacggttttgctcgatggttcgattggaatctcgatgccaccggtgcctgcgtgctggtgttcatcctgtggggaggcgccgagctgggcgatctggtgcgtggcgcattgcagtcgattcccaaagtgcagtacgaatcgagctacgtactggggttgagcccgtggcagaccttctcccgggtgattctgccgcaggctgttcgccgtatgctgccggcatccgtaaacttggcgacacgtatcgtcaaaacgacatcattggccgtgctgctcggtgtggtcgaggtcatcaaggtcggccagcagattatcgacgcgaaccgattccagttcccgaccggaaccttgtggatttatggcgtgattttctttatgtacttcatcgtgtgctggccgctgtccattgtggcccgccgactggaaaagaggtggtcgaatgactgaacccgaaacgacctgcaagggtttcgaggtgaatcatctggtcaaacagtatgcgaatgccgacaagccggtgctggatgacatctccttcaaggtggagcatggttcggtgctcgtggtgctgggtccttccggctcgggcaagtcgacgctgctgcgcaccatcgccggtctggaaccgattcagggcggcacgatttccatcaacaatcaggtgatcgatgccggcaagcctggcacggaacgagccggacgatccgaccggtccagtgaactgcgcacgcgtatcggcatggtgttccaaagctacgatttgttcccgaataaaacggtgctcggcaacatcaccatggcgccggtgctcgtgcagaaacgcgataagtccgaggtggaggctgaagcgatccggttgcttggccgcgtgggacttgccgatcgcaaggactcttggccgcacgaattgtccggcggtcagcgccagcgtgtggccatttgccgtgcgctgattctgcacccggaagtactgctgctcgatgagattacggcggctctcgaccccgaaatggtgcgtgaagtgctcgacgtggtgctcgaactggccaagtccgggcagacgatgcttatcgtcacccacgaaatgcagttcgcgcgagccatcgccgaccacatcatcttgctggacggcgggcacatcgtcgaggaatcgtatgatgcgcaggcgttcttcgaacacccgcaagccgaacgtgcgcagcagttcctgcacaccttcgaattcgagtgattcgattgtgtcatatcgacgtatttgagaagaaatatgaataacaacaagagaaggagaacccaatgagtatcaaggttgggaaatcattcaaagcactgattgccgcaggcgcggcattggtaatggcggcgtccatggccgcatgcggtccgtcggcaggcaccccgagcgaagcgaagtcctctgacactggcaccagctccagcgccaatgccaaggcccgcagcctcgacgagatcaagaagagcggcaagatcaagattgccgtcttctccgacaaggcgccattcggctacgtggacaaggacggcaagtaccagggctatgacgtctacttcgccgaacagctggccaaggatctgggtgtggatccggaatacacgtcggttgacccggctgcccgtgtggacgtgctcacctccaacaaggtcgatctggtgctcgctaacttcaccgtcaccgatgagcgcaaggagaaagtcgacttcgccaagccgtacatgaaggtggcgcttggtgtggtctccccggagagcgcccagatcaccgatgtcagccagctcgacggcaagaccctgatcatcgctaagggcaccaccgccgaaacctggttcgagaagaacgcgccgaacgtcaagctgcagaagtacgaccagtacgccgatgcctacaacgcgctgctggacggccgtggtgacgccttctccaccgacaacaccgaggtgctcgcctgggccaagtccaacaagggcttcaaggtcggcatcacccaccttggtgacgacgacaccatcgcgcccgcagtgcagaagggcaacaccgaactgctgaacttcgtgaacgacgagatcgtcaagctcggcaaagacaacttcttccacaaggattaccaggagactctggagccggtctacggcaacgaagtcaaccccgatgacatcgtggtagaaggcggagccgtctgacggacagtccggtggactgtccgtaggcgacgccgagccgcggcagcggcgaggtgtgttgggccggtcgtcaggccgtccattcttgcaggacggagaggtctgattatacccgtccataaccaacacatatagcaacgccggccttcgggccggcgttttgcgttaaggtcgtaatcgtgccgcgcggggaacggcttcgcgcagatgacgcaacactttaagggggtgcgcaatgaccaggttcaatactcagctcgtccacggactgccggttggagacaacaacaccggagccgtgaacccgccgatctacaattcaacgacatatgctttcgagagggtcgacgcgatgccccgttacgactatgcgcgcagcggcaatcccacacgtgacttcctggaacagcagatcgcccagctcgagcagggaacgcgtggttttgcgttcgcctccggtctcgcggcgatccacgcggtgctgagcattttcaagcccggcgaccgcatcgtggtcggtgacaatatttatggcggatcgtattcccagctcaatgagttcttcactcgctggggaatcatcgttgaggccgtcgacactcaggacatcgcagcattggaggccgccgtcaagggcgaccgcgcgaacggcatcgtgcctgcccaagccgtctactttgaaaccctgaccaatcctctactcaaggtgaacgacgtgcgcgccatctccacggtggcccaccgtttcggggcgctttcgattgtggataacacgttcgtgaccccgtatctgcagaagccgcttgctttgggtgccgatgtggtgattcactccgccaccaagtatctggccggtcattctgatgtgaacgccggtctggtggtcgtttccggtgaggatctggcgagccgcgtgtacttcgcgcagaaccgtttgggtggtgtgttggctcctgctgagtgcgacgcggtgcgccgcggcattcagacgctggcccttcgcatggatcgtcagcaggagaatgccaatgccatcgcccgctacctgctggtgcatccgctggttaaggcggtgcattacccgggtctgcccggcgcaggcgaccagcgtctggctgccaaaggtctcaagggggtcggtggcgtgttgagcttcgaggtcgtgcctggcgttgatccggctgacgtgctcaacaacctgcacctgttccgtcttgctgtgtcgttgggtgcggtggagtctcttgccgagctgccgtgtcgtatgacgcatttcgaactgcctcgcgaggagcgtctgaagatcggcatcaccgatgaattggtgcgtctcgccgttggcatcgaggacgccaacgatctgatcgaagatctcggccaggcgttcgatatcgcttacgcccgttacatcgatcggcatgccgacttcgacgtgttccaacagctgacttcgggggtgtttgcctgatctaatacttttctgcctatttttctactcctggggagcggcgtcggttgtgccacaccggcgccgctttttttatgctctggttccgcctccgctggcagagggctgtcggcgtagccgactggggtggttaagcggaccgcccgcattatgccaaccgcgatatcacagcatccccgttacgatgaatacggtttgatagtgcaccgcgtaaaagtcaagcgcggcggaacaaagaaaggacctgatatgaccatcgacgtctacggtgccacatggtgcggcgactgccgccaggcaaagaacactctcgacaaactgggcgcggcatacacttggcacaacatcgaggaagaggaaggtgccgccgaccgtgccgtggcgatcagcggccagatgcacattccggtggtgcggtacgatgacggctcgttccaagtggaaccctctgcagtggatatcaggaacaagctgcaggagctggggctgctggctgactaggaatccgtggtctgagctgcataaggcgtgcgtcatcgatcggtcttgatggcgcacgtcttatctgtttatgcggatcagagagtagggggcttacgcttcggtgcccactactgttccagttgccgggctttgaccccaatgcgatttcggtagtcggcaagcatattggcaagcgtaacttccctcatggaatccgacatggctttggccactggagcatacgcatctttgagaacgtcgtggatattccgagccacggggcatgtgtgatttcctctctcgtggatgccgatcacatcatcgaggttcgtggattccactgcctgatagatatcgagcagagtgatttccttgggggggtgcgggcaagttcggcaccgccggttccgcgtgccactgtgatgagccccgcgcgtttgagcgctcccaaggcgttacgaatgctgacggcgttcgtcccggtgctttcggagagcagcgcgctgggcgccgatcgttatttcgactatcgcatcgagaactatgctgaagctctttctgacgcaccggttgaccatgtcatcgacaccttaggcgaaacggcaaagttgttatccggatggagtgaccgagcgtctttgcgctgattgctgatttgatatgcgttatcgccagatatgaaaagagaaccatgactcccttttgatgagattgtctgaaggtcaacgattggtccggatgcaatatgtgtccaaggaagtttctgaagcgttggtgtcgcaaattactaaagggttcggcatcgatgtcaacataatctttggagatatcgacatcgtcgcggataccccgatagggggcatcgtggccattttcgatggtgaaccggtacggattgacgcggctttgaattatttgaggcagcgtaatattgcggccgaggtgctgaaagagggctgggcagcttggtgtgttccggcattcggcggatattctatagccattgcttataagcgcgcattgacaattgcgataccgatgtgccggtgtcgcgtaccatgacttgctaagttcgggaatagagtcgagcccgccacaatagagcggcatgaggaagaaggattaatggacgttgatttccgaacgcaagccatccacgccggctacgagccgctggataacggccgtgccgctgtgccgccaatctatgcctcggccgcattcgacctgggtgacgcggcgcgcggcgatgcgctcgcgggcggtgacatcgacggcttcgagtactcccgtgtggccaatcccactgtcgatgcactggaaaagcggcttgccgcgctggaggacggtatcggcgccgtggctgtcggctcaggcatggccgcagcatactgattggatgccgcacttttttataagaagccagcatgcacacatagtgaacagttgtacacatatgcgtacgatgtctaccgctttgttttgaacgctgatacgatggaaatcacgagtcgaggccgagggcggtttcgacgtgggtgaagggaaaacatcatggccgtattctttgctggtccgctgattatcatcgtgctactcattgttctgctgtctgccgcactcttcgtcgtgccgcagcagcaggcgtacatcatcgaacgcttcggcaagttccttaaggtgcagttcgccggcatccatatccgcatcccgttcgtggaccgcatcgccatgaaaacgaacatgcgtgtcaaccagcttaacgtgcagctggaaaccaagacgctcgacaacgtgttcgtcaccgtggtggcctccacccagttccgcgtgaacccgaacgatgtggccaccgcctactacgagctgcgtgacccggccggtcagctgcgctcctacatggaggacgcgctgcgttccgctatccccgcactgtctttggacgatgcctttgcccgcaaggacgatgtggcgttcgacgtgcagaagaccgtgggcgccgaaatgagccgtttcggcttcaccgtggtcaagacgctgatcaccgccatcgacccgagcccacaggtcaagaacgcgatggactccatcaatgccgcccagcgtgaaaaggaagccacccgtcagcgtgccgaggcccagcgtatccagatcgagacccaagccgccgccgatgcggagaagactcgcttgcagggtgagggccaggccaattaccgccgcgagatcgccaacggtatcgtcgaccagatcaagagtctgcaggctgtgggcatgaacatcaacgacgtgaacaacgtggtgctgttcaaccagtacctcgacgtgatgcgctcgctgtccgaatcgaacaacaccaagaccgtggtgctgcccgcctccacgcccggcggttatcaggatctctacgagcaggtcaccaaggccatgctcaccgcttccgagacgaagtaatcaccccgtttgcgaatccccatccatcgatagtgaagtccctccaagcgagggacttcactatcgctatgcctgaaggaatgccggaatggcctcggccgccgcgtatcccttgcgatacatcatttccagaccctcgaagttcttttttagggtgttgaggccatagaggtcttccggggcgagaatcagcacgcggccttctgcctcgtaatgcttggcgagttcgagttcgtcgttgtaggtcttgtagcgcatgcgcagcttctcggccgcggcggggtgggagcgttcgaggatgcgggccggagccaaatccttctgctgcttgcgcacttcgtcacgcaagcgagacagaatcagaatcacgcgatcgtagccgtcctccagcgccttctgcaccggcaccggatcggcgatgccgccatcgaaatacggcacaccatccaccacatacggctcgcaggccaccggcacggcggacgaagccttgatgatgtcgaaatcatcaaaacgcacgcgcgatttgtcgaagtacttggtcgagccgtcctcggcattgcaggccaccacggtgaacccggtctcattggcctcgaacgccgcgaaatccaacggattctcgccatcgtgattgctcagcgtgccgtagatgtagtcgaggttggcaaagttgtggttcttgaagaagctttccgcactcgcgtactccttgcggaaggcgtacttggtgtagaaggtgtggttgcggccgtgctggcgtgcgatgaatgaggtcatattggccgcgccggcggaaacgccgtagcacatatccacgtcgatgccgtcctccagcatgcggtccataacaccacagccgaaaatcgcgcggaacccgccgccgacatcaatcatcgccgtctttgtcataccaaccccctgttcacttgaatctggtatgagcttacgcgtgctgcacggacaacgatatgggcagtgtgctgtgaatttgtctggttcttccttggcttccctcagagaggggagccaagaacggctcatacgttcagcaatttgcgtgacaactcggcaatccgttcggacggatcggaattggcgagctccacgccgccggtcgcgtcttcgggtgccagtttgcccagggactccaacaccacgcccagatggcgcacggtaccctcattgccgtcgatgacagcagcccgttcgggcagcagctcgcggaagtagtcgcggtagaacacgaaatgcgtgcagcccagcaccaccgagtcgatatgctccatgtcgtactggtcgaagtagccgtgcagcgtgcgcatcaccaggtcatggtcgccgagccgcccggattccacgatctccaccaagtcggggcaaggctccttgaaaatcgtgttgttggaatcgaatcgatccatcagtttggcgaacttccgctcacgcaaggtcaggggagtggccgccacaatcaccctctggggaatatgatgcgggtcggaaggcacgtcaccacggtcgcacgccactttcagggccggctccatgccgatgatcggaatatcgtagtgttcgcgcaaatcgttcaccgcggcggaagtggcggtgttgcatgcgatgaccacggccttgacgccttgacgcacgaaccgttcgacaatatcgaaactcagggccctcacttgttcaggcgtcttgatgccgtacggtgcgttggccgaatcaccaaaatacagcacatgctcggccggcatatccttggcgatttggcgagccacggaaataccgccaagacccgaatcgaatacgccgattggagccgaagagctcatgcctgaatcctccctatagccatgcctgcaaccgtatgttgccgcgaccgatcacaaagccgattgttttgcggtgttgtttcgctccctagagtactctgaaagccatgagtcttccgcaacgagtaaccaagacacacgcaaccggcaatgatttcgtggtatacctcgacaagtccggcaaattcgagcctaccgccgatgaggtccgattcctgtgcgaccgtcacttcggcattggcggtgacggcctgattcgcctgacacggcctgatttcgtgtctgatttaagcgatgatcagctttcggacgtactggccgggggcgcgaaatggttcatggactatcgcaatgcggatggatcgttggcggagatgtgcggcaacggtacacgcgccatcaccttgttcgctcagcgtgagggtgtggccgactccaccgagccgttccgcctcggcacccgtgccggcgtcaagattctgacgccacgcggcaatatgaggccgtacggagccaacgtgttccaggtcgaaatgggggagtggaagatcggcgaaaccgacgcctacgaggtcaccatccccggcactgagggctcggcgcgcggtacgttcgtggatatgggcaacccgcatgtggtcgcggtgatcgaggatgccttcgcgtccctgccagtggttgaatcactggatttggtcaccaaaccagtggtggctccggtcatcgaatccgaccagaacgtggaattcgtgcgggtcgacgacatcgaccagaacaccggcgtgggtgaagccacgatgcgcgtcaacgaacgtggctgcggcgaaaccctgtcctgcggcaccggcctgtgcgccacaggcattgtgctgcgggccaagaccggcatcagccactgggacatcaccgtacgtggcggtaccctgcgcgtggacgtcaccgacagcgacgtaaagctgaccggagcagccacgctggtcgccgatatcgatttgttgtaaaggaatcaggcagcgaacagggccgcgccttcggtgacgatgatgagtaccacgatcgccacgatccacagtatatcgaccatgaggtcgatgttgaggcggtaatacttattgagtccggccggcaccattgcgacctcagcctcaccgtcgctatcatcagccgccacagctttacgtgacggcaatccctgcacggccacggtcgcatggctcaacgccatgaactggatggtggtggagaacatcagggtcaggcaccacgggcacagcgcgtgaatcacgaacagcgactgcgtgctcagccagtacgagtaagccaaagcggccagtccgcccagccacgtgcaggtcgcgaaccaacgcggcaccttcacacgcgccagaccgatcaccgcgatggtaacgaacaccgattcggcggcgatgccgaagaacgcgttcggatagctcagcccgccgaatttcacgatttccgcctgccaggactgggccaccgccgaacaggacaccgccgagttcagatcgcagccgagcgcggacttcggatgccgagccaattgcaaagtctcagcggacagaatgagcgaggcccccaacgccactgccgaggcaatcagcatgatgagatatgtccaagtggcactgtggcgccatccaatcaacggtcgtgcctccgccaagccaagcggcgtggtgttcgtggtgctggatgatgtgtcggttgcggtgttacgagtcatcatgtccctttcgatagcgctgcgctccagattagcctctgcggttgtcagctgggtgccgaatgtctggtttcggccgttggcagaaggtgacgacctgtctgcgccttgcgtgggaatgctgaaatgaggttacgatggaaggtatgactggatatgtgatgcctttggaaccgcccgccgtcgggtgggacatccactgccataccgccttctcggatggcacggaaacgccggccacgttggccgaacaatccaaggcattgggactcaagggcgtggccatttccgatcatgacaccaccgccggctggccggaggccgaagccgcggctcatagggtcggtttgccgttgctccgcggcaccgagatcaccgccacggatgagaacgtctccgtgcacatgctcggctaccagtatgatcccacgaatcagcgcatcacggacttgttcgccaatactcgagccgcacggttgcaacgcacgcagcgcatggtcgaattgttgtctcgtgattatccgattacctggcaatccgtgctcgcccaagtcaaggagggtagcaaaaccaccattggccggcctcacatcgctgatgctttggtgagtgccggcgtatatcggactcgttcggaagcgtttgcggatgcggtcagcgcctcatccaaatactatattcccacgccttcgccgacctctcatgaagtggtggccgccgtcaagggagcgggcggtgtgattctgatcgcccatgccggtgatgtgagccgtaaccgcagactgttgtccgatgaccagatcgaggcattgatcagcgaaggactggacgggctggaggtatggcaccgtggcaattcaccggagcaacgagaacggctgctcaccatctgccgccggcaccagctgctggtcaccggtgggtctgactggcatggcaaaggcaaaccgaacaaactgggggagaacctcaccgacgaggccactgtcgaagagatcgttcatcgcggcgtgcttccgctatatcggtgattcagcaatacaaaagcggccttgagataatgcccaaggccgcttatgcgcgattcatggtcacagcgtgccgaagccgacggcgtgcttggtttcggagccgatgatcgcgtaaccgagtgccttggcgggcacgatgatgcgacggcccttgtcatcggtcagatcgatcgtcgcgttgtcggccacggcctgcgcgatggcctggctcacattgtcggctgattcgtcggtgctgaagttcaccggtcgtgccacgttctgaatgcccagttcgatatccatataaggctccttgttctgccgtctttgtgacgaacatcatggtaagtggccgtcgccggccgaggttctgtactctattgtgccgcgtgtctgcgtcgtcatgtgcggtgttacgcgctcggcgtggcgcggaacaccgcacacgacattatttggatgatgtggacgattcggccagcggattgccctcgctgtcatacccgtccaacccggcacgggcatcgcgcagagcgcgttcttcccgctccaacagcggaatcaccgtggtttgggcactcgaggctccgtactgaacgagactgtccggagtatcgtcattcaccgcatcgtcggtcggggcggcggattgagacgcaggggaagcgtcggttgacgtcgtgccgctatgcccgttcatactgaggagctccttcagcgtgatcgtcaccgaagaatgggaagcgccatgtgagggctgcggtttggtcgatcccgtaccggttgcgatgccggagacattcgtttgcgggtgattggcggtccggtcagcatcgggttcgacttccggggtaagatccacgtcgccagcggccacgatgtcagcggaaccggtgcgatcgggatcgggcgtgtcgtccgagacctcggccgccgcggtaccggtgtcggactgctgcggttgtgcgggtgcctgatgacggtcgtcctgcaacaatgtgccgacggtgattgtggaaggcaaaccgggcttcgttgacgaggcggcggtcgaccctgcggctggggccggtgccggagtgtgcttgatcacgcccaactggtgtgcgagtcgttcgacctgtgccttgaactgcatgatgtgatcgttgtccgcacggttcaacgcctgaatgaattcgcccacctgttccatctgcagccacaggttggccctgagcatgatgagatcgtcaagtcgagagcccatcatgcggccgtatgcggaaagcacggcgttgcgatgggattcgtcgagcttgccgaaaatccaggcaaggtctcgtgccggatcgttgacctgcatatcctgccagttggtcaccgtggtgatggtggaaccggagaacaggaagtcgccgtcggaaaatccgccgtgaaccgtgcaggtggagaacgaccacaatccctcggtgtccatgatgcgcgcccagctgtcggtgatttcttggggaacatggccggcggagcgtaagcggcgaatccaggcggtcagctgcgaacgaatctgaccggtggtaactaccggatatttggcattggccagaaaagtcgaaggcaggcgatgaatggctccgatggcggtgccgacggccgcgcagtcatccaatgtcaacaggtcgagaggccgcgcctggccatcacggtggacggcaatcatcacggtcgtctcgcctgtgggaccgggcttgcgcggggtcagcggtgtggactccgcctgagtctgctgccccacggcctgtgcggtggccgtctggccgggtcgggaaacgtctcccggggcgaacgcgaccacacggtccatatcgaagccgaggccaccaggctcgcgcgcggctgccagtgtctgcgccgctttcacacggcgaatcagacgcgtacgcccttccttggtattagtggcgtatacgtcgtacaacttgcctgaggcatcttggatcacggtctgatcgatgcctttggcctcgtcggttgcgctggcctgcacgttctcgcgtacgccggccacccccagattcggcaggacggctgaggcgagtgccgccaacatataatcgctacgtttcatcacccttccacactaatacatccgtggcgattcgcaccgcagaatgacacgcaaaacgcatgattctggcgatgttttgtcgtgagtccgattcagccataggcatgagtcgtgccgtgagcgcgaatcgtgccacaatggacgcatggaacaggcgcaggggattcttgaggggctcgatgagcggcagcgtaccgccgcgactacgttgcaagggccggtgcgcattatcgccggcgcaggtgccggtaaaacacgcacggtcacgcggcgaatcgcctatgcctgcgccaccggggcatggaagccggagcgggtgcttgccgtcaccttttcggtaaaagcggcggcggaaatgcgcgcacgattgggccagctcggcgtagggggaggtactggacgttccggtttgggtgcgggaactgccggagtcacggccgcgaccttccactcagcggcattgcatcagctcaacagcgtctgggcagacatatgcgaggctccatttccgcatgtgatcgaagatcagcgtgacgtcgtctcccgcgcgatcatccgcgccaccgcacgtaccgatgccgatccgctgaccgttcgcgatgtgctcgccgaaatcaattgggccaaaatctcgttggtggcggtggaagattatgcccgggcatgtgccatcgcccataggcagccgcccgccggactcgacaccgctcggttcgccgacgtctacagcgcctacgagcaggaaaagacctcgcgtggcgaaatcgattttgacgatattctgctgctcgtatgccatatcatggatggttttcccgaagccgccgcccaaattcgttccaccatcggctggctcaccgtcgacgagtatcaggacgtctcgcccctgcaacacaggctgctgaccctgtggctgggcgggggaggacctgacggcaagagcgcaatgaaccgcaacgtatgcgtcgtgggcgatccggcccagaccatctactcgtttgccggtgcctccagctgggatctgctgcgtttcgccgatgaattcgggccgctcgccgccgatgtcaatctcaacaccgactatcgttcgacgccggaagtcgtgaacctcgccaaccgggtgcttgcggccgcgccgaaccgtgaggattacctgaaactggtttccgcccgtgaatccggcccgcgcgttacccgaaccgcttatgagagcgatatggaagaggcacagggcgtggcggcacgcatagcccggttggttgccaacggggccaagccgtccgattgcgcgattctcacccgcatcaacgcccaacagccggtattcggtgccgccttgcgcgctgcgagactgaaatatcgcgtccgcaaggattcgggatggcaatcatccgcgctcgccgacgatgccgcgtccaaacgcgcactattggaggcgatgggtttggacgccaccggacttgccgcaaacgacgatctcggggttacgatttccacgatccacgcatccaagggtctggaattcaagcacgtgtttctgatcggctgttcggaagggctcttgccgtatggttcgccggaaacgggggatgcgctggaagaggaacgccggcttatgtatgtgggcatcacccgagctgaggattcgctgcatttgtcgtatgcacggaccaaggatggttatggagtgcagcgcagacgcccatcacgatttttgtgacgggcgtctgtaatgcatactgaatgctcctgaacgtcgttcaggagcgggaattggctgaaggccggttgactatgcctgcgtatcctccgagttgccgttttcaccgtcttcgccatcttcgccgagcagcttggacagttcggcatcccaatcgatatcgccggtcttgccatctgcggcagggtgagaagcggaaccgttggcatcggaagaagaacctgaaggggcgtcggatgacggagacgcgccatctgcgggcttgtcgccaggcagcgaaggcagcagatcgggatgcgaccacttggcgtcacggccttcagggccttcggcggcggtgatcatctcccatagcccggtggcctcgtgcatgcgcttgggacgcagctgcaaaccgagcagactttcgaacgtacgctcggcggggccacccatcgcgcgctcgcggcgcatcatctcacgcaactgttcgatatgaggcagatgggccataccggcgcgccacaccacgcaatccacccagccctcgaccatagccagcagcgattccagcgaagccagcgcctcgcgctgttcgggagtgtcggggatgccgaccttggtgagattcaccgcgccggaaatcgactccggatccattgacgtggcgtcacgcagctgttcctccatcgcatccagatcaatggagatgccgcgtgcgtacttgccgatgagcgcctcgaaacgcggcatcagccacggtaccgaggcatacaggcgggcgtgagccatttcctgcagggccaggaaggaaagcacttcagattcggggattttctcggtggtctcgaatccggagagcgcagcctcgaacgcggcggcgtcggcggcatcggcggaagcatcagagccggagacttgggcggtaccgtcagttgccggagtatcgctgttgccggccgaagtgaagccaatgggattggcagaagcgtcggtggatgtggagaacggattgaccgagtcggttgaagtgccggccgtgtcggcctcggccgcagaagcctcaccgttcagcatcttcgcgtattcggtggcgttctgggcaatcagtccaccagccgggttcttcagcaacgcgatgccctgatcgaagctgccatgcacttcatggctcagattgccggccgcatgccccaactgcatggcaaaggacgtgttgcccagcagcttcatcagttgggctgggtctttcataccgtcgggaatcggaatcggcaccggtccggcgaacatgccggcaatctcgccatcgccgaacgcgccgccaagacgctccgaaatcaccgaagccaaagcgtcgttcatcgactcggccacaggagctgcgaacttcgcccactggtcgatggtgccctccacccagccggcgcgggtcagcacatccggatcgccgggcgcgggattgaactcgcaggcggtatccagccacaggttcgcctcactcatcgcgcggcgagccgcctcgccatccacggcggacacgctggatgcagaaccggaggcgttggcctgctgcaaggcaatcgacttggcgagcttgacgttgatcggcccttcctcgacagtgcgctgcatatcgcccatcgtgttgagtccgccggcgctgaacgcggccatcatctgctggacttcagatggattgggcagtcggctggggtcctgactcatcagctgttcacggatctcctcaggcaactggctgatctgctgccaggccatctcaccctgaatggggccgaagcatttgatcagccactcgtgaatcgcgttgtcgtccatgcgtatccttctttgccgcggtgtgttaccccaagtgtagggtctgcccgggcctgttcgcttgtggccgagcattattttcggtttatgttcgttttcggccgatttcggccctccgcttacactgtagggtatgtttgcacgccacaggaatcaggaaccagacctcgtccaggagcaggagagcccgactgcggattcggaagcgggagatgagcacatgccatcgttcgaagtggagcatgattcgcgcctatctcgtggaatcagccgtgctcgggcctatgcggccgctcgttcgaaacgccatttcgtcggtgcattcgccgtgttgcttggtgtggtgattctgctgctgcccagcccgtacgtcatcgagatgcccggacccacccaggatgtgctgggcaaagttgaggatggtgcggttatcgacatcactggtaccggcgtgacgacgtataaggattccggcaagctgctgctgaccacggtgaacgcgtccggcgtgcccgggtacccgatcatcaacgcgcaggccgtctggggttggggcaatccgcaggtggaggtcatgccgcgtgaggccacggtaccggtgggccagagtgcggaccagtatcagaagaaagtcgaacaagacatggccggttcccaggattcggccagtgccgtcggtctggcgtatgccaaagcccatgcggacgaactggacattgacgccagtgcattgcaacacgccaaggtgacgatgcacgtggacagcatcggcgggccgtccgcaggcatgatgtacacgctcggtctcatcgacaaactcacccccgccaacgagagcggcggcaagaccatcgccggcaccggcaccatagacaaggacggcaaagtcggcagaatcggcggcatagagctgaagatgcttggcgccaagcgcgatggcgccacatggttcctggcccccgcgtcgaattgtttggatgtggcaggccgcgtgccggatggtctgcgcgacgtcaaggtcgccacgctgaacgaggcgtatcaggcgttggtggccatcggcaaggggcaggccgacgatttgcctcattgcgaggcatgacacgcgcggccagtcgttgtttctggtgagacgactcgcatgggtctgcccacaatgcggcgattttcggccgcgttaacgcatttgttcgcgaagacttgctaatgtgtcccctgtgaatcaaacggcatcacagaacgctgaagaatttggtttcgagcccggcgatatcgtccaggagtggctctgggacgacgacgtggacgattccattcgtgcccagattgaagagctcacgggcgaggatctcgtggacgaggactacgactccgctgtggacggcgtcatcgtatggtggcgcgacggcgatgatgaggacgaattgtccgatacgatcgttgacgcctacgcggtactgggcaatgacggcccgctgtggatactgactcccaagcccggccgcccgggtgccgccagctcgtccaccgtgcagtccgctgcacagaccgccggtatgaacgccgccaccccgctgaccgtcagctcggactggaacggcatccgcctgcgcgcattcggcaagggccgctgataagcctcaatcaatacgcttgactttaagcgtgttgaccggcgtcgtgtgctgcgtagtgctgctgggcgtgactgaatgtcattgcgattgagcgctacggcacgcgtatgcgacaccacgtgtcgcgcagtgctggccatacgctattgttgtcatttgcgggcaattagctcagttggttagagcgccacctttacacggtggatgtcgggggttcgagtccctcattgcccactttcatttttcatcgcttcatgcaatcccctcattccacggatataggctgtgacgatattccctgacagtcttcggcaagggttctgaaatctcaatgagatgcgtgcagaaggaaaccggcagtactgctacaaaatcgtgaatttcggtcttcttggtcagatgcgtctcaatagtcacgtaaagttgtggcagagtgtttatatccagcaggaggtcgaatagccgatggcgcaggaacttcgtgaaggggacggcaagtcgggcatcgcacgtgcgggcaagcgcaagtgggggtatgaccccgctcaggtggacgctttcctggagcgcgcccatgctttgtatgacagcgagggcatgaatctcacccagcatgacattcagaacgtgtcctttgatttgcgcaagaacggctatgtgatcgcacaggttgacgccgcgcttggacgtctggaacgtgccgtggtcgataagcagaccacatgggagatcgcacagcacgggcgtgtgacgtggaaggcgaagaccgagaagctgtatcacgaagtccagaaccatgcggagcgtaacgagcgcgaacgcttcaagtccggagcgcccaagcagccttcgtacgataagaagcaggtggatcgtctggtcgaccagattgtggacaaggcggcggccgcattgggcgttgacggcgttaccgaagacgatgtacggtctttggccgatctcaatgcgaatacggtcaacaatgtgatcttcacccagcgcaagggcaagaaaggctatgacgagcgacaggtcgattacttcctgaacgcctgcgtacagttgctgagtcgcttggaatcctatgcccgtgtggccgatttcgtgtccggcgagcctgcggctcctgcccagaccgccacgaacgtgaccgttcaagcgaacggcgtctcaccgttgttcgcttccggaacgcagcgcccggcaactgacgaacgttttgctccggctgccgttgctcatgacgaatcattcgatgccctgcatcaggccgagcagagcttgttcactgctccggctccggttgctcccgcagcgccggccgcggcggcaccgatcgcctatgcgtcggctcctgcatcgttcgatgcttccacaagcaccaatagcaccaatgcggaacagccggtttcctttgctcccgcagcatacccggtgcatgcgtccaacgagtctgcggcgaagcccgtctccgagacgccttccgtggctcctgccgcagttgctgcggctgagcctcccgtcagtgccccgtccgcgccggtttccggtgtgaccgctggcagcgtcccctcgtttgctccggcacaggcagctcacgaacccgcagctccgtcatcgaccccgtcggtgttcgcggaacagcccgtggatatggtgcagaacgattcctctttggccgctctcgcccacatggctgcggtttctcaggaacttccggcagtggatgcaccgtccttcgctcctaagatgcccagccttgatgcaccgaatgcgctgaaattgaatgaggtaccgggttcggtttcatccccggcaccctccgccccggcagtacagcctgtgaatagcactgctgacgaggctgcgtccgctgctatgccggtctcctttgctcccaccagcaagccggatcgtaacacgaactccattccggttcgcgtatccgatagtcagcctgcagacagcacgatctcccgtccggctgcggaatcatctgaatacgttgccgcctcccatgacacggaagcagctcagccgtcacaggataagcacgattccagcgattcgttcccgctgctgttcccgcttggcggtaacttcgattcggatatccccgacctgtcgttccccacactgaacaatgacgatacgaagaaggaacagtgagcatagcctccaactccactgtcatcattctcggatccaccggatccatcggcacccaaggacttgacgtcatctcgcgtcatcctgaacgatttaccgtcaccggtctggcggcgggcggagcacatatcgagctgctggcgcaacaggccgcacagttccatgtgtccgaagtcgcggtgtttgatgagaccaaggttccagcactgcaagcagctctcgcacaggccggcgcacaaggtgtccgcgtgaccggcggtccggattcggtcatcgccatggccggctccggtgcgaatgtcgtattgaacggcatcaccggctccatcggcctcgaaccatcgatcgcggcgctcaaggccggttcccagctggcattggccaacaaggagtccgtagtcgcgggcgggcatctgctgttcagcgcgcaagtgcgcgagaaccaaatcaacccggtcgattccgagcattccgccatctggcaatccctgcgctccggaacccacgccgaagtcgccaagcttgtggtcaccgcctccggcggaccgttccggggctggaaacgtgccgacatggagaacatcactcccgagcaggcgctgcatcatccgacgtggaacatggggccggttgtcaccatcaactcctccacactgatgaacaagggcctcgaagtcatcgaggcgtcccgcttgttcaacgtgccgcctgaacgcatcgacgtgaccgtgcacccgcagtccatcgtccattccatggtcgaatttgtggacggcgccacgatttgccaagcttcgccgccagacatgcgtctgcccatcgcgctgggcctgtccgcgccggaccgcatgaccaatgtggccgccgcgtgcgactggacgcaagccgcaacttggacctttgaaccgttggacgatgaggcgttccctgccgtgcaactggcccgccactgcctggccgcctccgagaagcatacggcggtgctcaatgcagccaatgagcaggccgtgcatgccttcctcgagcatcgtctgccatacctcggcatcgtggacacggtcaaagccgtgctggaccagatggacgccgagcttcgtggtaacccgctgttcacggacgtggaggaaatgaaccagcttgagcttgaagcccgccgacgcgccgacgacctgataaacaagcaatgatgaataccttgaatacggaaaatcccatcgaaaagccgttccgcaaaaccggtgatccggtcgacctgaccagcgaatcgcccttgcacccgcgccgcaagtcccgccgcatcatggtgggcccggtgccggtgggcgggggcgcgcccatctccgtgcagtcgatgaccaacacgctcacggccaacgtacctgccacgttgcagcagatcgccgaactgaccgccgccggctgcgacatcgtgcgcgtggccgtgccgagtcaggacgatgccgacgcactgccggaaatctgccgcaaatcgccgattccggtcatcgccgatatccacttccagtccaaatacgtgttccaggccatcgacgccggctgcgcggccgtgcgcgtgaaccccggcaacatccgtaagttcgacgaagtcggcccggacatctgcaaggccgccaccgacgcgggcatctcgctgcgtatcggtgtgaacgccggctcgctggacaaggaactctacgccaaatacggtggcccgactccggaagcattggtggcctctgccttgaaggaagcgcacatgttcgaggacgtcggcttccacgatttcaagatctccgtcaaacaccatgacgtcatcaccatggtcgaaacgtaccgactgctcgcttccaagggcgattggccgctgcacctcggcgtcactgaggccggccctgcttggcaaggcaccatcaaatcctgcctggcgttcggtgcgctcttggccgagggcattggcgacacgattcgcgtgtctctctccgcgccgccggccgaagaggtcaaggtgggttgcaaactcttggaatacatgggattgcgcccccgcaagttcgacatcatctcctgcccgagctgcggccgcgcccaagtggatgtgatccagctcgcctccgccgtcaccgaaggcctgaaggacgtgaccgcgccgatccgagtggccgtcatgggttgcatcgtcaacggtccgggcgaggcacgcgaagccgacctcggcgtggcctccggcaatggcaagggccagatcttcatcaagggcaaggtcatcaagaccgtgcccgaagaccagatcgtcgacacgctgctcaccatagcgaacgatatcgccgcccaaatggaggccgacggtcaagtccccgtcaattccaccggcccggtcgtggtcccaatccagcaccccggtcactgattcggccgaataggccctcggcataaatatcgcggtcagattacaatagcgcacgtgccgcaagaagaagagcatcgcctgactgttcgatccaagccgtggaccagcacccaccggctgatggtcagcctgcccatcttcattatcctgattggcgtgctggtctccatttccaatctgaccacggtgccttggaacatcgaacccaccggccagtcgatggccacgctcaccgacgataccgaagtcaccttcgataacccgtccggagaaacgctgccggcaaaaggcacgtatgaggtcaccgagcgatacatcacgctgaacatgaccagcgacggcaatctgaccaaggagtccggtgctcggggcaaggccaatgcggacggcgtccaagctatcaaggtattgattcgggaacctcagaacgcatcaggcaagcgccccggcgtggtgttcatgcacggtgccggatacggcacctgtgacaactcctttggcgacgtggcctccggtatggcttcggccggctttgtgaccgcagtgctcgacaaacccgtctggaacaccaccgacatcaaccgcgattatccggcctcagccaaggcttatgatcaggtcatcgaatacctgcgagaccaaagcgatgtagacgaggccaaggtcggcatctatgccacctccgaatcgacatggatctcctcgtatctgctcgaggacgatccggacgtcgccttccagattctcctgagcccgatggtgttcagcccacgccaatcgctgggatttttcgtcacccaagacttcacccttgttggcgcggacgaaggctatcaatccatcgtccaacgtgtgttcagcgcggacacaggcctgttcggactgaacaatttcgacctcgccacactcaaacccgccgcctacgccgtacccacctatgtggcttacggttcgaaagacgtgatgacagcgcaggtcgacggcgtgcgtgcgattctctacaacgcccacaaagccgataactggaatgtgaccgtgcgcagctacccggtcgccaaccatgtgctgcgtttgggagatgagtccgaagcgggcaccccgtttgcggacgcctatgtggacgatctcatcgactgggccgtcggcacttccgccggactcacgcagaccagcgaaaaggtggccggcgccaatctgtaccaatcaatcggtctgccgggcgctttgaaggcaagacgcgtcggcaccatatatggtgtgattctgcacgtcacggtggtactgctgctgctcgcatccatcgtgctggcactggtggcgctgggtcgcaaaatcgcggcggatgcccgatggcggcgagagaagcgcgaggccaaacgtgcgggcatgctgataccggaacggcctgtggtactcggtttcgcacatggtttcggcaatgcgctgctgactttgaccctcaccactcttgccacattgctcatcttcttcgccggactcgggcaggtgatcatgggcgtggtcaaacttgcatggggtggcgcacctaccgagacgccgggtgtcatgtattggagctggccggtcatccaagtggtgtccgtgctggtgctatgggcttggtcccgcgtctttatgcacctgatagaagccgcttccgtccgcggcctgattcagataccccctcgtcgcgaatccgttcgagacatcgtcaccggtgctgacccggtactcgcctccacccgtctgggccgaatcctgttctggctggtggccttcaccatgctgtacatactgttggtgttcgccttctggggtctgtttatttactgactacttcattgagtagagtctgccaggcgtcgcgggaaaggagatgagatgtcgctgtaccgagacgaaggtgtggtgttgcgcacctccaaactgggcgaggctgatcgtatcatcaccattctgacgcgtgggcatggcaagattcgggcggtcgccaaaggcgtacgtcgcaccaaatcacgctttggtgccaggctcgagccgttcatgcgagtcgatgtgcttatcgctgaaggccgctcgcttgacgtggtctcccaagctgaagcggtcgccgcttatggtgctccgatcgcggcggattatgcggcgtatgaggccgccaacgtcatcgttgagactatcgataaaatcgccagcaccgaacatgagcagctgccgaaccaatatcggctgctcatcggcgcgttgaacgcgctcgccaaacaatcccacgccccgcaagccataggcgactcctatgtgatgcgcgccttggccttggccggttggacgccacgattgggcacttgcgtggtatgcggcaaggcggagccggcgtacctgtccatcgcgtccggcggtgtgatgtgcgaagccgaccacactaccgatgcgcgccgtatcgcaccgttcgtgttaaaccagttcgatgcactgattcgtggcgattggtcggtgcttgatgccgcgcctgtggagcgggttgtgcaggagttggttgaagattggggggagtattacctcgaacgcccgattcgttcgctgcgcttgatagattcatgagtatggcttttgagaacgttgattacacgtcgttggacattcccgcagctccgttcagcgaccccgctcgtattcccgacttccccaagaacaaggtaccccgccatatcggtgtgattatggacggtaatggtcgttgggccaagcagcgcggcatggtccgcaccaatggccatcaggccgccgaaccggtggtgttcgacactatcgccggtgccatcgaagccggtgtacggtatttgagcctgtacacgttctccactgaaaactggaagcgctcgccacaggaagtgcgcttcctcatgggtttctcgcgtgaaatcatccaccgtcgtgtggaacagatggacgagtggggtgtgcgcgtgcgctggtccggccgtcgccccaagctgtggaagtcggtgatcgacgagcttgaagccgccgaggagcgcaccaagaacaacaaggtcatcgatgtggtgttctgcatcaactatggtggccgtgctgaaatcgccgacgcctgcgccgccatcgctcgcgaagtgcgcgatggcaagatttccggcgaccgtgtgactgagaagatgattgccgaccatctgtacaatccggacattcccgattgcgacttggtgatccgtacgtccggcgaacagcgcacctccaacttcctgccgtgggaggccgcctacgccgagctcgacttcgtgcccgaactcttcccggactgcggccgtgacgtgctatggcgctccatcgaccattacatccaccgcgatcgccgattcggcggtgtgaaatagtccttgttaggccccctctgacgggctgagccgtaaagcaaacgcccggtggactgtttgtaggcgaaggcgagacgagagtcgagccagaagaatgcgagcggcagcttgtccgtaattgcggtcgagctgcccgtgtagcggactgaggggagttaccggcacacctcagccatcctctctacaaactcatccaaaaaacgtcccgaatccacaccaagtgccacatgcacatgcggcatggaatgattcaccagcccaaccgggtctccggtggtccggcctcgtactccattgaaatcaccggtattggtctccgcgcgcaacgcaagatcaaaacaatcgaccagtgaagaatcaagtgcaaccgccgccgccaacggatcatgcaacggcatgccgccagagaacagtgcggggtcggcttccaaatttgccttgatggaaaagtccgcgagatcagccaagaaccgcccgcgcttggtccccgtcgcacgccaccggtcggccgccgattgcggtagcaaacactggtgagtcacatcaagtcccaccattgtgatgtctgcgccggaatgaaatacacgattcgcggcctcagggtcttggatgatattcgtctcagctaccgcatcccaacaattaccgggttgggtaagcgtaccgcccatcatcaccagcctgagtttcgatgcaatatccggtgctcgagtaatagccgcatccacatccgtcaacggcccggtagccagcacggtaacgtctcggccaaactcgcgaacctgctcaatcagatactcaatcccatccgcagcatcaacggagcacctccttttgcccccgctggcgagagctgtcggcatagccgactggggatggtccaccgactgagagcggttcacacgagaacaagcacccaacgccggatgagcatgaacatcccccgccaaatacccgccaacagaaacaacctcatcgggcacatccacagacatatcatcaccaggcacaccagctccatcagccagagccccggaccctgccagccgagtattccccagtccatcatccccatggaactgggcacaccctgcatcaggaataaacgcatcagcccaagaaggatgctcagaccctaaaaacactggaatatccgcccgaccaaacaaatcaagcaccgcgcaagtattggcataagccgtgttcgcatccacattgccataaccggcaatcacgccgcccaactcgcactcatccgctgaccccaacaaatacgccaacgccaacgcatcatcaacacccgtatccatgctggcaataatacggtcaggacattggaccatagaatcgtctccttgttagcgtgatccgctatgaataaccttatcggccgatacgcaaaaatgcgtcctttcctcatgggaaggacgcatttttgcgtagattcaaactcggaatatcggaaattacttgccgatgaattcgtcggtggcaaggtccttggcctgcggggcctcatgaattatcttgtcatgactgtcggtgtatgcgtcttcttcagccaggaagtcgaagtattcctgagcgcccttgaagtcgttggtgccgagcacgaaagagccgtccttgatcttggccggatcgccccagtactggccgtcgacgataacctgcatgctcttcttgacgaattcgggcttgaggttggcgtcaggggcttcgtccacgagaatctgcgcggcgtcatccgggttggcgtacgcgtactcgtaacccttttgagtggcctgagtgaacttcttgaccaggtcgggattgttcttgatggtcttgtcattggtgatgatgccgatggtgtcggcgttgccgggcacgccatagtcaggctcggtgaagcagttgagcttcgggccgtacatgtcggcttgcacgccttcccacgtggcgtagaagccgccgaaatcggccttgccggattccatggtctggaaggtggaggtgccgacggtcaccttgtcgaattcgcccttgccgccatcggtttggatcatgcggcgcaccacggcatcggactcgttggagccgaaggtggcgaaggtcttgccatccaaatccttaggggacttgatggcggtgttggacgccagtgcgcaccaaatggcgctcggcttctgctgcacctgcagcacctgcttgatgtgagcgcccttcagcgtgtagacgcccacgttggtcaggttggacagggcgaagtcggccacaccgttgttcacggcctgttcggcaccggcctgggccacggccacgatatccacgtcaaggccggcgtccttgaagtagcccttgttcttggccacgtacacgccgatgtggttggtatcgggtgcccaggaaagcatgaaagtgaccttcttgaggtcggaggtgttggagttggaggagtcggcggtgttggtctggccacatgcggcgaaaccgaaagtcatggcaagggcgcccacgagggcagcggccttggatacaaggcttttcttcataatgatggttccctaattcgttgtctctctatcgttctctgggattgcttcgaacggaagtcggcagaaaacgatatggagggccttgatttccgttcgaccagcgcccccgacattccctatgaaagctcgggaaagccggtttgccacacgctggtaaagctgttccattatagagacagggttggagacctcatgagaagccgcttcgttcagtcggtcctggccgccggctcgtgcctttgacggtaaaaaaagaactactggtccgcgtcggggtcttcgtcgtcgccgggcgggccgagcaggatgcgctcgctggcgtttaccgccagcatcagtacgcatgtcatcaggataatgacgatggtggcggagaagatcagcggcgtgcggaatgaattgtaggcagcctgcagccagatgccaaggcccttgcgtgcgccaaggtattcagcggtggatgccgtggcgaagatgtatgcggcagatactcggataccgccatagatctgacgtgcggcaacgcgcagcttcacgtgccagagcgtccagaccggggtcgcgccgcaggtcaatgcgacgtcggaatagaactggggcactgcttctagtccgcgcacagtctgcacggcgatggggaagaggccgaataccgccacgattacgattttgccggaaatctcaaaaccgaaccaaatcaggaacaacggggcgatggaaatcagcggcatggtttgtgcggcggcaagcagcggatagaacgccgcgttgaacgtgtgcgagcagtacagtgcaatgccgatcataatgccgaagaacacggcaaacaggaatccaaccacgccctcatagccggtgattgccgcggccgggccgagcgtgttccatgtttcgatggtggcggcgaaaatctcgcttggcgcggagatcatcgtgggggagacatgtcctagatccacccacgtttcccagactgccagcaatacgatgacggcgatgacggtgggcatgcggcgcttgaggcgcttggcgatggacatgggatgtcaccttgctttccgcgccagtccggtttgctggtggcgcttgcggccggggcgtggaacagtaaggtgaggagcctgcgcgcctgccggtcgtgtgatggattgtgttatatgccgtccatcagtataggcgaaggcgaacgacagggcgcacaaaaaaacctccctcgtcagagggaggtgaaagagctactccagtccgatggacttcatgtggtggagcttcagggaatccaccttgagactaccggactcggcgacgagcttgatggcgcgcgggccttcggaggcgtaggagtaggagctcagcacttggtggccaccgttgacgtagacctccacggagccgcgatccacgaacacgcgcaggtccagcttgccggaggccagttcggcgtcggtcagtggggcggcgcggtagccgcgatcgccgttggccatggcctgacgatccaccaccacgcggccgatctggccgtcataagccacgtaggtgtaggcaccgtcctcagtggcgtgaatcttcagacccgcacgctcggcagtggaggcagccaagtcgatggtcatttcgatttccacggcctcggcgtcgtcggcgatgatctgctcgccatccatgtcgagtgtgaccgaaccatggtcgagggtatcctcgcgcaggccttccatttcggcgaccggcgcggtgaccacgtcgccgtcatcgccaagggtgatctcgcgcggcagggtgagctggccacaccagccgtcatcctccatgggaatcggctgcacgaacgggctcatccagccatagacgatctgacggccgtccacattgaaggactgcggggcgtagtagttgtggccgcaatcccacaggcggaactcggtttccggcttgaattcgccgcccggctcccacgtgccgatcatgtagccggcgttgctgacgttgcggttcatgaagccgctgggcttggaccccatggcggagaagccaatgacccacttctcgttgccgtccttgtctttgatggggaagaagtcggggcattcgagcatgaacacatccggatccgggtgctggaagagcacgcgctcgtattcccagcggaccatgtccttggaggagaacagccacatctggccgcgcttgtccgcagaggagacaccgaaggtcatgtaccaggtgtcgccggtcttccagaccttcgggtcgcggtagtggtggtcgaccttgtcggtcgggcagtcgatgatcatgccctgcttggtggcggaggtgagctcgtcattgtccggcagcgcggtcatctgcacctgccagtcgccgccggtgttgtcgtggccgttggcccagcggtggccggtgtagtagaagcgaaggtctccgttgtcgtcgatgacggcggaaccggagaacacgccgtccttctcctgctctaaggacggcgcgaacatgatgggctcgcgcttccagttgagcatgtcggtggaggagacgtggccccagtgcatcggaccccactgggtgccgtaggggtgcagctggtagaacacgtgccagcggcccttgtagaagcacaggccgttcgggtcgttgatccagccaccgttggaggcgatgtgatacttcgggtaccagcggttgttgcgcttggcggccatctcagccacgccggcttcggcttttgccagttcagcagcgtggtcgcggatgggggtgagaacaggggtttcgggagtgaagtcagtcatggctgtcctttcaggccttggccgcttccatctgacgcagctgcttgtcggtgtagaacgggtcgccgccgacttcctgatcatcatgcttgatgacgaagaagccgtaaatcagtgcgcacagcacgatggcagagatgacccagaaggtcacgcgggatcccatgtcgttgttcggcagaatctgagccatcttgtcgtggaaggcacccagaggggtcgagaagatgacctgacccacttgggaagcgatctggaagcccaccatgtacagcgtggcagagagcttggtgtcgaagtgcagagtgaagtagcggaatgccggcaggcagaacagcggcacttcgatggagtggaacagcttgacgatggagacggtgatcgggtcgtggaacacgccgcacaagccgatgcgcaggaacatcacggtagcgccgagcagcagagcgttgcgcacgccgatcttcttcatgatgatcgggaccacgcccatcattgcggactcaaggaagacctggaaaccgttcagggtgccgtaggtggcgttgccgatttcttcagtggggaagaggttggcgtagtaggtcgggaacatctgctgatcgaacacggtgtagaaggtgttggtcagcagcatgaagacgatgagcacccacagggtcggcatcttgagaacggcgaccatttccttgagggacgggttggtgggggctgcgttcgggtcggtttccttcttgagctcttccttctgctcggccgggacccagaaggcgtacacgaggagcatgccaaggccgaatgcggagccgacccagaagttgatcagcgggttgatgttgaacaggaagccggcgcacagcgccacgatggcgtaaccgaaggagccccaagcacgggactggccatattcgaaaccgaatttacgggagtagcgttcggtgacggcctcgaacagggagcagccggacatgaagccggcagacagaacgatggagccgatgagtgcgccgatccagcgggtggtgccaccggcgaggatcatcggggcgtaaacgaattggacgaatgggccaacgcaggcggcgattaccgagactacgatgacgagcttgcgcttgatgccgagctgatcctgaatcacgccgtacacaaacatgatgaccagggtggccagcgagttgatggagtagatggtgccgacttcagcattggtcaatccaacgcctgagatgagccagcgctggaagaaggaccaccagatgccccaggagcagaagaacatgaagatgccgaaagagctctgcagataggaaggattcttccatgcagatttggttgcacttgccataatcatcctttgattactacttggttggttattggttatgtaacgcttctgctcgggcggccgtgcctttgtagaagttgttgcgtagtaattattatgcgacgtcaatcgatttatgtcaatcgattgacgtaaatcggcgtgtcgtatccgttcgacacgcaaaaggcctccgtgctgaacggaggccttgagaaatcgtgtgggactcggttacttcaccgaggccttttcgatcagcgtgcagtggatcttcgccggaatcggcgcgtcgatcggcggcaggggagcggtggtcgctggccatgagacgtcgtccatcgagcgtccttcgataatcgacaccagcttggccacggcccagtagcccatctcgaaatgcggcagttccacagtggtgagcatcggttccagcgtttcggcgaacacgcgatggttgtccacgccgaccacggagatgtccttgccgaccgtgagtcctcggcgtgcggcgcattcgtacacataccaggcgcgggcatcgttgaagcagaagaatccgtccggatgctcggcatcgaacaaatcgctgactgcggtcagtgccggcccgttgttgagcacattgacgaccagatgatcgtcatagtcgaggccggcgtccctgagcgccgcctgatagccttccaaacgatcgtcctgcgcaatcagcggctccaagcaacccacataggcgatacgtgcgcatccggccttaaccaatctggtggtggcgtcgtagccgatttggaactcgtccggttccacgctcgggattttgccaagcgagtcggtggcatccaccaacaccagtggcgtcttggccagcgaggaaggcacatgggtgatgcggttcgacatcttggcgtacagaaagccgtcggtgccgtatcgcttgagtgcggcgatttcctcgctctcgctgttctcgccgtcggtgctcacggtgatgagcatatagccgaactggcttgcagcggtctgcgcgcccagaatcataccgccggcgtacggggtggtggccacctcctcactgatgaaaccgaggatgtgcgtcctgcctgtacgcagcgaactggccagcggattcgactggtagccgagcttggtggcgatggcgcgtacattgtccgcaattttggactttacgcgcccctcgtcgcgtccgttgatcaccagcgataccgtagagacggaaacccccgccttgttcgcgatttccttcatcgtaaccatgcgtcaaacgatacaccctaattgacggactgccaagaaagtatcagttttctccaccgactccgccgaggttgcgcaccgcaccgatgaataatggtatgccgtccggggtgacgtacgaatacagaaatgggcgatccaccgtgaactcgacgttgtccaccggcgcgctaacggagtctgcgccgaccttggtgaaggacatggccttggcgccggcttcgttcacctcgatgcgcgtgccttgcagaatcgagccgatatacaggttctcgccgtgcgaaccggtgtcgatcatcttggtgaagtcggcgtcgcctgcactgaacgcatcggtcacccccagtttttcgaatgccttgatggtggcttccgagtcgaacatgctgtcgatggtgaatcgcggtagcgtgacgttcaccatgaccgagttgacggagacgccccatccgggcatactgtccgcggcgcaacccattgcgccctcgccaagggaagccgtcgagcatgtaccgaacgcccaactgagcttctcggcatcgccggccaactcgtcgaaatgcccttcggccggcagcacgatggccagattgccgccgttgtcgaacggaatctccacccgctgccaagtgttgtactcatcatgtccgtaagccatttggctgaaggtccggtgcatcatcggcacctgagcatctccggcttcgccgtggaaggtgccgttgccggtggactgctcttcgaacggatccttccaacggccatccgcatagacggtgttgatgatggacaggacttcacggtcacgcagcgtgatcttcggcttgagcgaaccattcgtatgcttggcgatccaatcggacatctttgcggcggcctgatcgtcgaacggtaacgtggtgacttcggcctcgaacatcttcttgacggtggattggtaatcgctggcaagagagtagtcgtcatcaatccacagcgagttcgcggcgctcatctcggatttcgcccccgaatattgcccgttgatcgaacttagcagcgattggtagtcgctatcggtcagcgaaccggagcccagcagttcgttcagttgcgagcgggtcgtgccattggcgccctgcgcggcgatggccaacgccatccacatcgaagcaggagagtagttcacattgccggtgcctcggtcgccggcttccatcgccaggaattccggtgcggtgcggtaggcgaaggttgcggtgctgttgactaccggctgcgtggcaggcgtggccttcggcttgaacatattgcgaaccaatgcgctgccatcgccggccgtccaccatacgccgccggcgacggcaaggacaagcactactgtcacgatggcggcgatacaagcgttacggcatttgcgttgtccgcgcaaccggtactgttccatcagttgctcgctcatggttggcccctttgcttggatcggctcgtgcatcattgcatgaaatcgctgttttcattatattgcggctttcccttgagcccaggaacggtatgggaaccccggccgtaagcgaagattggtccagccgaatgccagtggtccgatgattgcgctcgccaacgggaaagacagactgccggatcgtgtcgaaccgagtatcaagttggtgattcccaacaccaatggccagtgcagaaccataccggggaaccatacgaacaggtttttggcagccctgtcaagaacctcgtcgggcatgagatacattgatgagctccactgcagtagcagcaacaccgctatcagtacaaccatgccaatccaatgcgcgcggttccatgtgaacagtcgttgcatcccgcgctcggcggcggcattgcgcatatcgctcctgttgagcttgctgagtgcttgtgcacggttcattgccgtcctcctttaccgccttgtcaaggattgatgatgattccatcgtaaatcacgcaggaaatgtggaatgatagttgtcatagtgaccatgacgtgtcaggacggagtagttcggcgtcgggcacactgaaggggtgaatgtaatggaagaagcgcgcaaccgcaacatacgcatcggcattgtggacaatgacccatatgcgctgaaagtgttcggcgcgctaatcgaacgtatgtccagcgattttgccgtgatatagacctgcgatttgggtgctgtggccatcagccgatgcctgagccccaccaagcggcctgacgtgctggttacggatatgtctatgggcgcattggatcgcacgcatcaagtcattgatgtgattgaaggcaggggagaagcggcgcacagtgcagtgactccgcatgattcgaccgttgatgccgctcctggcattgcatgtgacatcacagacgctgattgtccgctggagacgcagacctatccaccggcaccggcctcaaccgttaccaacaattactagaacaacaaaacggcgccctgcatatcaccacgcaagacgccgaatggacattatcagcagttattccactgtgaggaaaccgatcacccaaccgacttctgcgcagtctccgcgccaaagaagccgacaatcagcatcgatgcaatagcaatcgcgctgatggccacaaagatggacgtggcaccaagcgaggtaagcatccagcccaccaccatcggcatcaacacattgagcagcttggccacggcgttcgcgaagccgacgcaacggaagcgaaccttggtggcgaacagttccggagcgtacacagccaccacggaagccataagcacgtacaggcacatcatgagcaggaagccaacgataattgcgctcacggtagaggtctggaaggcatacatcaaaccgaacacgccagtgaacaggaaggccggcacaatcgtgcgcttgcggccgatacggtcgataagcagagagccaatcaggcagccgaccggggcaccgagcatcatcaccgtggaggtgagcagcgagctggacaggttaataccacgcttgaccagaatcgtcggaacccaagaagtgaaggcgtaggagcacacgttcgtggcggccacagcaaccacagccacaagcaggcagatgccgagcgaacggcctccggcgttgcgggtgtcgctggtgtcggccttggcggctgcgtcgatcggttcggaaccgttggcctcaagctgcttgacgatggcgtcggcctcatcgtaacggccgcgcacggcgagccaacgcggggattcggggatgtcgcggcgcagccaccagatgatggcggccaccaggccgatggccacgaacagcggacgccaggaccagcgggggatgatccatgcacacagcagcatagcgattggcacaccgcagttggccacgagcgagacaatcgcgcaccagtggccacggcggttcatcggtgcgaactcgttgaccatggcgaagccggtgacgatttcagcgccgaggcccaggccggcacccagacggcacagggacagcacagccatgttcggggcgaatgcgccgaggaaggtgaagccgccaaacagcagcaggttgatttggtaagccacgcggcggcccttcaggtcaccgacgaagccggccagcagcgaaccgaccagcagacccaggaagcctgcggacataaaggtggaattttgcgcaacggtggaccagcgggtagccaacgtgctggaggcgacggcgctgccaatatatacgtcgatgctgtccatcagcatgccagcggcgaccagcgtcacgatgcgatggaacatcggggtttcatgtgcgcgatccatgcgcgagataatatcctgaaccttggcttgatccgtcacggtggtacgtgcttgtgcgttttccatagccgcgggattgccggaaatctgctgttcagcagcagtcatatttgagccctcttcttgcaaacctgcccgcgtgcaactgctcaatggtgttgcggcgagcgaactcttgattggactgtgtgttccgttcgccctcccattgtgtgggatgaacgacgtttgcgatccaagtcttgaattctacgtagcgagccaatcgttgtgagatagctcactacatggggcttaactataggttcgattttgtggcacgccgcgttgcggtcacatcgtgaacgataacagaggttgtgacgctcctatatatgccccacttacgctcttaccccgtcgaaagaaggcagaaccgtgattcccatggggcggtaaaacactcatggggcggtatttggcccatggggcggttagcggattttgcctttccgcagaatagagccgttttcgactaccgccccatgagggttttaccaccccatgggtgagctaccgccccatgaaacgtgtaataacaaagcatgcccttgctggtggaagcgatgctttgctacttcgcctgcttgtcggcgaggatctcatccaccagcttgggcttttcggtcagctggccggtgaagccggggcggatatccatgtgcagcaccagagaagtgcggtagccctgctcggcgagcttcttggcggcctcaccggccaccttgagcacgtcgtccagatcgccttccacgttggtgaacaaggcgttggtttcctgcggcaggccggattcgcgaatcacctcgacggcctgagccacgtatggcgaaacctcggagcccacgccattggccgacacctgaatggcggccacggtattgaggtacggtttgccggtttccgggtcgatcggcacttcctgagtaacggcattacggtcaataatcataattctccttttattacttggctcccctcagagaggagagccagtaggactcagcgatacttccagaaatgatccatcgggccggagccgtggccaagattcagctgggccttcagtgcaccggtcagatacttcttcgcatgcttgatggccttgggcaatgtgtcgccaagcgccagatacgaggcgatggcggagctcagcgtgcatccggtgccgtgcgtgttcggattattgatacgcgcgccatcaaaccaggtcacggttccatccgtctcggcaagcacatcgttggcatcctcggtgccatgaccacccttgaccagcgcggcacagccataacgctccacgaggcggtgggcggcggcctccatatcctcctgatcgcgaatcagcgtatcggtcagcacttcggcctcgggaatgttcggagtcacgaccgtggccatcgggaacagcttgccggtcaaggccgcaatggcatcgtcactgatgagattggcgccggaagtggccaccataaccgggtcgagcacgatgttcgtggcgtgatggaaggtgagtcgttcagcgatgacgtcgatgatgtcagtggcagacaccatgccgattttcaccgcgaccggcggaatatcctcaaacaccatgttgatctggtcggcgagaatgtccggtttggtgtcctgaatggaacgcacgccggtggtgttctgtgcggtgagcgcggtgatggcgctcatgccgaacacgccgcaggccagcatggtcttcagatcggcctgcatgccggcaccgccggacgagtcggagccggagatcgcgagaacagcgggaagtgtagatgttgcaatttgtgccatagtgttcattctaagtggggcccatgatgtttttcggagcggttttccttgatgttttgccgctcctgtggtgagacggggaaggtttgctgattgcgattgattcatgaaatgttcgggaggaggcatggctgataacgatgtactgcgccgtgacggcgtcttggtgcgcatcaccggaacgcaccgcatattttggcgtaatgcctaacggacacaccacacagctcacatttccgcgtcaggaagtgttcgatgtgggcgacgtgttgctcgtcggtacggatttctatcgcaaagtgccgcatgatgtgtggccgttgaagccccgtgtgggcatcgtgcgccgtgcgctcaacgaaggcgtggtcctggagacttccgacggcctcggtccagatggcgcacacttcggcaccgccttcgagcgagtcgagcgtcgtcccgaattaagacaccaccgggcataataattggctcccctcagagaggggagccagagaggtttactcctgggcggtggagtagagcttgccgccctgggcggtgtacttttcgctcatcgcatccatgccggcgaggatttcttcggggctgagcacgttggcggacaccacgccgttatcgacattggccttggccgtagccagtgcctcggagtcgatgcctgcagcagcctccttcacgatttgctgctgagcggcctcgccaccgaatgccttgcggatgttctgggagatggccatcgagcagaacttcgggccgcacatcgagcagaagtgcgccatcttggccggctcggcgggcagggtatcgtcgtggaaggcgatggcggtgtccggatcgtaggacagattgaactggtcgagccaacggaactcgaagcgagccttggaaatcgcattgtcgcgatccatcgcgtgcgggtggtgcttggcgatgtctgcggcgtggcaggcgatcttgtaggcaatcacgccctgcttcacatcatccttgttcggcaggccgaggtgttccttcggggtcacgtagcacagcatagcggtgccgtaacgaccgatctcggtggcgccgatagcggaggtgatgtgatcgtaacccggagcggtatcggtggtcagcggtccgagggtgtagaacggggcgttgtggcacacggccttctccagctcgatgttcatgcgtacggtgtcgaacggcacgtggcccgggccctcgatcatcacctgcacgtccttggcccaggcgcgctcggtcagctcgcccagagtcatgagctcggaaagctgcgcggcgtcgttcgcgtcggctagggagccggggcgcaggccatcgcccagagagaacgccacgtcgtacttggcgaagatgtcgcacagctcgtcgaagtgcgtgtacaggaagctctcctggtggtggcgcaggcaccagtcggccatgatggagccaccgcgggagacgatgccggtcacgcggttggcggtcagcggcacgtaacgcagcagcacgccggcgtggatggtcatgtaatccacaccttgctcgcactgttcgattacggtgtcgcggaacagttcccagctcagcttggaggcatcatcctcgaccttttcgagggcctggtacatcggcacggtgccgatcggcacgggggagttgcgaagaatccactcacgggtggtatggatgtcgttaccggtggacaggtccatcacggtatcggcgccccacttggtggcccacgtcagcttctccacttcctcatcgatggaggaggtgacggccgagttgcccatgttggcgttgagcttggtcaggaaggcggatccgataatcatcggctcggcctcggggtggttgatgttgcaaggcatcaccgcgcggccggcggccagctcggagcgcacgagctccacatcgcagttctcgcgggtggccacgtactgcatctccggggtgatgatgccgtggcgggcgtaccacatctgggtgatcgggtggtccttggcacgcatcggctcatgcttgcgtccacgccattccttggtggcgcggccgcgcttgatggcgcgcttgccatcgtcctcaaggttgcggcggcggccctcgtagtcttcgatgtcgccgcggtcgcggatccagtcgagacgcaggggcttcaagccttccttcgggtcgcacttggggccttcggtgttgtagtcgtggaacggcgggttcgggcccacgccgggcgtgtcgctcagcttgatttcggtgtacggcacttccaggtcgtaggaaccatactgataggtgaacggtacggacttggtcttgcggatgtgcgccttgtcgcgctgcttggaaccacgggcggcgatgtccacgcgctgctgcttggcaagcttctgggcatccttggcgtccttggcgttggtgaacttcttctcagtggcctcggaaccgggcttcgcggccccttcctgagcagcctgagtgtcagtagcgggggtgtgggttacgacgcgcggagcgtagccgtgcttcttgtcgccgcggacggccttccagccttcgaccatggtgcgcgcggcctcttccgggttctcggcacccgcgatggcggagaccacgaaccagccagcagccttggtatcggcgagcatggccatatcggctgcggtcacgccgccgcccacgaccaccgggaattcgctggcaacgcagatggtgttgatctgggcggcgtccagcgtcttgccggagccgtcgttgccgcccacggaagcctcgggcttggtggtggagacgtgcagaggaccggcgccaatgtagtcgatgcagccgtcgggcagctcgttgatgagccgaacgaggctttcggtctcagccgacagacccacgatggcctcgtcgccgagcagggcgcgggcttcgcgcggctccatgtcggtctggccgatgtgcacaccgtccaccttgatgcccttgcggcgggcctgccacaccacgtcggcacggtcgtcgatcacaaaggccacggaatcggacttctcattgtcctcgatgatctgcgcgatgtcgcgagccatgtcggtcagctcagaggcatcggcctccttggcgcgcagttggatgaaggttgcgccgccgtgcagagcctgatccaccacgtcggtcagcggacggcctttgcagtcctccggccccaccacgaagtacgcggacaggtcgaagctgtcgcgcatggaggcgtatgggtattcattactcattattattcctgcttttgttgtttcttgtggaagtcttattggaaaaaactgttatgagctccctcatcagagggaactgaaactactgcaccaaaatctcggattccgccacctgttcggcggtcacattccacagcgcgtcaaggaacgcaacttggaacgagcccggtccgtgcgaagttgtatcggccacctctcccgcgcggttgtacagcagagacgcggacagggcggcggtcaacggatcggagaccgccaaatacgtggcagccacgccgcccagcgagcagccggcaccggtgatcttggtcatcatcgcgctgccgcccggcagtcggtacacggtttcgccatcggtcaccagatcggcgatgccggacacggccacggcgcagcgggtggaagcgtcatgggaggaatgcttggcgtgctgttcggtcagatactgtgccagcgccaccgccgcgccggttgcggactccacgtcgtcgacggattccactccggcggggcggtgctcggaagcgtcccccacggtttcggtattgagcccccacatgttcgccagcgcgattacctcggatgcattcgcgcgaatcatggtcgggggagcggccttgaaggcctgaagaatggcggtacgggtgcggccgatgccggcggccaccgggtcgagcacccacggcttgtccaagtagttgagtcgctgggcgatttcgggcagtgcgtccttatagaacggcagcagcgtgcccacgttgatgtagttcgcgcccgcgattttcgcggtttcgatcacgtcgtccggcaggaaactcatggccgcagtgccgccggccgccagttgcgcgttggcaaccaaattgatggtcacaaaattggtgaatgactgggccaacggagtcgtctcgcgtacgcggcgaacggcatcggcgatattgtcacggatgggtgaatcggctggaaccggagtcccggcggtataaccgctggacacgccggtaaacgatgatgcactattgctcatttactgctccctacgatggtcttaaccaacaggttctaagggtcaggctcaggcctttctcaactcgcgaaccacatgcgagttcccctgcattacagtgccgacgctatgcgccaacatggacattatcgtgacggatttgttcgatacgtgtcgtcaggtctggcgcgtccccgtccattcgtgatacatagacgcctccgccgagcaacatctcccgaatttgtgacgctgacgcgatgtcagtggcacaaattcgggaagggtaaaacaacaggaacaatatggaggtgttgcgatataggaatcgctgcgaacggccgctcgtgagacgcggaacatataccggacaatgccgcctgacctgtcaccatatacggctatcctgaagcggttgttattagaccccaaaccgttcaaaccagaaggtgcattgtggctcagtccaaactcgatgaagtcgtatcccttgcgaagcgtcgcggcttcgtgttccccgccggcgaaatttacggcggcacccgttccgcttgggattacggccctctcggcgtcgctctcaaggacaatatcaagcgtgaatggtggcgctccatggtcgtcacccgtcctgatgtcgtcggtgtcgacacttccatcattctgccgcccgaagtgtgggtggcgtccggccacgtgagcgtgttcaacgatccgctcgtcgagtgtctcaactgccacaagcgcaaccgcgccgacaagctcgaggaatcctacgccgagaagcacggcgacaagatgccggaaaacggcatgaaggacatcgtctgcccgaactgcggcacccgtggccagtggaccgaaccgcgcgacttcaacatgatgctgcgcacccacctcggcccggtcgaggacgagaacagcctgcactacctgcgtccggagactgcacagggcatcttcgtggacttcaagaacgtgatgacctcttcccgttccaggccgccgttcggcatcgccaacatgggtaagtccttccgtaacgagatcaccccgggtaacttcatcttccgcacccgtgagttcgagcagatggagatggagttcttcgtcacgcccggcaccgatgaggaatggcaccagtactggatcgacgcccgcacccgctggtacatcgacctcggcgtcaagccggagaacctgcgccactacgagcatccgaaggagaagctctcccactactccaagcgcaccgtggacatcgaatacaagttcggcttccagggttccgactggggcgagctcgaaggcatcgccaaccgtaccgattacgatttgagcgcgcactccaagcactccggcgaagacctgagctacttcaaccaggccaccggcgagaagtacgtgccgtacgtcatcgaaccggccgccggcctgacccgctccctgatgtgcttcctcgtggacgcctacgatgtggacgaggccccgaacaccaagggcggcgttgacaagcgcaccgtgctgcgtctcgacccgcgtctggccccggtcaaggccgccgtgctgccgctgagcaagaagcctgaactgcagaccgtggcccagaacctggccgacgacctgcgcttcaacgagtggatgatcgactacgacgagtccggtgccatcggtcgtcgttaccgtcgtcaggacgagatcggcaccccgctgtgcatcaccgtggacttcgacaccctcgaggaccacgctgtgaccatccgtgagcgtgacaccatggcccaggagcgcgtcgctcttgacaaggtggccgattacgtggccgcccgcatcggcgagaagcgcacccgcgtgcccctgaagcctgtggaaatgggcggtgagccttggcctgagtccggcgttcaggaagccggcggcctgtactaagccggagtcgcacaacttgggctcccctctgtgggctgagccgtaaggaagacatcccagtgggctgtttgtaggcgaagtggcggcgatagacgccggggctcctctctcaggggagcccctacttattttcttaggaatcacatggcacaatccgaatccgaaacagtgctcaccgagcatcacgagaccgacaacctcgacccacgtacggacgcgccggcgcgccccgggaccccggtgcatatcgccccggtccaactcggcaacatcaccgtgccgaccccggtggtgctctcgccgatggcgggagtgaccaactggcccttccgcgtgatttgcgaggaatatggtcccgatggactctacgtggccgagatgatcaccgctcgagccctcgtggcgcataacccgaaagcactgcgcctctgtcatttcgccaaaagcgaaaaaatccgttcactgcagttgtacggcgtgaacccctccatcaccgaacaggcggcgaaaatcgtggtcgacggcaacatggccgaccatgtggatctgaacttcggttgcccggtgcccaaggtcactcgtcgaggcggtggttcggccttgccttggaaaaccgacattttcactgagctattacagcgcgtggtcgccgtatgcgagccggcgggcatccccgtcaccgcgaagatccgcgtcggcatcgaccataaccatgagaccttcctcgaagccggacacatcgcgcaggaggagggctgcaaggccgtaaccctgcatgcccgtaccaccgccgaatactatggcggtcattccgactggtcccgcatcggcgagctcaaggaacacctcaacattccggtattcggcaatggcgatatctggggtgccgaggatgcgctcgaaatggtgcgcgagaccggctgcgacggtgtggccatcggccgcggatgccagggccggccgtggctgttcgccaacatcaaaaacgccttcgagggcaatcccgaacggctcaacccgaatctgggcgaggtctgccgcgtgattcaccgtcatgccgagctgcttaccgagttttatgagggcgatgagatgatggccgtccacgatctgcgcaagcacatcgcctggtatctgaaaggattcccggtgggcggctccacccgcaaggcctttatggaatgcgagagcctggccgatgtggaccgcgagatcggcaagctcgacccgactatcgaatacccgccacgcgtggtcgacaaaccgcgcggccgcgtgcgtttcgccaagaaggtgcacttgccgtatggctggttggaatcgcgtaccaccacccacgaagagcgtgaggcgctcttcggtgacgacccaatggacgccagttactgagaaaatactgaaaatacacgcaacacgcgccattctgcgcgtgaatttccctccaagagtagcctgtttgcgctactcttgggtgtaaccgtgaagtgacaggagccaaacgtgagcgagatcgcgcagaatgagttcaacgacaagaccaacatcaaggttgttggcgtcggcggtgccggcggtaatgccgtcaatcgcatgattgccgagggattacagaatgttgaatttgtggcggtaaataccgatgcgaaggatcttctgcgctctgatgcggatgtcaagatttccctttccgataagtccagtcgtggtctcggtgctggtgccgacccggagcgtggagccaaggcggcccaggaccaccagtcggatatcgaagaggcgcttaggggtgccgacatggtgttcgtcacctgcggcgagggcggtggcaccggtactggcgccagcccgatcgtcgctcgtgcggctcatcaacagggtgctctcaccatcgcggttgttactcgtccgttcagcttcgaaggccctcagcgttccgcttccgccgaatacggcatcgacaacctgcgcaaggaagtcgacgcgctgatcgtcattccgaacgatcgcctgctcgagctttccgaccgttccatcggcatcattgaggccttcaagaccgctgataccgcactgcttgccggtgttcagggcatcactgacctgatttcgatgaactcctatattcacgtcgacttcaacgatgtgaactccattcttcgtggtgctggtactgcgctgtttggtatcggttccgcacggggagaggatcgtgccacgcaggccgccgaaatcgccatcagctctccgctgcttgaggaaagcatcgaaggcgcacacggtgcgctgatcaacatcgccggtccgaccgacctgaagttgcaggaggcctctgctgccaccgaactggtgcgcaaggccattcaccctgaagcccagattatttggggtcttgctctggacgatgcttatggcgatgaagtgcgtgtcactgttattgctgctggttttgaccccgtcgccgctcaagatgacgacactcagagcacggtgacgccggttgtgccaaccgccgccgatcctgcgactcccgtggcacagccagctccagcaccggcaccggctgcacagcccgctgccactgcccaaccggcattcacaccggctaccggtgactccgcatcgttgccttttgatgatccgacttccgctcatccgaatatcgccgtgaacgatccggctggcgatctcgacatccctgacttcctgcgctgaaaggattgatccatggctgggttcatgaaaaacgcgatgtcctatctgggcatgagtgacgttgtggacgatgaggacgactacatcgaggaggacgaggagcagaagccggcttcgaagtccgcatttgattccgaccatacggtcacgccgctggcgtcaaccaccgcgcctgccgcatcgtcgactaccaagccgttccccggtggccgtgtgaacagaatcaccaccatccatccgaagtcatatgaggatgctcaactggtcggccgcgcattgcgtgacggtgttccggtcgtactgaatctcaccggtgtggccgaagccgtggcatatcgcatcgtggacttctccgccggcgtggtgttcggcgtgcgtggttccctcgagcgtgtcactccgcgcgtgttcctgttgagcccggcgcaggtgaacatcaaggtcgaagagccgacaaaaccagcctcggcacacgatttgttcgctgactgaccggttcagtagttttcgcattcgacgttatatcggtattcggccgactcccagcaaggagtcggccgattcttattgtgctccgagcaaacttttcatgcgcggttgttagtctgtcagcatgctttccttagtgttctctctgatcggccgcattcttgcatggctcattaacgcgtatatcacggttctgttcgtgcgcatgattctggactgggtctccgttctcgcacgaaactggtatccacgtggtgtggtggcccagctgatcaatattgtgtattccatcaccgaaccccctctgcgctggctacgtcgctatattcgcccattgccgctcggttcgatttatcttgatgtcagcttcattgtgctgtattttgcgctggtggtactggaaagtgttgttctgatagtgttctgaggccgtttttgacccgccggaggcatatatctggcataaaaacccacgtcgaatgttctgaaacgatggggtcgtgatagcattctgacttgagaccaacgtaagtgcgggcgatgccccaaagcgaggtgcaagatttatggctctgttgacgccgaaggatattagggagcacaccttccagactgttcgattcaaggaaggttatgatgtcgacgaggtcgatgacttccttgatcaggtcacggaaaccgtcgaggctcttggacgtcaggcggtagccggcggtcaggccacccagactctgggtcctgacgtgaccaaccttaatgcgaagatctccgatcttaccggtcaggtgcagcaactcgagtcggagaatgctggtttgaagaacgctgtggctcaggcccagcaggccgctcaggctggcaatgatcaggcagcacagcttgtctctgccaagctcagcgaagccgaggaatccaaccgcgcgctgtcctcccagaatgagcagctcaagggtcaggtcgatcagctgaacgctcaaatcgatcagctcaccgctcaggctgctcaggcctccggtgaccaggaggctgtcggccagcagatcgccgccattcagcaggaacgtgatcagttccgcgcggccaacgaggagctgtcccgtcagctcgccgccgctcagcagcagggttccgccgctcagcagcagtccgctcagatcgctgagctgtcccgtcagctcgaagaagccaagcagcgtgaaaaccagcttcgtgctcaggtttccaaggtcgagccgagcaccgagaccggttctctgcagaagatcgctggcgccgcttccatgccgggcaccgagcccgagcgcgccaccgccatgctgaccctggctatgcagctgcacgatcagtacgtggagaagggcaagaacaaggccaaggaaatcaccgaggccagccagaacaagtacaacgatctggtcaccaaggccaacaactactccgagcgtacccgttccgaggccgacgactactccactcgtactcgttccgacgccgacacctattcggatcgtacccgctccgaggccgacgcttaccgtgaccagactcacgcggatgccgagacctactcccagaacacccgttctgaggccgacgcatactccgtcaagactcgtcaggatgcggacaactactccaagtctcagcacgatgacgctgacaactacgagaaggaagtgcagcagcgtgccgccgagtatgacaagaacactcgttccgcggctgatgcgtacgacaagaacacccgctctgcagccgatacgtatgccgagcaggtgcgcgacaaccttcaggctcagtccaaggtcgtcgagggcaacatccagagccttaagcagttcgagactgaataccgcgcccgcctcaccgagtacctcggccagctggcatcgcaggtttccgagtcgaacaactacgtcgaccagacctcgtccaagaccaactgagcgtaggcaggtacaggtcgtatgacgaaccaacagggacggctgcgcactcgcgtggccgtctttgcatgtgtggccgcggctgcgctgattgtcgatcagctcaccaaggcttgggcgatggccgcgttatccaacggtcagaccattcgcgtgattcccggactgctgtccttcaccttggtgcgtaatccgggcgcgtccttgggcatgggatcaggcgctacttgggtaatcagtctgttggccgttgtggcttgcgtggcccttgctgtggctggggtgcgcactgtctccatgaaatggtcggtggcgatttctttcgcgtttgcaggcgctctgggcaacctgattgaccgtgttatgtacgctgacggcttcctcaacggcaaagtggtggatttccttaactatggctggtccgttggcaatgtggcggatatctatctggtagtcgccggtgtggtcctggtgattctgattcttatgggggagccgttctcacacaaggatctcatcgagcaatccgacgaatccctacagtctgagccggaggcggacgacaagtaatgagtcgaatagtccctgctcccgatgcattggtgggtaagcgtttcgacgtagccgtggccaaaatgctgggtatttcacgatctaaagccgccgatctggttgactccgggcaggcgcgcgttttagggcgtgaagttgcacggtccagcacattgcaggcgggggagaccgtcgaatttgatttggcggaggaacaggccgagcctgagcctatcgcaactgatatggccgttgtctacgaagacgatgatgtcgttgtagtcgataagcctgtaggcgtggcggcgcatgcctcggttggctggaccggtccaaccgtgctcggatcactgcgtgaccgcggcgtgcatatcacttcctatggtgcggccgggcgtgagggcatcgtttctcgccttgatgtaggcacttccggcttgatgttggtgtgcaagtccgaccttgcgtacaccgagatgcgtcggcagttcgccgagcatgaggtaaagaaaacctatcatgcgctcgtgcagggtggtcttaaagagaacaaagcaaccattgaggcaccgatcgggcgcgccaaagtgtccgatttccgcttctgcgtgactccggccggcaaaccggccgttacgcactgggatgtgctggagcgtttcggccatgaggccactctggtatccgtgaatctggagaccggacgtactcatcagattcgcgtgcatttctcctcgattgggcatcccctgtgcggcgaccccatgtatggtgccaatccggtgctgtctgaggccttgggacttgaccggcagtggctgcacgccatgaagctcgaattccgtcatccccgcacccgcgtctggaccacggtccggtcccagtacccggccgacttggctgccgcactcgatgccatgcgtgcccgacacatcgaacccgctgaacctgccgaatatgccgaagttctggtggactaattccgcgacgtgtgcatcatgcgttttaatatttagattcagttccggcttcgccggattcatcccagaataacgagagatcggtcatgatggctctccgtcatgaccataccccaagtgactgcggatgctgagtaccattcaggccaatggtcggtaaccgtacgtgaattaccggtatttccgctcaacgtgtctcggtactccagcgtgaagtgaacagaaatgagccaaagcagtaatgaagccgggcggtatatgccatccggattgcagaatctcctgctgataaaaaccgtttcctagtcgttgaccgtgcccgttccgacgacgatcgcggcctacgacgcgttcatcctctacctggcccaccgatacgacatcaagggcaagaggattctcaagcaggagaagaagtactatgccgtggacttggggatgcgacgtatcctgtgctccaacaacgtgcgggacaccggacgcctcctcgagaacgtggtgttcctcgaactgatgcgccgcgagggcgacgtgtatgtcggacagagctccggcggcgagatcgacttcgtcacgaacgggccaggcggacgtcggtactaccaggtcagcgaatcggtgcacgactcggcgacgctggatcgggagctgtcctcgctgcgcgccgtgcgtgacaactatcccaagacgctgattacgctggatgacgaacggccctactcccacgaagacatccgacaggtatacgcgcttgactggctgttgaacgaagaccacaagaaacagtagatactagggcggccagcgggttagcaagacatcaattggtgaggactgctgacattgcactccgacggatgaattgaatactcatatggtatccgattctgaacaattgagtgggggcgttgatggttgccatcgtttgagctggctaaatgcgatttcgcgccatgctgtttcaacaacggtgacaacggctacagttgaactatgcatgggttgaagagtgcgattgacaggggagcggacgcgtgggcacgttcgctgcctgggcgcgtgctcgaccggtatgtgtcgcggagcggccccctgctggcgaatggtctggcatatggtctgctgttcgccttttttgccggcgtctggattgcggtgagcgtgttcggccttatcatggtcggcaacattgattggcagcagatgctgattgacgcggtgcgtgaagtcattcccggtgtggccgactcgtttctgacgtcttccgcgctaggcaccatgtcaagcgcattgacgtggaccggtctggctacgttggccatattctggtggacggtgaccggctggatgaactcgctgcgccacgccgtacgggccatgttcgacgactgcggcgacgagctcaatatcgtcgtcgcaaggttacgcgatacgcttgccgccatcgccatcgcaatactgttcattctttcgaccgcggccggtacggtgtccggcggcatcgtacgccgactgctgcaatggggcggcatccccagcagttcgttgcccggcaccgtgcttttggagatgaccggtttcggtaccggcgtcgcactgaattttgcgttgttcatgttgctgctgcgcgtggtctcccacatcaaagccggacgattcacgatactcggcgcgttactgggatctctgacggtttccgcaatgcagcttctcggtgcgcgactattagccggagcctcccggaatccgatgcttgccccgttcgccgcgttgatcggtgtgctcatttggttcaacctcgtcgcccaggtcattttgctctgtgccgccctcattgccgagtgccgacaaaagagctgagcgtctgaactgactaatatgacgattagcgatgaagcctctctcgccgagatgattcgcgaactcagctggcactacagttattgccgtggtctctccatcttggcatatcgcaaacgagtagcttcacccgtgataccgagcttgcgaccaattgtttcccatgattggccacgttcatgcatgagcagtaccatctgcgcaatgcgggcatcaatgtattccagttcggctttgcgtcgattgattagacggctgagctccagttcgggagagaagtttgggctgtcctcgggaatgccttctgctggtgattcctgagactccacggcatctgccgcagcgttgccgatttccatgagtttggcctgtatctcgggagagtagtcttcaaatttcatcgttatcactgccttagtgtcgctgttgctgatactccactttataggcatgtggcctcaccggtaaatatttaccgccgcccagaccacacggtatggtggaacacatggctgattacgggaacaactttgtgcaactgcataaccacacgcactattcgctgctcgatggtgcgtcgaagattcctgatttggccaagcgtgcggccgaacttggcatgcctgcggtcggcatcaccgaccatggcaacatgcatggcgcctacgagatgtacaccaactgcgtggccaatggcgtcaagcccatcatcggcatcgaagcttatgtgaccccggaaaccgcacgtcaagacaagtcccgcgtgcattggggtaccgaagcccagcgccgcgacgacgtctccggtggtggtcttatcacccacttgaccatgtgggccgaaaacgacgaaggcttggtcaacctcatcaaagcctcgtccgtggccaacctcgaaggtcgcgtcatgcgttatccgcgtatggataaggaggtgctcgccacctattccaaaggcgtgatcgcatcctccggctgcccctcgggcatcatccagacccgtctgcgcctcggtcaattcgatgaggccctgcgtgccgccggcgaattccaggacatcttcggcaaagacaacttcttcatcgaacttatggatcacggtctgcccatcgaaactcaggtgaccggtgacctgctgaccatcgccaagaaactcaacgcaccactgctggccaccaacgattcccactacgtacacgccgaagatgcacaggcgcaggacgccatgctctgcatcaactccggttcccgtcttgacgatccggaccgattcaagttcgacggcaccggctactacatcaaaaccgccgaagagatgcgcgaactgttcaaggaccacccggacgcctgcgacaatacgctcgttatcgccgaacgctgcaacgtgatgttcgacgaccacgaagacggcgcgttcatgccgaaattcccttgtcccgaaggctgggatgagacctccctgttcctcaaaaaagtcgaggaaggtctggagaagcgttacgacggcaacccgccgctcgacgtattgaagcaggccgactacgaatgcggcgtgatctgccagatgcagttctgcggatacttcctcgtggtcgccgactacattcagtgggccaaggaccacggcattatggtgggtccgggccgtggttcggccgcaggcgccatggtcgcctattccatgggcattaccgagcttgatccgctcaagcatggcctgattttcgagaggttcctgaaccctgagcgagtgagccttcctgatatcgatgtcgacttcgaccctgaaggtcgtgcgcgagtcatcgaatactgcggcgaaaaatacggcaccgataaggtcgcccagtgcgtgatctatggcaccatcaaaaccaagcaggccttgaaggactccgcccgcatcatgggttatgaattctcagtcggtgaaaaaatcaccaaggcgctgcctccggcggccaccggcggcaaagacatcagcctacatgacatcttcgacccggccgccaaacgttatgccgaggccagggaattccgagaactctacgattccgacccggacaccaagcgcatcaccgaggaagccaagggtatcgaaggcctgattcgacagaccggtgtacatgcctgcgccaccatcatgggtagcgcacccatcaccgacacctcgccgttgctggaacgcaccgatggcaccatcaccaccaccttcgaataccacacgtgcgaaacgttggggctggtcaagatggacttccttggcctgtccaacttgacgatcatccacgacaccctgaagaacatcgaggccaacggcaaacccgccatcgactacaccaagattccgctcgatgacgccgaaacctacaaactcatgtcccgaggagacacgctcggcgtgttccagctcgattccgacggcatgcgttcactgctgaaaaccctgaagcccgataacttcaacgatatttccgcacttatcgccctgtaccgaccgggcccgatgagtatggattcgcacaccaactacgccaagcgcaaaaacggcctgcagaagatcacgccaattcaccctgagcttgaggagcctctgaagcaggtgcttgacgagacctatggtctgatcatctaccaggagcaggtgcagtccgccgcccgaatcctcgccggttattcactgggcaaggcagacgtgctgcgtcgagccatgggtaagaagaagcccgaagtgctggccaaggagaaggtgccgttcttcgccggtatgaaggagcacggatattccgaagaggcctcccaggccgtgtgggatattctggtgccgttctccggctacgctttcaacaaagcgcactccgccgcatacggtctgatctcctactggaccgcatatctgaagacgcactacccggtcgaattcatggccgccctgttgcaaggtgccgccaccaacaaagacaagaccgcactgtacttgggcgaggcccgccgcatgggcatccaggtgctctcgccggacgtcaacgaatcggtgtacgagtactcggcagtcggcgacgtcgtccgattcggtcttggtgccatccgtaacgtgggtgacaaggccgtggccgatatcatcgccgaacgcgaaggcccgcgcggcaagttcgtgaacttcatggacttcatccgccgcgtgcccctgaccgcgctgaaccggcgattggtcgaatcgttgatcaaggccggtgccttcgactcgattgacccgaaccgtcgcgcgctgctcaccgtgcacgaggccgccatcgattcggtggtgagtctgaagcgcaaacaggcggagggccagttcgatttgttctccgatgccgaggatgggggagcggaggccatgggcgacgcttccgtgaccgtacccgatcttgaggaatgggacaagaagaccaaacttaacttcgaacgcgaaatgttgggcctgtatgtgtctgaccatccgctctccggtatgcagtcgattctcgcgtccttgcgtgaaatgtccatcgcacatctggttgatcgagccaaaacgatgggtgaaggacagcaggtcacgttggctggtttggtcaccaatgtggaccggcgcgtatccaagaagggcaacccctgggccatcgtgaccatcgaagacatggaaagctccatccaatgcatgttcttcggcaaggtctatgaagcggccgccgccgaacttgccgtggacgccatcgtacagattcgtggccaagtggagttgcgcgacgaaaccgtttctctgagagccacggaaatgcagattccgaccttggaagccgaggatgaacgtccgttggtcatcacgctgccgccggtggcgttggagcgccaacgcatgatgcaactcggtcaggtgctcgctaatcatcctggttactgcgaagtacatcttgcggtgctggatgagaagggtaacgctcaggtgctcacgtttggcgatcgtttccgcgtcaagcgagatacttcgttgtttgctgagatcaagattctgtttggccccagctgcttgcctgccgcctgattggcgggtttcgcccctggcctctccctcacctggctttgctgggggctccttcatcagagggagctaaggcgtgtgccaccatacgatgtgcgcgactactgtggaacgtatgggcatggagatggcggatactggtaacaacgatgacgagcaacaatggattgccgcgatgctggaacggctgtctcattcgcagttccgcgccaaattcgctttgaccgacaaagaccgagcctatgcccgcaccaaaggcaaggcgaccatcgatcgtcatgcgcgagaaatgttgcgagaccgcataggcgcagccgaaccgaagaacgacggcaggcagacgccatggcgcggccatccggtattcaccgctcagcatgctaccgccacatgctgccgcggatgcatcgaaaaatggcatcatctgcccaaaggccgtgaactcgccgaagcggaggtaaaccgacttgccgatttggtcatggcgtggattgaacgggaccttatcaatcatccggttcggtgaagcaccccgcatcctcagtatgcctgtatgccttcaatagttatgggccaacagccaacataggcctcgaaaaccgtagatgcaaggtattggcgaatgcggcagaacgccgaacgttgcctatagcgcgttcgtcaataatgcgacatgatgtctattcaagaagagttgatgaagtgtcaactctgccccaaggaggcggaatatgtactacagcagcggcaattatgaggctttcgcacgtccgaagaagccggccgacgtggacaacaagcatgcatacatcatcggtaccggactggcggcattgtctgcagcctgttatctggtgcgtgatggtcagatgcctggcgagaacatccacatccttgagaaggacccggtacccggcggcgcctgtgacggtcttgatattcccggccttggctatgtgatgcgtggcggccgcgaaatggacaatcatttcgaggtcatgtgggatctgttccgctcgattccctccatcgaaaccgagggcgtcagcgtactcgacgagtactactggctcaacaaggaggacccgaactactcgctgtgccgcgccaccaagaatctcggcaaggacgcggggctcaagggcaagttcgggctgtccgacaaggcttcgatggaaatcatgaagctgttcttcaccccggacgaagacctgtatgacaagccgatcaccgatttcttcgatgatgaggtgctgaactccaacttctggctgtactggcgcaccatgttcgccttcgaaaactggcactccgcgctggaaatgaagctgtacatcaagcgctacattcatcacatcggaggcctgccggacttttccgcgctgcgtttcacccgctacaaccagtacgagtcgatgattctgccgatggtcaagtatctggaatcgcacggcgtcgaattccgctacaacaccaaggtcgagaacgtggaattcgcgattggcgggggagccggccccaagcgcgagcacaccggcgtaggccaagacaccatccagaagattcaggccacctccggcttcttcaagcgcaaccctgccagcacgcccaccaagaagcttgccgtgcgcatcgacgtggatcacgagggtgataaatcctccatcgacctgaccgagaacgatctggtgttcatcaccaacggcggttgcgtggagaactccaccatgggttcccagaactcgcccgccgcatggaacccagacctgaagcccggtggcggctgggatatgtggaagcgtatcgccgaccaggacccgagctttggccatccggagaagttctgctccgatccgaatgccaccaagtggatgagcgccaccgtcaccaccctggacggcgagattccgccgtacatccagaagatctgcaagcgcgacccgttctccggcaaggtcgtcaccggcggcatcgtcaccgtgcaggactccaactggctcatgagttggaccctgaaccgccagcagcagttccgcgaccagcccaaggaccagctgtgcgtatgggtctacggcctgttcccggacaagcccggcaactatgtgaagaagccgatgaccgaatgcaccggtgaagagatttgcgaggagtggctttaccacatgggcgtgccgaccgacaagatcgaggcgcttgcaaagcaccacgccaacaccgtgccggtcatgatgccgtacatcaccgcgttcttcatgccgcgcgcggccggcgaccgcccggacgtggtgcccgatggtgccgtgaacttcgcattccttggccagttcgccgagaccccgcgcgacacgattttcaccaccgaatactcgatgcgcaccggtatggaagctgtctacacgttgctcggcgtggaccgcggcgtgcctgaagtgtggggtagcgtctatgacgtgcgcaacctgctcaacgccaccgtcaaattgcgtgacggtgcaccggtcaccgatatgaagctcaacttcattgaaaaggccgtggtcaagaaggtgctcaagaaactcgacggcaccgatattgccaccctgttacgcgaataccacgtaatctgacatccatctggctcccctcgactggcacgcgaagcgtgactgagggaagttgctcacaacggagtgttaagagaaagacaaaaacatgactgattctgatccccagttaatccgccacgccaccatcgacgatctggacgcgctggccgccatggaatccgaatgcttcccggccgccgaggccgccgaccgctcgtccctgcgcgcccgaatcgagacctatccggaatgtttctggctattgattgatggcgagatcgtcatggcgttcatcaacggtttcgcgaccgatcggcgcgacttgaccgatgacatgtacgaggatgccgcgcagcacaaccctcaaggtgactggcaaatgattttcggcgtggatactgcgccgaagtatcagcatcgcggttgcgccagtacactcatgaggaaagtcattgaagacactcgtgcagctggacgtaaaggcctggtgctcacctgcaaagatcggctggtcggattctatgcgcaatttgggtatgaggacgagggcatttcggagtccactcacggtgacgtggtctggcatcagatgcgcctgaccttctaatccccctttggctcccctctttgatgctgaggcgtctaaaaaacagtccggtggactgtttttttagacgaaggcgagacgatagtcgagccataaggacgagagctttttgcgggtgaaccgtccgcgtgatcggactgaggggagttgaacgtggaataaattgttgcgacacgccggtgaacatctgatttcgttacgtgagcccataaaaagccggcgtatcctgatggtaacggcgtgattcaagctgatttcgacacgccgggcgaagcctgtcgtttcaacgatttgggcttatcttcgtgcgccttgatttgcgtgaatccggacatgcgtgtaagttattcacctgttgccgctcagcgcggcgggttccttcctctggttggtttcccgtctg

SEQ ID NO: 898 - DNA, 25492 bp, Unknown
  gut microbiota DNA sequence
tcgtttgcacggtggactatcggatcaattctgatcagatcagctcgaggtcgacatcgaggctgatcggcttgtccgccgggatatggtactgggggtgcaccggcgacatccaggaatcatcgccgccaacgcccatctgtgcggcaaggacgcgcaggaacatgtgcttcggcttcggcagctcgtcctggtgctgagcctcctcaagcatgaagctggagtacggcaacaggcttaccgcgaacggcgcggcaccatcggcgcggctgacgcgcatgccgtggccgtgatcgtcggtaatctcggcccaacgcacatcctcatggttgcccgtctcctgcggcatgaggtacggcgcatgatccgcgaaagcgttggtgctccacacgccgagcttggcgtgtttgcggtccaggtacgtctccgccgggccggtgccgaagaacctcaggttcgtgtactgcacaggcagcgtccattcgatgccgaacgccgggatggtgggcaggtcaccctgctctccagggtattcgacgtgcaggttcacgcggccatcggtgtgggccgtgtaggagacggtcaccttggtgcgctgcgcggtggcgagctcatacgtgtacgtgcccttgagcgtgctgtcgtcgatctgctcgagcacgttgtccacgcagcgggcgtagcggccggcgcccagccactggacgcgctcgaaaccgtgaccggcgccgcgatcgttgtcggtcagcggacggaaggtggtgattgcgggacggcgcagcacgaactcgttgccggcgaaggtataggagaccatgccgccctgggtgcgcgacagcaggacctcgcgtccggcgcctcgcacgccggcgttccaacggcccacggtgatggtcccatcggccggcttcgtgtcgggcgtcgcggtggcgtccgcgggcaccacggtctgtccgaaggcgagctcgtagccgctttcggcccaatcggtcgccttggcgagacgctgcgaaacctgcagcaccagttcgcgggcgtcggcgcggtacgccgccaccggccatgcgacatcgaacgtgcgggtctcaccggcgggcacgtcgaaacgccgggtggactgccagaccggcttgccgtcggcgagaacgctcaggacgaacacgtagtcgccggtggcggtgaacaggttgtcgttcttgacggacaccgagtccttcgtcacgtcgatgtggacgttcgagtacagctgcttgacttcctgggccttgggggaaggcttgcggtcggcgaacagcaggccgtcgccggagaactcgtagtcggacggacggtcgccgaagtctccgccgtagcgcaggctcctggtgccgtcgggctgggtggcgtagatggcctggtcgatgaagtcccagatgaagccgccctgatacttcgggtagcgttcgagcgccgtgtattcgtccatgttgcccacggagttgcccatggcgtgcatgtattcgcaggagaggtacggcttcttcgggtcgtccttcaggtacttctcgatctcgtcggcatgcgagtacatacgggtctcgatgtcggtgacgtcatcgtagtcacggttgtgggtcacgccctcgtagtgcaccggacggttcgggtcgatgtcgtgcacgtgcttgtacatggcgcggaacacgtcgcccacgtaggattcgttgcccagtgaccagatcagcacgctcgggtggttgtagtcgcgacgcatcatgctgttgacgcggtcgacgcaggcgccttcccattcgcgcttgctacccggcacgatggtgtcctcggtgaggacgtctccgggcagggaccagctgccgtgggcttcgaggttggcttcgtcgatcaggtagatgccgtactcgtcgcacagttcgtaccagcgttcctggttcgggtagtgcgaggtgcggatggagttgatgttgtggcgcttgcagaagaccacgtcatcgatcatgtcctgctcggtgatggcgcggccccgttcggcgtcgaactcgtggcggtcggcgcccttgaacacgatgcgcttgccgttgatggtcaggatgccgtcctcgatgcggaagcggcggaaaccgaccttctgggacgtgcattcgatgacgtcgcccgcctggtcgatgacgtcgacgtcaagctcgtacagcgtcgggctttcggcgctccaaggggcgatgccctgcagcggcccgctggagatcgcggtctgcgcctccgcgtcgcccgtcgtctgccacaccgtgttgccgtcggcgtccttcagggtcgcgcggaccgtggccgcgtcggccgcgttgagcacggtcagcgcggcatcgagggaggcggtgccggcctcgggatcccaatcggcttcgatctgcgtgttctcgatgtgcacatgcgggcgggcggcgagttcgacggagcggaacaggccgtgcagacgccagaagtcctgatcctcaagccaggaggcgctggagtattcgtagcaggcgacggccacgacgttctccccgtcgtgcagcagttcggtgatgtcgaactcattgggcgtgaagccgtcctcgccatagccgacgaacgcgccgttgacccacacgtagatcgccgtggccatgccgtggaacacgatcgacaccgatccgccggcctgcttggcgtttgccacgggggcggagacggtgaacttcctgcggtagagcgcgacgtgattgttctccgggatgttcggttccaacgggttctcgtggccgtcccacggatactggacgttcacgtacttgtggttcatcagaccggccgtctgcaggtggcccggaacctggatacgctcgaacgaggagtcgtcgaacgactcggccgtcgcgggttcctcttcgaggttgatgtcggcggcctgaacgacctcgacccgccactcgccgtcaaggctctgcttgagatcggaccattgtccgctctgggggtcgcgggcgtaccacttgtggctggaatgggccggagtccggttcacctcgaacaccgtcgggtcggtcagccaagcctgcgatgcgcgatcgacatgtgtgacgtctgtcatgctctcctgctttctgtcattacctcgttgtgaatgatattatggaagaggccggggcctcctttaccgaaaaggataaacagtttttatataaaacgcaaatcctgtttaccgcttccaaatcactggcactgcttgccgtcgacgctacgccgcgtccatgcaatgtctcggttcagctcatgttatcccatccttgcgacacgctgtttatctccttgtttactaatgctttttactttcagtgataaaacttgtatgcttacggtgataaaacttgtatgctcacggtgataaaacttgtatgcttactttacaaaatcaatgagtgattccatgctctgggttcttaaggagaagattaatgagcaacgaaaatgtcgcggacggtgacgtccgcaggaagggcgggttaggccagcgcatcgcctacgcgtgcggcaacttggggcaggctgccttctacaacgcgatgagcacgtacttcgtcacgtacgtcaccagctgcctgttcgtcagctacagcaaggctctcgccgcccaaatgatcgccgtcatcaccggcctgatcgtcgttatccgcatcgccgagatcttcatcgatccgctgctgggcaacctcgtggataacaccaccaccaagtggggccgtttccgcccgtggcagttcatcggcggactggtctcctccgtgttgatcgtgctcatcttctccggcatgttcggactggtcaacgtgaacaccacgctgttcatcgtgctgttcatcatcacgttcatcgtgcttgacgtgttctactccctgcgtgacatctcctactggggcatgatcccggcgttgtcctccgactcccacgaacgttccacctacaccgcccttggcaccttcaccggctctatcggctacaacggcatcaccgtcatcgtcatcccgatcgtcagctacttcacctggacgttcaccggcgccaagggccagggccaggccggatggacctccttcggcttcatcgtcgcgctcctcggcctgattaccgcctggaccgtcgcctttggcaccaaggaaagcaccagcgcgctgcgtgccaaggcccagaagaacggcaacccgttcgaggcgttcaaggcgctgttccagaacgaccagctgctgtgggtcgccctgtcctacctgctgtacgccatcgcaaacgtcatcacgaccggtgtgatgtactacctcttcgtgttcgtgcttgacgagcctgccgccttctccatcaccggcatcatcccgctgatcgccggattcatcatggcgccgctgtacccgattctcaaccgctggattccccgtcgctacctgttcaccggcggcatggtctccatgatcatcggctacacgatgctcgccctgttctccagcaacctgccggtcgtcatcgtcgccctgatcttcttctatgtgcctgcgcagttcatccagatgaccgcgattctgtcgctgaccgactccatcgagtacggccagctgaagaacggcaggcgcaacgaggcggtcaccttgtcggtgcgtcccatgctcgacaagatcggcggcgcgatgtccaacggtgcggtcggtgccgttgccctcgcggctggcatgaccggtcatgccacggcagccgacatgaccgcgtccaacatcgccacgttcaagaccttcgccttctacgtcccgcttgttctcatcatcctcagcctcgtcgtgttctggttcaaggtcaagatcgatgagaagatgcatgcgcagatcgttgaggagctcgaagccaagctcgcttccggcgagatcgtcgacgatgaggcgcaggcagttattaagaactgatctcccgttcccatccctcccataaggcccgtccgcctgaaccgcaagatgcggtccgtggcggacgggcctgttcgttcctgcggtcggcggtcatgaacatacccatgtcggttccggcagtggggccggaaccggcggcgtgtcgactatcggccaggagtgtctatccgctggtatccgatatgggccgtggccctgcgccgcctgccaaaggagataaccgtgcgtgcatgacgtgacttcgtatggccaaaactgctgaccgcggacggacgcggcatcgctttcggtggcgactatagtcccgaccaatggccggaggaaatctgggatgacgacatccgcctgatgggccaggccggcgtcaacaccgtggcccttgccatcttcagctgagatcgcctccagcccatcgaagaccattgggatttcgactggctcgatcgcgtcatcgacaagctcggtgacgtgaccgtcgccggaccgcatgtgcaggtgcttgcctcgtatgccggcgaagaagcggatgagtgggagcttgacggcatggccgcgatcacccgcaacacgtacggcgaaggggaggcgtatttcctcggctgcgatctgggcgtgagcgatctgacgcgattcgtgggaggctggcttgccgcgcagccgcaggatggccggcagccggaagccaacctgcggtcgcccgccagcggcgtgacctctgacgttctgcacaccgtgcgtcaatccgacgacgccatattcgacttctatctgacacgtggcagatcggatgtcgaactgcgcgacatcgcaggggagccgatcgtcctgttccgggcggaacggggcagtgacggcggcgcgtatacggtgcatcgcaatggcgttttcgtgacgaagcgcccgaacccgtcggtgtagtcagttgcgacgaaacaggagggcggagccgcggacggttttgtgagacggtccgcggcctcaccgttggaagccgcggactcggatcatcagcaacggacgcgccgttgatttccacttccggagcaacgatggtgagctttgccgcgacgagatgctgcaggacggtgccgacgtacatggtgcccggattctcccttcgccgctgcgctgcctgccgcagcagatgttccacggccgcatcaacggaaagcgagttgtcggactccagcttgaatggtttgctggtgaagaacgcctgaattcgtttgacccagtattgctcgatctcggtgaattgctctgctgtcggacgtaattcattgatgagctcggcatagtcatgcatcagcgccatggtaccgcggctggttcgtcccttaaaggttgaaccgatagaaccgtcattcattactttttcaacgatactgacacgctcattcgattgtgtccaatactgctttctttctgcatgaacaacggtactcggcaaggcggtaacgatagtcgcaaaggctaagaagcccgtacataatcgtttttttgtagtgtttcagattttcagtagaatggcgacagccaaatcccgctggcttgctagtaaagcgttgtcctcggggggagttttgtttgttgttgaaagataacgcggcatcgaatagataggggaggcccggcatgggacgtcatcagcgtgcagaaacctccggactcatctccttcttgatttgcgccgtcgttggcgcggtatcgatgaacctgtacatggaatacgcgccggccatctggcagctgacgcaacgccgattcatggtatgttcgggcatcgtggcggcatgcggcgtcatttccttcattattggctatgcgcgcaaatcacgttcattgaacctcaaacatggttggtttgcaccgattcgtcgcattttcgaaatcgtcgccctttcggtggtgtatgcctcgaccattttcctgtcgtcttttgcactcatcggtgcggccaacgacatgatgggcaatgccatcttctccggctatatctccagcgtctgcgccgccttcgccggcgtggtggggtacatgacctttgtacaggcggagatgatgaacgccaaaactattgccagtctgttgccgttcttcgtcatctccggcgtggtcaccgccggcatgaccaccgacgacccatactggtatcacaacaacttttcgcagctcggcgacagaaccacgtttgcggcccgtatgttcaactccacgctgattcttgccggcacatgcatcatcatcgtcagctacttcgccatctccgaactggtgaccaccgaacggctacagcgcctctggcacgaccgcaccaacagagatccgaatcgcggctacgaaatcccacatttcatgctgcgcatctccattctgtccttcctgctgatggtggccggcctggcattcatcggcatcggcgtgtttcggtacacgccacacaatctcttgcacaatatatgcgccaaaggcctgccgttcgtcatgctgctgctgttcgtgctcctgccgtggcttgcgccacgcctgtccaaagcagtgatggtggcctccgacctgaccgcgctcgtatgcgctgcattctgggtcaatatgatgatgggtcacaacaccctcaccaatgtggaggcgttggctggtctggcgttcctcggctggttcatcgtgttctcgcgccagatcgccgccatcgaggccgatcgcgcggccgctcagttgttgcacgcgcaggccatcgaaggcggttttgagcagccgtcttccgcacctgatcagcagatcgaatcccgcatcgctgccgaccggtgaataatttgtttgatagatttggccttatgactgaacgactcacgaatctctggcctgccccgctcgccgcacagccgttgaacgctacggtaacggtgccgggcagcaagtccctatccaaccgctacctgattctcgccgccctcggcagcaagcccgttactctgattggcctgctgcgttcgcgcgacacggaccttatgatgggcgcactcgaagccctcggtgtccgctgcgacgtggattccgcaaccgacaccaccgtaacggttactcctcctgtatccggccgattccatggcaacgtcaatgtgttctgcggactggccggcacggtgatgcgtttcgtgcccggccttgccctgtttgcagatggcccagtgaattttgatggcgacgaacaggcttatgcacgtccgatgaagccggtgcttgacggtttggaacagctgggtgcaacggttgattaccacggcgaggttggccgtctgccgttcactattacgccgcctgcaaccttgccggctgcccaggcgcaggtcagcatcgattcgtccggttcttcccagttcatctccggcctgttgctgattagttccaaactgcctggcggtctgcacctcgcgcacacgggggagaagaccccgagcctgccgcacattcgcatgaccgtggccgatgtgaccggtgccggcggtgcggttgaggccgacgaatccgcccgcacatggacggttgaaccgcgcgcaatgcaactgtcgagcaaggtgaccgttgagcccgatctgtcgaacgcggcgccattcctcggcgcggcattgatcgccggcggcacggtccgggtgcctcattggcctgaaaccaccacccagccgggcggcctgttgcccggatatctggagcagatgggtgccgaagtatcgttcccgaccatcggcggcgtgcgctattgcgaggtgaccggtgacggcaccgtgcgtgggctgggtacgttcgatttgacggcggccggggagattgcgccctcgttggcggcgattctggtgtttgctgataaatcgacagacatggttggtattggtcacctgcgcggccacgaaacgaatcgtctggaggcattggtcaacgagattcgtcgtgttgggggagcggctgaggaattgcctgatggattgcgtatcgaaccggtgccggcggagacgttgcacggtgccgtgatggaaacctatgctgatcaccgtatggccacgttcgccgcgatgctggggctgcgtattcccgatatcgaggtcatcaacgtggccaccacgcgcaagaccttgcctgatttcgtcggtatgtggagtggcatgctgaggcagtaaggggtcctgtgttctggtggaactcccctcagtccgctacgcggacagctcccctcagagaagggagccaagttatagggcctggatcccctctctgagtggatctgtccaccggaggcgactgaggggagtatgacgcgggggtagtggtctcatgaccatatacgaatgggggctgattccaatcggaatcagcccccatagtgttgcaactagagattggtgagatgcctaacggcggttacttacttggcgaaggtgttgccgtaggtgtcggtgccggcttcggcgattgcggcggacttgcgggcgatggccagctcttcgttcgtcgggatcacggcgatgatcacggaggagtccggagtggagatgatgcgcggttccttggagcgggtggcgttcttctcctcgtccagcttgacgccgaacggagcgagcttgtcgcacaccatcttgcggaccacgtcgtcgttctcgcccacgccagcggtgaaggtgatcacgtcgcagccacccatctggtaggtgtagttgccgatgtagctgacgatgcggtgcacgtagacatccagagccagcttggcgtcctcattgccctcggacaccagacggtgaacctcacgcaaatcgccatagccggtcatgcccatcatgccggaacgcttgttgaacagggcgtcaagctcgtccacgttcatgtgggcgttgcgaatcaggtggaagaccacagccgggtcgatgtcaccggtacggccacccatcatcaggccctcaagcggggtcagacccatggaggtctcaaccggcttgccggagacctcagcggaagcggaagcgccgttgccgatgtgcaaaacgatctgcttcaggccttcagccggcttgccgacgacgtccggcaccacggaggagatgtactcgtgggaggtgccgtgggcgccgtagcggcggatgtggtactgatcggcgatttccttgttcagcgcgtaggtgctggcggccttcggcagctggaagaagaaggaggaatcgaagacgaagatctgcggaacgtccggcagcagggagcgcatgacttcggcgcccttggcctccgggccgttgtgcagcggggcgagcacagccagatccttgacctggttgatggtcttgttggtcacgagggccggcttcgggaagatggagccaccctgcaccacacggtggccgacggcgacaatgccagcctcagacaggttcgggccgtactcctcgaagaagccgagcacgcgcttcagaccctgctcgtggtcgtgaatcggctcttcaagctcgtgcttttcgccgttgtactcgtgcttgtagtggccgtcgaccggctcaccgatcttctcgacgaggccggaagcgaggccttcgccggattcgagatcaaccagctggtacttgatcgagctggagccggaattgatgacaaggacggttttcgccattgtgggcatcctccattgtgattgaatgttcccgtgagacacgggttaccgttgattagattactcgttgcttgctacaaaataagcattacggtggctcccgctggcgggagccaccgggagccaagccgggctcactgcgcttcgatggcggtgagggcgatggtgttgatgatgtcctgcaccagagcaccacgggacaggtcgtttaccggcttgttgagaccctgcagcaccgggccgatggccaaggcgccggaggagcgctgcacggctttgtagccgatgttgccggcgcacaggtccgggaagacgaacacgttgacgtgtccggccacatcgttgcccttggccttggtggcggccacggtgggggaccaggcggcgtcgaactggatggaaccgaccaccggcagatccggagccttctccttgagcagcttggtggcttcctcgaccatgtccacgtccggtcccttgccggagccgagggtggagtaggagagcataccgaccttcgggtcgatgccgaaggcacgtgcggtctcggcggactgcaacgcgatttcggaaagctgctcggcatccgggttgaggttgatggcgcagtcggagaacacggccacatggtccttgaagcacatgagaaatgcgccggagaccagcttctggccgggcttggtcttgatgacctgcagggccgggcgcacggtgttggcggtggagttcacggagccggagaccaggccgtcggcgtagccgagcaccacgagcatggtgccgaagtagctggcgtcggccagctgcttgcgggcctgctcctcggtcatgcccttcttggcacgcaactcgcacagcttggcgaccatgggcttcaacacgttctcgtcgtccatagcctggaagcgggcgcgctccaagtagttcaggcccagttccttgccgcgagccagaatggcgtccttgttgcccacgatgatgaggttcacgatctcgcgctcaagcaggtagtcggccgccttgatgatgcggtcctcctcgccttcgggcagcacgatggtcttcttgttgctcttggccttgccgagcaggccgaactggaaggcgtacggggtgatgggcgcggtgacgtccacatcgagcgcggcgagcacttcatcggtgggagcgttcttacggaaggcctccagcgccagatccttggtggattcatcggtgaacggcacctgcggaagagtccagaccggcaggccgtacttggcgagggtctccttaacggagaaagcgtggcgcggctcgcatccggtcacgaagatgccgagcaccttgttgccagcggcctccatgccctcgatggacagcttgacggtctcgtcgagctcgtgcggccaacggttgatggtgcacacggctaggaacacgccggccttcagatcagcggcgacattcgcgtcgaattcatagctggtcggatcgttgacgtgggacttgtcggtgcccacgatcagggcggcgtccgcgcgggaaacgtccatggcatcgttgaacgcgccgacgatatcgccacgggcggtgttcttatcctcgcgcaccttgtgcacatcgaggccggtggacagggccacgccgagtccggcattggaggcggcgagtaggatcggggtgaattcgtcatggttggacacagcagggcggaacaccatggtcttgtacttggaagtcaatgcgttgagcatgccgtaagcgacgacgttgcggccattggcgccttcagggctggcgatatatacacgggtgacggtcacgatgttttttgtctcctttgatgatcaacacgatagggaccacacctcattgtagtggcgattactgttatcgctcacgccggtgtcgcgccaatcggaagcgtcccctttgcgacgctttccggggaatgttgcgcaaaaccccaaaagtcggccgataggccagaaaacgaaaaaggccggtgcgtgaagcaccggcctcgattgtggagctagggggattcgaacccccgaccctctccatgccatggagatgcgctaccagctgcgctatagccccgagtgaagctatccgattcatgggagtcgcaagacccgccatgaaccagcggagaaaccaccatatcgcctgacttgatggcttcgtcgtggagctagggggattcgaacccccgaccctctccatgccatggagatgcgctaccagctgcgctatagccccgttttcaattgttggcccgttgtttggacctcgtatacattacgacgagatgtcgattctggcaaaagccggcgtgtcgccaaatggcaaaagtgggatttggcgacactttttggcttgtttccgccattattcaggcattgggttattcaattactgcttgaacggtttttcgaatacactgaacctgttggctcagcaggggagccgtgacacgatcagcgttcgcgttcccactcgtcggtgtcggcgatggccggaccgtgattgtagtccagcagacgccagcgcacagtgccatcgggattgtccatcggcaccaagcgcacccagtgcgcattacgcaatgaaaccaccgtagaaaaggtcggatcgattgcagaaatgcccaacagggtctgcaatgtctgcgcaatccatgcgccgtgcgagaacacgaacaggtccgtgtcgtctccggcacgcgtggaccagtcctcaagagcctctacgccgcgcttgcccacagcttccttgggctcggcaccatacttcagctcgccgccccgagactccatccaggaacggaagtcctcggggtagcgttcggccagttcggccacggcatggccatcccaatcaccgaagctgcgttcacggacgcgacgatcatcgacgggctcgattccacccaatacgtcggcgaaagcttgcgcggtggcgtgcgcacgcttcaaatcggagcagacaatgaaccggtggttgatttcctgccgacgatcgacgtacagccttttcaaggccgcggcggtctgcttgacctgccattcacccacggcgtccagcggaatgtcgacctggccttggagcttgtgagcggcgttgtaggaggtgcgtccatgacggataaggaaaacggaacgaacatgattggtcatagtgacgatcctttcggttccagtgaggaaacaggaaaaaggggagggctgcctgatgccgtcaatgatgtttggcaacaggcagcccgacacgcgaatatcagcgaatatcagcgttatgtgattcgcacgttacgcggtggtgacggcagcatcttccgcatgctccgccgtttccgggtgtgcgagttcaagatcgatggccgggcagtcgcgccagagtcgttcgagcccgtagaattcgcgcgattcctcgtgcatgacatgaatcacgaaatcaccgtagtcaagcagcacccactggccctcggtcaggccctcgcgagagcgcggctgacggccggagcacttaaggaacaggtccttttcgatttcctcggccacggccagtacctgacgctcgttggaggcgccggcgatcatcatgatgtcggtgatgccgagcaggtcggctacgtcgaaggccacgatgtcggtggctttgatacggtccgcggcctcggcggccacgcggacggcgttgatggaatcctgaagtgcgggcatggttcagcgctcccaggcgggcttccagccctcgacgttgtgttgcgtattctcggagtagaccatcgtgtcgctcggcacggcgtggcgcaccacggaaccggcgccggtggtcacgttgtcgcccacttcaaccggggccacgaacaggttgccggcacccacgtggcagccggagccgatggtggtgcggttcttgtgcacgccgtcatagttggcggtaatggtgccgccgccgatgttggtgtggtcgccaagctgggcgtcgcccacgtagctcaggtgcggcaccttggtgccgttgccgatgtgcgccttcttcatttcgacgaacgcgccggccttggcatcctcgccgaactcgttgcccgggcgcaggtaggtccacgggccgatgttcgtgcgtgcgccgatgtgcgattcctgtacgcgggaacgctcgaccacggcaccttcgtccacggttgcgtcgatcagggtggtgtacgggccgacgatggcgtcctcgccgaccaccgtgtggccttgcaggaaggagccgggcaggatggtggcgtcgcggccgatttggacatcgtcctcgatccaggtggtttccgggtcaagaatggtcacgccgtcgcgcatccagcgctcgcagacgcggcggttgtaggtcttggacagcgcggccagctgcacgcggtcgttcacgccttcgacggtgagcggatccggagcggcgaacgcgccgaccttgccagcggccttggcggtttccagcgcgtcggtcagatagaactcaccctgcgcgttgttcgacttcagtccggcgattgcctcggtaagcacggaagcctcgaacacgtagactgaggtgttcacttcctgcacggcgagttcgctgcggttggcgtctttctgttcaacgatgcgcagcacgttgccttcgcgatcgcggatgatgcggccgtagccggtcgggtcatcgaggatggtggtgagcacagtggcgccgttgccggaggcggtgtggaattcgaccagacggtgcagcgtctcgctgtcgagcagcggcatgtcggaggcggcgatcagcaccgggccatcgaccttgccagcctcggtgagctgcgccattgcgcactgcacggcgcggccggtaccgggaatgtcgtcctggttcacaatggtgacctgctcgtcataggagcgggcggcttcggcgacgcgctcggcctggaagtgcacgaccacggccaacgtgtcgggattcagggcggccaccgaatccatgaccctgttcaggaaggtcttgcctgcaaaagcatgcagcaccttcggcttgttggaacgcatgcgggtaccctcgccggcggcgaggacgatggctgcggataatgccataactgacgtattcccttcgatcggaatgtctattgagggtggaaacacctcaaaacaatagacggccgcccggatgtcgagcggccgtcagccgttcccccacctggactcgaaccaagacaaagggttccaaagacccgtgtgctgccattacaccatgggggagtcgtgggctttcggcccacaagtgttcatttataccatactgtcggtatttaccgaaaggctacgccatgtcgcgtctcgcatcgtgtgctttccacgaacaaacacgcacgtgatcaggcgaacaggaagccttgaccgtggtgctcggggtaggtgtcgaacagttcggcgaccgagccgtcctcgaatacggcgcggatggcgctggccagcagcggggcgatcgacaggacggtcaagccatcccagcgcttttcctcgggaatcggcacggtgtcggtcagcacgacctcgcgcgcaccgcagttcttgagtcgctcgatggccgggccggagagcacgccatgcgtggcgaccacggtcaccgacttggctcccgcgtcctgcagcacgtggcatgcgcccgcgatggtaccggcggtgtcgatcaggtcatcgacaagcacgcagtccttgccggcgacgtcgccgaccacacggttggcgaccgcctggttcgggcgggtgatgtcgcgcgtcttgtgcacgaaagcgagcggaccgccgccgagacgctgcgcccactgctcggccacgcgaatgcggccggcgtcgggggagacgacggcgacgttgtcgagatggccctggaaacgatcacggatgtagtcgaccagcactggcatggccaccagatgatcgaccgggccgtcgaagaagccttgggactgcgcggcatgcagatcgaccgacatgatgcggtcggcaccggcggtcttcagcaggtcgaacaccagacggcaggagatgggctcgcggccgcggtgcttcttgtcctgacgggagtagccgagcaacgggcagaccgcagtaatggaacgggccgaggcgcgcttcaatgcgtcgatcatgatgagctgctccatgatcgccttgttgatgggcttgtagtggctttgcagcacgaacacatcggcgccacgcaccgattcagtgtagcgcacgtacatctcgccgttggcgaaatcgtatgcggtggtttcaaggacgtcgatgccgagctgctcggcgacatcctcagccaacttcggatgaatccttcccgtaacgagaataagattcttatcgggcttcccttcaaggattgcgctcaccatgtctcccaacgtgtggtctcgttgatgcagtcttcagcatagccgttcttcacgactggttggacaactcagcgttgcctgccgttcacctgccgcttgcgatccattgttcgatggcctgtttgaccgcctttgcatagatatcgctatccatgctcgggtggatgccgtcggagccgagcacctgcgcgttcgcgttggctgtggcatcccaatccaccagcaccacattgtctggatgtgcggccgcatagtcggcaagcacctggttggtaggtggaatccacgtacggtctccgtgggcattgaccagtaccagcacgcggtcggggccgatcatattacgaatctggtccaactgatcaggggtgattgccgaattggtgccaaggccgatcaacacccactgccgcagactgccggcggacagagcgttgccgatgagttcgggggcgaccatgatggagcgggaaacgctcgcgtcggtctgaatgccggggaagacttccgaaaggccctgtgatgaggccagcatcaccgaatcgcctatggcggtaatctgatcgccggtgggcatctcatgcttgggcttgggcggtgccggcacggcatggcgcagcagcacgtgttcggttttctgcatacgttccagttgtgcggcctgttgctccagctggatctgcatggcggttttcgcaggtgcatgagcaatgccctgcacgcagccggccaacgacagcaccaggataacgtcaacggcaataacccgggccacatgattcttcttgttcgtgcgaaggggcaccacgacggataccgccgagtgcgttgccgccggtttctccaccatcagccaggaaatcatcaccgcaatggcggtgagcaacgcggtcatgatgagaggccaaggccctactgccttgaagatcttcggggcaagggcgctggaaagaatccacaacggccagtgccacaggtagatgccgtacgaatacttgccgagggaggccaatggcttgaacaccatgaggctttgcatccaggaatcgtcggagatggtaccggcaatcagcagcacggacaacaagctggacaatatgatgccaccgcggaaggcgaatgcatcctgtttgccgataaccgccatggtgaccaaggcaatcaggctgaggaacgccaataccggtgccgccgcattccagatgcgatgctccacgggaatctgaggtaacggagcccgatgtgcggctgccgaagcgctcgagctaatggtgcggggcatcggcacagccctctggcgagcgtggcccaactgaggagcggtgacccaccaggcgagagccacacccagcatcaggcccatgctgtgggtatcggtgccgaagtagacgcgggtggggtcgcctttgggcacatacatcacccacatggcgatactgctgaacgccgcgagtcccagtgggatgagtgaagacagtttcgtctggcggagcttccacatcagccagacgatgaacggcacgatgacgtagaactgcatgagcacgccaatgaaccacagatggcgaaacacctgcgggttcatttggtcgaaatagctttggcctccggcaatggcgtaccagttgtagcagcccagcagcacggtgatgacttggtcgcggatggaaactagaatgtcgtgatcgaacagccagccgacggagacgatgaccggaatcagcagaaacagcgccggatagagacgtactgcacgcttgggaatatatcgcacgagattcagcgatccggttttcgccagagaacgaatcaaactgacggcaatcaggaatccagagacggtgaagaacacgtcgactccgtagaatccgcctggcagccgttgctgcatgcagtggtacagcacaatggctatcagcgctagtcctttaataccgtctaaacccacgaaccgcttcacggataatccttctctttccgtagtgctgatggcattccccgttctctccaacaaacggaaaacaagcccagcatggccgaggggagagacaatgcgacagcagcgaatcgtcaggccgcatgctgcatgattaccggcttgacgattcgcggcataccgcgcttatcggtggcgcttaccggtgatacagactcacccgttcgtacttcggttcgcagcacacgttgatgccgagtttgcgatacagcgcctcgtccgtggatgagatgataacggagaagaaggcgtcgcagccccgcaactgtttgagcccgtcgatgacgcgagcggccacaggactggtggcgctggtgattgacaatgcaatcagcgtctcatccgagtgcaagcgtcggttcacgctgttgagatgctcggttttcagccgacagatgggttcgatggcggcatcgtcgattaccggaatggtttcgtcaacaccggtgacggccttgagcgcgtgcatcagcagcgcgctggccgcgcccaacaggtcgccggttttgccggtgaccacatggccatcgggcagcaccatggcaccagccggggcaccggtggcggcttccttctcaagggccacggcgcgggcgggagaaagatcgggggtcacgccggcccggttcatgatggagcgcagccgctccacctgttcctcgccagtgccggtgcgcttcaagtgcacggcggcggcgaagtagcggcgcacgatttccagacgcgcggcatcgcggcaggcatcgtcgtccacaatggcgtatccggccatgttgacgcccatatcggtggggctctgataggggctttcgcccatgatgcgctccatcatggctttgagcacggggaatgcttcgacgtcgcggttgtagttgacggtggtctcgccgtacgcctccagatggaacgggtcgatgatattggcatcgtcgaggtcgacggtggcagcctcgtacgcgatgttgaccggatggttgagcggaagattccagatggggaacgtctcgtatttggcatagccggcgtcgatgccgcgctggtgctcgtggtagagctggctcaggcacgtggcgagtttgccggagccagggccgggcgcggtgaccacgacgagcggccgggtggtctcgatgtactcgttcttgccgtatccgtcgtctgaaacgatgcgttcgatgtcgtgcgggtatccggcgatcgggtagtgcaggcggcaggtgacgccgagttgctcgaggcggtggcggtaggcgtcggcggcgggctgattggcgtattgggtgagcactacggagccgacgaggaagccgcgggaacggaacacgtcgatgagtcgcagcacgtcctcgtcgtaggggataccgaggtcgccgcgggtcttgcctttttcgatatggttggcgttgatggcgatgacgatttccacatcgtccaccagactttccaacatgcggaacttggtgtccggctcaaagccgggcagcacgcgcgaggcgtggtagtcgtcgaagagcttgcctccgaattccagatagagtttgccgccgaattgcgcgatgcgctttctgatgttggcggcttgcagctcgatgtatttttcgttgtcgaatccctggcgcatagaggtcggcatccctttccgaacgacgtcgtaaacggaaaaattataccggacgtcgtcggcaacaaaaaatgggattccccgatggggaatcccattcgtcatagagagcaatcactcccgaggaatgttgaacaggggtttgcatggctcccaaaaacgcgctggtcgaaacgttgccgacgacgcgtgcgctcgaagagtatgcacgggtggctttgcggtgatttcccagaccgttcgttgctaggcgagatatttctttttccaggccttctttcgggcgtaagcgttttctgtcatgtcggagtagtcgtaatcaactttgaacttgccgttggaatggagaataagcgtcatcgatccccatctcttttcgggcttaagcgcggccctttcaggttcaatgaacttgttgatagccataaagtttttcatcaaggatgccctcgaaacgcctttttggtcaaagcatttaacgaagtcgtcttttccgctgccagcaacgtaatactcaatagagaacgcaccctcggcgtactcggcgtaaaacacgaccttgctccagtcttcggggagggtttcctcaagaattgaagctatcccttgtagcatcttcttttcactcattacatttcctttgcagtgttaagaagaaacgtaaccgtctcttcgccgtcaataatgtccgtgatagcaaacgagctaggcctgaatgacccgccctcataaagtggctcaaccttgaaaaacacttcagcgccatcagccaaagcatcggcgcatttttgctcgattgctgcataggcttttggttaacctcgccgcccatggcgacaatattctcaaggccatttgatccattgaatcggtcggcaatcagatggcctctttgatcaaaaagctcttcaaacccttttccgattgactggatagtgtccttgatggtcaaacgaccttcgtgggtctttagttgtaagaagccttcggccgattcgaccctacccattgcatcggtaacgtatttatacccattgatctcatagctcatgttcggaacgaggtcgtcgccaacgcggtaaagctgcccgagatcgtcggttgcacacttcacgccgtcgatcgcaaactcgttattgggaagcagtcggtcgccttcgtaaattgcctttccggcatcatccagaattcgtgagcttacgcccgattctgctgcctttgaggcaagaaagttatttagacctcgtccggcaagaagcgttgctgccgtaacagttcccgcaacgacttctccgacgatatcctcctgagatatctcaccgtcttcagcgccggcttccaagctctttcccatttcgtcaagaacgagtacagccccagcagcgagtgctgcaggggcagaagcggtgacggctacggcaccaagcgcaacttcagtggcgatttcgcctccagtttcgacatagtctccgatttcccgtatctgctcatcggcttccatgaagtcgccccaggcgttggctgcatcgtcaacagcgtgtgtttgcgcggttttcaccgctgcttcttcgtcttcggccagtagttcaatattcgattgaacaccgacatatgcgttttctccaacgtcggcaactccaagtacgaacctgccgccaagataagctccgttccttgcgccatcgcggacagtttcgcctgcagcgttgagtgttggctcgcatgctttccaggcgtcatctgcggcttcttgaactgttgaaatgctcgcggttaggacatcgccggaagaaatatcccgccatgcggcatctgcacaatcagcaacggtgcgttgcgcctcctcgaaggccaatctcgtttcggtcgtatccggcattaattgctctatattttcaaacaccatttagatcaccggccttgtttgagataagaccgctgatacttcggcgagtgctgaggccttttccgttgtctcgatgccggtacccctctttctcagctcgttgagatgagcgttaagcatcgactgaatgaacaggtattggattggtccccagctttcgggtgaggagtcatcttcgaatttccagcttgaaagcagatgggagcaaagcctctctttgaggctgtcggcagataaatccctggcgtcgtcgaggatgcgtccaatattgaaatacctataagcacaccattcaaacagtggcttcctcgaggacagaggagtccctgccatctcaatcaagcgtgccttcatggagtcaggtatgtccatcttgtgcacacagtcgcagaagttgtattcccttggctcatcgagcttgaacggattaagcacacaagagttgagatagcgaagctcttcagaagaagccttgtccttcgcgctgtgcttgctctgtgtcggcgagtactctaggccgcgttcatgcggttcgatgtgacagaggacaggttcgatccattcgttctgatatattgctgcaacgcctcgctgaagctttgcaagctcttggatttggctctcgttaagatttgccgccttgccgataagcatcctgtcgccttcgtcaggcagtttccaggataagtcgatgcgatgattctgcctcaagcccagcgggttgttaaggcgcggtcattttggcgcttacatctcacttttgcagacgtagaatacgagtattggaatcaacggagggttctcatgccaaatatcggtaaggacgaccatccgaagctgtggtcgcttattttcgtgcttatcatcgcgctgaccttctgttgcttcgtcatgggccaaggactcaacagtggaaccagcgtcttcctggcaggccaaggttacggtgcgagccttgccggcgtacttgcactcgtcttctccattgccgccgcgttagcacgactgttcgtcggccctgttatcgacaacggcaagtgctcactcgttatcatcgccggcatcgctatcctcatagcaggaacagcactgtccgctgtcgttcaaggcatctccctcttcacaatcagccgtttgctgcaaggcgtgggctttggcgcagcaacaacagcagcctcgaccgccgcagcaagcgtcttaccgcaagaacggctcggcgaaggcattggataccacggcctcggacaggctatcgccatgagcatcggcccagccttcgcactttacctagtaggaaccgatccctcaacgaacctctatgtcggccttgccctggttgggtttgcagggcttgtaatcgccctcaacgcacgctatgaaagtaaatggcaaactctgccaagctccagcgcataccgaatcaaaatggaaacccggctcgaactcgactcaaaagacgggcaggcacccagctccaccacagtaactacatccgaaacaattaacagtgaaaagtatcctgaaggcgaccaggtgtccaagagaaccctgcgtgactcattcaacatcttcgagccgcgcgcattgcctggcgccatcccacagatgatcatgtgccccacttttggctttggcgtcttctttgccggtctgtacggtactactctcggctatacccacgccggtctcttctacaccatcagcgcggtaagcatgattatcattcgcatgatttcaaagcatttcatggacaccgtacctgcaatcaaaacaatgaccggagccgtcgcgtgcggcatcctctgctgcctcatgctacttgccgcaccgtacggggaacctgtcttcctggcgtccggaatcttctatggtctcgccactggcataagcctgccacttaatcaaagcgtagcggtaaagaacaccccgccagagcgctggggcgccgcaaacgccctgttcctgctcgccaatgacatcggcattggcttcgcaagcgtaatctggggcgttatcaatgactcattcgggttccagacaagcatcgtctgcgtcattgtctgccttatcgcaagctacgcatccgcctggatcgtctaccccgcccgcgacaagcggtggaggcattagagcgtaagcgtcaaaatgaccgcgtagcaggaaacgtccagggccattccggcatacggatggaaaagtcctggacgtttccatctttgcgttgcggtatgccttaggccgctatgtcgctacaggccctcctcggcgttgttcgccatctcgtcgtcgaacgcatcggggtcgatgttaattatgaagtcgtcaggcatctctttggccttctcggcagcggctgggtcgagcttgcaggactcaggtaccctatccgaccatggcaggaacgagtccacaacctcatcggtgagctcgccggcgttgggcatctcggtcagcagccactcgacgtaaagcctgggattgagcccgttggccttggccgtggtggtgacgctgtatatcgccgcagacgcccgcgcgccgcgtggcgcatcgctgaagagccagttcttgcgccctacgacgaagattcgctgggcctgctcggcgacgttgttcgagagctccaggtgcccgtcttcgagcacgttcatgacgtagggccagaactccacggcgtactgcagcgcacggtgcagcgccagcttcggcgaggctaggggaagctggcccgcgcccatccccccgaagtcctccatgagcgggcggagctccgcgtcgcgggcggccttcctggcacccggctccatgtcgtcgaacttggagtcgaccttgaaacatggcgtcgatcctgcgccttgcctcgagcgcaacgctggccgcagacgccgccttggcgccgccgccggcgatcttcacgatttgggcgaagttgtatttcgtcaagtcggtgtttcgtgttta

SEQ ID NO: 899 - DNA, 56340 bp, Unknown
  gut microbiota DNA sequence
tcatgcccattgacagttcggtgcagtcggccgtgccttcggcaccggaggcaagaatctggtcacgagtgcggcgcagatgcgcgaagcccgcacgaatcgtgcgctcatcatccacatgggcaccaatagtcatcaatccctgcaagtgcagtccgcccatcgcaccgatgcgctgagccaagtcgatggcgtggctgggtgcgcagccggacttcgattcctcgccggattcgttcacctccagcaacacgccgaccgtgatgccgcgcatggtggcgcggcgggcgatcttctccgccagttcgatggaatccacggattcgatggtgtccaccgccggcagcaccttgccgattttattggcttgcaactggccgatgagatggaaaggaatatgcgttgcagctgcggcattggccgtgtcagcctcagcggcatcaatcacgcctagcgaataaccacgctcccccagtcgttttgccagaccgtcagccttgacagtaatctcctgtggacgattctcaccaatcacgcgaataccagcatcgatagccgccagaatctcgccgacatcgcgcgtcttggtggcagccagcaattggaccgaaccggcagcacgcccggctgcggactccgctgaggcaatccggtcaagcacgcgatgcacaccatcagtaatctcttgtgcgcgcgcctgatcgataacttcgttggcgagatccttatggtccatgtatgccgtcattgctgcccctgttcgtagattccccaccatcgtagtctcatacgcgcacataatgcttgttattgaacaaaagtgaagcccccgctgttcatgcgcgggggcttggtgatgctaggccgagcgagtgggactagcaggtaccggacttgcggcgcttgaggatgattacacccgcaacagcaagtaccacggcgaggatgccaacaccaagcacggctgcaccggtgtcaggtatcttcttgtgcttgccggagtctgcatcacccttgttctggttggaatcgttgccttggttgggcttgtccgtgccggaaccgggcttatcgccaccctggccaggcttcgtggtgctcttctcaaccagacccgcgatggcatcgctgattgcctcagtcgcagcctgtacgtcagactgggcggcctgaccatcactcgtcagcgcattcgccgtagcgactgccgaatcaagcacggccagcgattcatcagtccactttgtgcgatccacggcagcagcggcatcgagctgagcgctcagcgcggcacgatcttgcaccgtagctacaagcaccagcttcttcgctgcctgcttcagctgggttgcggcatccaccaccgcagcttcggtggcatcctcagccttatacacctgctgcgccgaatccaataccgccgcgtactccgcccatgaagtctcggtgtacttggaggcatcgtcagccttaggcgagtcagcgagcgcctgcttgagctcggtcttgtcgatcggtgtgggctcaggcggctcaggcgtactgtcgtcaatggcatgaacctgccattcggcaacagccggagaagccgagccggacgtgataaccatacgcaacttggtagtcttgaccggagtgttccacgtgccatcagaccaccccttggcatcgccggtggcccagccagcagacggtgaattggcggtcacagtgtaggtggcgtcggaaatatccacgaagttgccggcaccgttgttcgccaaggcgtcccagtactgcaattcccacgatgccggaatacccaatccgccatcatccgaggtgaattgcacgcggctagagtcgatagtcacttcacggtcccactcgtagtcgaggcgcatctcaccggtgttgggccaagtgccccagacatcctcgttggcaatggtgatatcgggaatgatcttgccgtcgttcaacgcggcggcacccttgacccagccggatgccttgccgtccacatcggtggcggtggcatcgccctcaatgtagccggtcagcggcacggaagtgtcggatggaatgtcggttttcgccgaagcggacacgttgccggccttatcggtggcgcggtagtacacggtggcgcgcgacgcgctcggtgcagcaatcggcttgctgtacgtggcccattgaccgtctgtgccaatgcggtattcaattgatgcgacaccggaaccggtgccgtcatcagcggtcaaggtcagcgtgcgctcctccttatcggcggcggcggtcacggttggcgcggcggagtccaccttgccgccggccttggccacgtcggaaacgttgccggcctgatcggtggcgcgagcccacacttcgacatcgccctgctgggaaagcgtggcaatggccgcgtttgcattcgcggcgatggtggtccagctcttgccttgatcagcggaaatctccagcttggcgataggtgcggtgtcgtccgtggcctgcacggtggcgaacggagcggtggtgagccactcgctattgcctgcgttagcagtaacggcaacggttacagtcggcttcgtggtatcagcggcaggctggtagccgtcctgcacggtgacatttaccgacacattgccctgctcgcttgcctcaccgggcacgccggcgaccacgccgtaggccgtaaacgaaccgaccttggcatacgaggaagcatcaactggacgccaaattactggggaggcaacggttgggttcccgtacttcacatccactgtggccggcagagtaggcgcagtaccggtggcggtggtcacgctcttcggcgcagtgattgccggcgattcgctggagtcggagccgacttcccattcagcaacggccacggaggcatagccgccatccacagcttgaccggtcatgtcgagctttaaggcagtagtggtcaccgcatcgaaggtgacggcgttggggttggccttgcctgtggtcgttgtataggcactcgggttggtgacatccttccatgtgccgtccgcgtccaagtactgaatcttccacgaggcgggcgcgcgcagagcgttggaatccacgtcgaaccaaaccttagacgagttgacgcgcacagtgccatcccattggtagaccagagaatcgccggactgcgattgcgggatagaacggtagttggtccagtgattcggcgggaccacagcggtttgcaacacacggccgtcgttcaccgaacccttccaagcaggcgtttcagtgaacgtggcgctcacctttgcgtacggagccacgttggtggagggctgcgttttctcggccttggttggatgggcggtggaaaccatctggccgtcggcggtccaatcgacttcatcaatgcacacggcacggcggaaatcggtgccgccttccttgtcgccggtgtgataggtcacataccatttgtcgccgaactggagcaccgaggggtgcatcgtggtggccgagccagaaggcacgattacgccttggtacttccatgggccgagcgggctgtcggaagtggagtactggatgcaagcttgatagttcgattccacgcaggtggccgtgcccgaaccgggcttaccgccgtcgtacacgttgtaataggtatcgcccttacggaacacccacgccgcctcgaagaatcccttcgggccgttcgcgttgctgtccgcgtccttcatggtgtggaggttcggcgtggtgccatcagccttggtttccacctcggtgtatgaggtgcggccggttgtggcgtccttcttcatcttgatggcgagctgagtgccgaacgtaccaaagtgcaaatatccggtgccatcctcgtccacaaagaatgccggatcgatggtttcaatctgggtttgcgatgtggtgagcagcggcttgccgatggcatccttccacgggccgagcggactcttcgacttggccacgccgatggcgaacgggtcctgtccagccgcctcagaagccttgtccttcaccggcacgtagtagtagaaccaatcatcggaagtgtcgctcggggtgccgttatcgtcggctacgacttggccggcgtacgcgccatcgccggtggcccagctgaacaggtctgccttggcgatggtcttgtaatgtgtccatttgccttgattcaggccgtcttcatcggtgacgtatacgccccagtccttcatgttgaaggagccgtagtcgggcgaagcctcatcgtgaccggtgaagacgaagagtttgccgtcatagctcagcgcggatgcatctgcagagtagtagttctgcgaaagatcgttcggggtgtcaataccctcgttctgcccgatggggttgcgcatgtagctgggcagtgcgctattgtcgatttgggtgacggtgacttcaggattgttatacggcagttcgttatacgcgtgaccggcaacgctgggcgcgttgtcagcggtggctgaatcggcggccattgcggtcggcgcaagggcaaggcctgacagcaatgtcgctgcggcgacgagtccaccggccaccgcgcgaaccgattgcgcggatacatggaaactcatagtgctcctcattgagtgagtgaaaagagtaatgatgggtagaaggaaaaggctagagccccctctgtgagggggctcactcggcagaatgactccgttgcgggtcaggccgagtggcgagccgaaccgtggtcgccggactggcgacgcttcaggatggtcacgcctgcggcggtgagcagcacggcagccgcagcaactacggaaaccgcggcaccagtcggaggcacacgatcacccttgttgtccttatcatccttatcagtgtcggtcacaccaggctgctgggagccgggcttctgctcaaccttggtggcccaaaatgccttgtcaagagcatcctgtgcggcatcgacgtcggcctgcttggcgtccttgtcgtcgtacaccttctgagcggcggcaatctggctctgcagagcctgccatgccttctcggtgtacttcgacttgtcagccttcttggcctgctcgatggaagccttgagagactccttcttcaccgtttcgacggcgggcttctcttccaaggccttgacggccttgttcagcgaagcggacgcttcctggacggcggcctgagtgacctcaccggactcatcgcccttgagcacaccttccgcagcctcgatggccttgttcaaggcctcgacactcttatccgtgtacttgccggaagcggcctcggccttggccgtgtcgatggccgcctgcaacgtggacttctccacgtcggtggcgagcgcaacgagcaccttctggccgtcctcgagcttggtcacctgctcggcgacctgttcttcggtggcattgacatcgtcgtacacagcctgggcagcgtcaatgatttgctggaactcagcccatgaagcggcggtgtagcggcgtgcatcgaggccgttggctgtgtcaagagccgacttgagcgcggtcttgtcgaccggggtaggttcaggctcggtgccgtcaataccatgcacgccccactcggccacggcggccccgaaggtgctgctgccggtgtacggagtgagcacgagtcgcagcgacttggtggtgaccggcttgaaggtcacagcgctccaacccttggcatcggtatccgcacgagaagccggcgaattacgcacgacggtgtaatcctcggtgggctcgacgtccttccaagaaccatcctcggcgaggtactgaatcttccaagcgtccgggacttccagaccacccttcgaatcgtcagtctcagcgaagttggcccagaactgggcgcggctctggtcaatggtcacggactgaccgaagtcgtactgggcgtacatgccgtcctttgccttgccccaagaaccccagaccttgtcgttgacgttctgatcatccgtggtcggccaagtatcatcgacgactacgccgtcgttgagcttgccttcggccggtgaccaggtcgcctcggaatcaggcgaaatggtggtcctggtcgccttgccttcaatccaaccgaccaacggctcaggctcaggctccggagtggaggaaccgttcgggtcggcaaccacgtggacagtgagcttggcagctgcggaagatgaaccgtcgtcgacggtaccagccacctcgtagtcaccaaccttggtcaggtcgatggccttgatgtcggcatccttccacgtgaccttgcggtcgtcgttgtatccgttcgggaacttcaccggaaccgtggcgggcaggtcgatggacttggcgttctggtagacggtctgctcaaccggctgcgcattacccacggtctgcgatgcggtatcggaacgagccgcgatgtgtgcaaccgtaccgttcagcgcaccggcgacggtgcccttgacatcgaatacggcatcggcggccagctgagcgtcggtcaccttaccccacgtgacggcgaggtcacggcgagaaccgtcggtgtatacggcgctcacggtggatggcagcttcagatcatcagccttggaaccggtctgcaccagtcggttgacttcgtccacgctcaccggctcgatggcgtacgcctcgaactcggaagcacccacgatggcgcccttcgggaagaccacgcgcagcttgtcggtttcgacggcgtcggcgaacttcacttcgttgccttcgttccggttgaccgtgtaggactggccgtcagccagtttcacatcctgccagttaccgtcagcgtcagcgtactggagcttccaagatgagaccatcggcacgccaccgccatcggtccagaagaagaccttggccttcttcagcggcaccttgccggcccacttcagttgcagccacggctccacaccagtggagtcgccccagttgttccaggtctcgttcggcgtgttggcgtataccacctgaccgtcgatgaccttcttggcgttgtccttcggctggtagccgttggtgtagctggcagaggcgctcgactgcggggctacgttcacggtaccgtcagaggggatgccgtgaacggtgatttccttggagccttccttctcgccatcggaagcggtgagcttcaggacgtagtcaccctccttgttgaaggtgacggtggtgctggcagcggaggcgtccacgaacttcgcagtaccgccttccggaccggagacctgggaccatgtggtggtgacgtcgccttctgcgggcagaccgtcatccttcaccgtaccgacgagcttggcaccagatgaggtgctggaagacacgtaagcatccacctgcggagtctggttctcggaagtgccgtcagccttgataccggtgttgtaggcttcgatctccttgacaccgacggccatgccggcctgcggcgtgaaggtgacgcggatggtcgtggtctccaccggagtgaactggatacggttgtagttcgcgcccgcgtagttcggggtgcgcacctgatccgcaatcggggcccatgtgccgtcatccttctggtactccaacttgtagttggcgggctcggcatagccggagatggtctggctggacgagctctggtagaagtacaagcggatgtcgtcgatcttctgcttgccgtccttgaacttgatattgagcgtgtcggtcttgttctcagagcccttggtaccccagaacgattccatcacggtcttgccgtccaccgcgttcttggccgggtagttggtgtccttctcggcgtaggtggtaccggtcacgtccgcgtccttggccacgttcgtggtggacttggaggcggagtcgacgttggtgccggacttggcgaacaggtcggtcacgcgctgatcggcattgaaggtaacctgattggcggccttcacgttcttgacggcttcggcgccgacggtaacctgggcactggaatcgtccttgacctcgaccgttcccgcagccgggtcatagatgaggtgcgccagcttgtcggaggtgaaggcgagcttgccgcccacgtacaggctgtatccagcaggaccaccgtagtggctgccgtccttgtcccatacgatggagacatcctgatcgtggtagcgcaggttgtttaccgtgaagtagttccaaccggggatttcgatcgggtttagctcaatcttgttgtcctcgcgcggcaccataccggctacgtcctcgaccatcgtccagttcgtggtgccgagctgggtgtggtggatccaggagcggtaggtgatcttgccgccgttctgtgcggcgtcaaggttcttgtcgaggttgttgatcacgccgtcaccgttcacatcgccgacgttgttgttgtcctcgttccagaactcgttctgatcagggtagttgttatcgccgccctggtagtgcgcgaacgccacccagtacagcagcttcttgaactgctcattggtgatgtagccattcttggctgcatcgtagttgcgaataccggccgagtagacctgcagcagcggctgcgcattaatgatggagaagttgttggaaccggggaagttcaacgcggccttgtccgcttggttggcggtgaagaacgggaagatcgggaactcgttggaatcctcgaacaggcgcagagccttgttgtaatcttcgttgccggtaggcatcaggccttcggagtacgggtagtagttattgatctccttgtacttggcgaaagcaccgtcgttcagccacctgtgcttgagcaggttgtcggacttgtcccacagttcagtggtgacttctttctggatcttgtcggcgatggcctgcatcttctcggcgttggcggtatcgccagcagccttgtatgcctgagcagccgcgttagcgttggcccacatattggcggaaccatcggcgcgatccatgcgctggccggagcgacccggctcagagaaggaaacggcgtcggcatcgttaccggtcatcgaccaccaggaccagtcaatcaagctgttgtcattgttgttctggttgtcgttgttgtccggctcgctcttggaagcgagtagaccttgcacgtcctcggcaccctggtcggccagcttctcggccacggtggacggaccgccgtgcaccttgtaggagtcccagccggcgcgcgtgatgtactgcgtgtagctatggttccagttggccgggtcgcccggattgtcgtggtagtagtaatagcccgccttgctcttcttggcggtatcgccggcggaaagccaggtgccgtaggagtactcggggttgcggaaccacttggtgtccatcatgaacatgccggaggtgagcacgatctggttgttgtagccgagcacaccctcgatggaggtcgggtactggaaggtgttgccaggtatgttggcgtcgagcatgttgaaacgactcagccaccagcggtagaccacggtcttatcgatgttgtcttccggagtgtccacatagggagcgttatcgacccaccacttgttgtaggtggtcacggaatccttgtaggaggcggcagcatccttaaagtcgccggtgtaacgggcctcatattccttggtggagtcaggcagttcgttggcgatcaggccgagctgaatcttgacggtctgcggttcgttggccttgaggctcaacgtgctggtgagtttgccaccgctgacgatccagttggaaccgtcctggttgttggcggagaagcgcggatagatggtcgtcaggttgttcttgacgttcacgcggccagtaagttcggtggcaccatcagcaccctcggcggcgaacggcgaggccgtggtcagtgtgacatcgcggtcctgcgtgctttccacggtgaggttcgcaaccatcacgttgttgtaggtgatgtacttaacttccttgatcttgaggctcttgccaccggtctggaacagggaggtgaagtagctcggtgtctgcttgcgctgggaggcgtcttcgttaagggtctggtttgcaccgtcagcgtttacggtaacggtaaagccatccctgttggtctcatcccagtaggcggtgttacccacaaaaccgagccgattaggcgtgtgcgtgtacatgtaggcggcgcgaccacgggtgaacaggtagttgttgccgtcggagccttcatacgagtaagaacccttgtcgttcgtgcctttaccagttggctgtgcaccagtacgggtgagaatcttatcgatccagaagtcatggtcggtgtcggtgccggccaggttcttcacgtcgttatcgaatgtctcctgcagatagctggcggcagggttatatgtggtgttgttcgccgccgtcttcatcggatcatcagatcccttgaacgacggatatgccacatccgcattcttgatgacgggcgtatcggctgcctgcgcggtgactgcaccgccggtggccagtgtggcgaccgctgcaaccgcgccgattgacgcaagccaccgctttcgtgttgattgatgcattcctgcttggacctctccgccccggtctttcgcgtcttcgctcaggctacgtcgcgtctatgcgaccaggacttcttctgtggatgctgggccgcagagcccgttctccatcagtttcctttattggttattgggttcaccggaatgagtgtcttcagtaaatctggtgtgatatccgccatggatatcccggttggagcaattcaccgaagctgattccacatcataaccgagcgaatacggtttcacaactttccctcagtgatatcaaccatcttatacaacaaaaacccggtaatttctcagctttcgcatttattttcgcattagagcattgctgcgtttcgccgtgtcgcagtacctacggcgcaacgattcagcctcgctgaatcaggaaccaacaggctcccgctggcgggagctggctcgcaaagcgagactgagggtggcttacacggtaccgcttatgaccgccctcagtcgactccgccgacagctctcacagcaggagcatataattaaaaaataatctcctgcacgggtattaccccgcacaggagacctcattccccggatgtgttttcggctccaatcgatactgacatccggcctatgccgtcatcgacttattacagacgatggcggcataagtatttttttgccggccagttgcgcgcaggccggcatatcgccgatatttatcgacgctggaagacacgcatctcgcctatctcgcggttggcccacgagtagtacggcaccaagcgcagcgtcgcgggttcgcccgcacgcggttcgtcggcatccacgtacagcggcgcgtcatcctcgtcggcgtgctcgcgcactgccggcaaatcaacggtatcgacgccacccagcaagtcggcctggaaagccacagcggcatccgcaccggtgacgccatcggccagacgatagttccacagatcaccggggttatcgacctgttcggcgcagtagaccagcggtccgcgcatcacggccacctgaccggcatcggagcgcacgcgggagttggcgcgcacgaacttcacggacatgtcgagctcgagcgcaatctccaacgtatcgccggcgttgaccacaaggtatacgaagccgtcttccagcgaacccactgcgggcttgccgttcacggtcagcgtgtaggagcccaaggaccagccggggatgcgcagcccaaatcggaccgagctgtccgcagcgctggcgggcaggctcaccgtgtattccacgtgactgtcccacgggaagtccgaacgctgttcgaccgtaaggccggaagcaaaatcggccttgttggcgatgaactggtggctcagcacggtcttgccgccgtcgcgctcggtgtagatgtaacggtccactgaagcgatgagccgggcgatgttggccgggcagcatgcgcagccgaaccagtcgacacggtgggagagcacgtggtgacgatccgggttgtccagtccgtcgggagtagtctccagtgcgttgacgtagtagtactgcttgccgtcaagcgagatgccggcgatggagccattgaacagttccttctccagcacatcggcgtattcgcccttgggctcgaggtcgagcatctgctgggcgaacatgctcatggccacggaagcgcaggtctcgccgtacatcgtgtcgttcggcaggtcgtaatcgtaggtgaacgattcgcccacatgggtggagccgatcgcaccggtgacatacatgcgacgggtgacgatgttcttccagaaacgcttggcagtgtcgatcagcccctgatcgccgagtagtcggcccacgtgagccacaccggtgcacaggtaaccgacgcgcacggcgtggccgtccgcggtctgctggtcgcgtacgggctcggcagcctggaagtaggtgggcttgtagaagccgagatcatggaagatgttgtcgccgttcagcgccttgagctgcttggcgtagaactgcggatcctgaccgcgcacgtcgatgaggtactgggaaagcgtcagataacgcttctcaccggtctcttcatacagcttggcgagggcgagctcgatctcaggatgaccatcggcaccgtggatcttgccttcttcggggccgaagttggcatccaggcagtcggccatctttttggcgacttcaagggcctgctcgttgccggtcacctgatggtaggcgacggcggcctcgatgtagtgacccatcacgtacatctcgtggctctgctgaatcaggctgaagcgcgggcggtcggcccatacgccggacttgatctggtaaggggtgtccaggtaaccatccggctgctgagcgcgggcaatgagatcgaccgtgcggtcgcacagcgccttgagctcgggatccgggtggtaggccagcgcgtaggcggcttcctcaagccacttgtagacgtcggaatcctggaagaccatgccatggaactcgtcgtccaattcgccggcggcaaccttcaggttggcaaccgcatggctcttgttgtcagccagctggttgccggctgggtcgtcgggcaccgtggtgtcgatctcgtcgttcatcacgccccactggtaggggatgacggattcgacgatctggtcgcgacgccgcttccagaacggggaagtgattgtaacgttcatgattgtcctttttttaaggcccttgaccacaccgcttccggccctgcaattaaggaccggcttcagccgggctcagtattggcttcgacgctgtcgcgtctcagcacggagcttgctgggaacccaccgggctcccagccaagggccggcggcacgagccgtcagcccttgacagctccggccataaagcccttgacgtagtacttctggagtgcgaggaacaggatggcgcagggaatcagcaggatcacgacgccggcctcggtggcaccgtaatcgatgacgcccatggtctgctgacgcatgttcaccatcgccagcggcaacgtggacttggacgaagagctcaagtacagcggaatcatgaagttgttccatgcctcgaggaaggcgagcaggccaaccgtaaccatcgaaggcttgaccaccggcaccaggatcttgaacaaggcctggaggctgttgcagccgtcgaccatggcggcctcctccatgtccttggggatcgcgtcaaatgcgttacgcatgatgaacgtgctcataggcagctggaacagtgtgatgaccaggcccacgcccagcaggctgtcgttcaggccgatctgcttgtaccagaccatcagcgggatcaacagcgaggcgtacggcaccatcaggatggacagggtgaccatgaagccgaggttgcggcccgggtagtcgaagcgggagaacgagtagccggccagcgtgcagacgaccacggagaacacgaccgcgaccagggtcacgattaccgagttgagcaggtacttgggcaggccttcctgataaccgaacagggtcaggtagttggccacgccccaacccttggactgggccgaaccggcctgcgggctgaacgagcagatgatgacccagaccagcgggctgatgaagatgatggcgagcagagcctcaaggattcgagcgatgacgcgcttccacaatggggtagtcataatgtgttacctcccctttctcacttggtgttgtcgcgcatgccgcgcatctggatggagttgatgatgaccagggccaccagcacgatcagcgagagcgccgcggccatacccagatccttcttggaatcgaaggcgaagttgtagatgagctgcaccacggtcatggtggagttgttcggaccacccttggtcagaatgaagaactgatcgaacgcgaggattgaaccggtcacgcagtagaccaggcacatcacgatggtcggcttcatcagcggcagggtgatggagcggaagatacgccaggaaccggcgccgtccatgcgggccgcctcgtacagatcaccggggatggcctgcagaccgatcatcatcagcagcatgtagtagcccgagaaacgccaaacaatcacgataatcgtggcccacagggccgactggccggtggccagcaccgaaccaccctcctgcatcaggcccaacgagctcagaatcttggtgacagggcccacctgcggggaatacagggcgtagaacagcagggacgcggacgccaggcccgtcgcggacggcagcaggaagcaggtacgcagcacgttgttccacttcgagctctcctgcacaatcatggccatgcccaggccaaggaccaacaggaagatcgtgacgatcacggtgtactcgagcgtgaaccaaatcgagggccagaacaatttgttctcgaacaccttgacgaagttgtccgggaagttcacgccgcggttgccacccagcaggctccaacgagagcaggccatgacgaccagtagaacaatcggcacgaagaacaggacgataatcatcagccagtccggaagtgcgtacagcagacctcgcctggtctgcgccgccttcgccttggacttatgcacgggcacagccccggcgctcttggaaacactcgacatgtttctctctcctttgggaaattactgtgaaatggtaatcacggaatccgaatgcaatccgatgtcagggcttcgaggaaggaggactccgaagccccgccaacacaccgcattcataaggtatgtagtgatgaaggaagagaaggaatgaagaagaagatagaagttcgattatgtggttgagccggctcctgccctcacaagggagggaccggctcaatctgttcagttattattcagttattgctgtgatttgatgagtgatggtgaggagcatcaccaccgaatcactgggcagacaggacgtcggtgacggccttgttgtcggccttgaggtcaccggaaccccacacggcgttctgcacgagcagctgccacggggagccagcggcgttgaaggcttcgttgaaggccggggacttcggggtctggccgttgccgtcgataatcacggagttgatggtctggatgcgtgggtcagcgtctttgtaagcggtcttcagggtctggatgttggaggcggtgtcgccttggtcagcgaagacttccttctgagcgtcagactgcatcagccagtagaggaagttccaggcctgagcaacgtgcttggagtccttggagatacccatggcatcgccgccgaggaacgtggaggtcttgccttccttggtgcccgggatcggagcaacgccgacctcgaagccgccgtccttctcagcatcgaacagagcagtggtggaggtgttcgggtaaggcataacgccaatcttgccgttcgcgaacggagcggtccaggtggcgccggtctcttccttggagcctgcacccaggccgttggtggtgttggccagctccttgtaagcgtccaagacgcccttcatggagtcgttgtccagggtggcctcggagccatccttgttcatgacggattcgccgtcagcccacacggacgggaagaggtcgaagaccagagcaccaccggactgaccggcgaggtaggagcctgcgacgccatccttgttgagggcggcgaccttcttggcctgctcgacgaactggtcgatgctcttcggaccctgctccgggtccagaccggcttccttgtacaggttcttgttccagaccatcacggaaacgtcagtgatgaacggcagggtgtactcggcgccgtcaacagtaccggcttcgatgtggccctgctgcaggtcggccttgttgtccaggccatcgatttgcttggtgatgtcggtgaagatgccctcggaagcccagtacggaatacggaccacgtcgccggcgaggatgtcaggcagggagtcggtctgcgaagcgccgccgaccttgccttccatatcgtcgttcgggatgatctcgagcttgacctggttcttgtggctcttgttgtaagcctcgaccacgttcttggcctgacgctccagaggggaacgggtccacagggtgatctcggtaccatcgtcggtgcccttggccgggataccttcggcggtggcagtgccaccattgccggagccaccacaggcggccagcggaacgatcaacgcggcggcagcgatgccagcaagagtacgggtcagtttattgaaagacaccatgttcgcttctttctctatatatccgctcaactatgagaggcggtggcggacggtccgcctccttggtttcgccctgctcgctcctttgcccggagcaggtaacactgcgaaagccttttctcaatataaacgaacatggaagtttttgcaaaagcgctttcgcattttcgcgttttttctcacatcaaacgggttcgagactgtgattcgactatgaataacgtgcttgaattggcttaatatcaatgattattccggcgtgtcgagcaaatcaaacaaaagcgaacatggaagtaacgctttctttcacttaccttgcacttgaacaatttccctgactacgccacgccgaaaaaaagatgtttgcgaaagttttcgcattgaagctacaattattcccagatgcaatggcgcaccacaccgtatgaggtatttcatcgcaaaacaatgcgttatatactgctgaagaaccaaggaatcgaggcatgatgacccagccagcaaccggacgggcagcgcgacttgaggatgtggcggcattggccggagtctcgacggccactgcatccaaggcactgcacaacaaaccccgtatcagcgaagaaaccaagcagcgtgtactggatgccgccaagcaactcaactactctcccaacaagcttgcccaatccctggctcgaggcactactggcaccatcggcctggtcacctccgatctgcagggtcgtttctccacaccgattcttatcggcgcggagaacgagttgcgagcccaatcgacctcagtattgttggccaacgctcgtggcgacgccgccttggaacgtcagcatgtcgagaaactgctgtccctcaaggtcgacggactgctcatcgtgcagtgcgaaaccaaccccaggcccacgcttggccatgactggggcgtgccactggtctacgtctacggcccctccaccgaccccaaagactgctcggtcacttgcgacaacgtggacgccggtcgcatggccatcaaccatctcatctcgtgtggccgccggcacatcgccattatcggcggcgacgaaacctataccgctgccaccgaccgcaccaagggcgcgctcgaggcactggctgagctaggcatcgaaccggccgggccaatccggtacggcaaatgggacgaaggctggggccgcgccgccacccgcctgctgctcgaccaaggggtcaagttcgatgcagtggtctgccaaaacgaccaactggcccgaggctgcattgacgtgctcaagcagcagggactgcgcatcccggatgacgtcgccgtcatcggccacgataactggtcggtactgacctccagctcgaggcccgcactgacgtcgatcgacaacgaaaccgaaaccatcggacggcgtgcggcacgatacttggtcgatgccatcgacggcaacccgcatcacggtgtcgactacgtaccctgccaccttatccagcgcgaatccaccctcccgctggactgatatcaatcgataccctaccgcttcttggttttgcgcccctttaagtagatgtcgatgacgatccatacgccgagggcgaaggccacgacgtagcccatgaagccgatgaccggaatgccgaagataatcggcttcatgccggcgtagtagacaatcgacgagccaacgaacaaaccgaccacaatcagggccatcgtcagacgattcaccatatccgaaagcagctggaacggctcttcggagccgaccagttccatgttgacgcgcaactgaccacgggtcagcatacgggccacggtcttgagttcggtcatggtgccgagcgtggcatgcaaagcctgatgtccctcaacgcccagcgacttgatctcgtctttggtggcgttcttcagcgatttcgacgtggcgatatggtcggaaatgatttcgatcatattcacatcaggaatgaactcgtccagcaagccttcgagcgtaaccaacgcgcggccgacggtggtcaccgtactgggcacctcgatgttgtggcggccggccatctgcgtcagtgcggtcaggaaggcggcaatgtccagttcggccagatccacggtgccgaattccttgacgatcacgtccagatcagccagcagtgctgggtagtcctccggatcggcctcggtgccggcaaatcgcagcagcccctcggccagagcgggcgaatcctgtttggcgacggcgaaaatcatttctttgaggactgcacgggtgcgctggtcgagccgaccggtcataccgaggtcgataagtacgatctggccgccccggatgatgatattgccgggatgtgggtcagcgtggaagaagccgtcgtcgagaatctgcgtggcgtaattgtcgacgagcttggtgccgatctccttcaagtcataaccagcatcgacgagccggcccgggtgggagacggagatgccgtcgatgtactccatgaccaccacatgctcggtgcacagttcggtgtacgccgtcgggcagtccatgtatttgaatcgggcggcgaaacgcttgaattcggcgagattgcgggcctcgatcagaaagtcagtctccgattcgaaggtgtcccacagctcctcgaccacgcccttcaggtccacgatctgtgaggtgcgaatcaccttagtggcggccttggctatggagcgcatgatggagacgtcctgggccatggtttcgcgcacacccgggcgctgcactttaatagccacatcttcgccggttttcagcgtggcgcgatgcacttgcgccagtgaagcagagcccaacggcttggggtcgatatgcgcgaacacctcgtcggcgggacgcccgtattcggcggcaagcacatccaacaccgtggaatacggcatcgggtcggcgtcggcgcgcagtttggcgagttcgtcgcagaagctttgcggcagaatctcggagcgcatcgacagaatctggcccactttgacgaacgtggggccgagcgcctcgaacatgaggcgcattttgaccggagtcaggccgtgcagcacgtcgaattgctcgacgattctggtgatctgccccagtcgtttgatcttgccacggcgcgtcagatggtagcgcgtggcgaaatcgttcctgcgtccgaacagtgccagcgtttcgtcggatacgctcggagtcgccttggtaacggtctgcttgagcgtgtccgacgtgtcgacggaccggttcgccgccgcctcacgttcggctttcgcaggcgtcagaatagggtcgaccctgctggaaagcggggtcgaccctgattccggcgtagcgcgtgtgggcttggtcactcggccttgccctcgtcagcgggcttgtcggcggcactggtgtcggctgcggcagcagctttgtcgccggcttcggcggcggccttcttggcgtcatccaccgtctcgctcaccttgcgcttgagctcggtgttcagcgccttgccctgctcgaccgtaatctcacccttcttgacgagttcgtcgacgagctcgctgctcttctcgtatccggtggcaagggctccgatgcccgccagcaggaccttgcgcaggccatcacccagaagatcaaaatcagccatgatacccctccttcgaggtccgacatggcctggtgccatgtctcgtaccaccaagcctagcgcaaacaacagggcaatgtactagaccctcagactgatttcgactgatttttcgctgattggtacttaccgaggactcaccgagaattcaccgaggacgttcggcggcagccttgcgcgcgttggtggctacttgatcgagccgggcgagctccttggcttgttcgggggtctgatcggacgtatcgaacgtaccgtaacgacgagtcacggcagtttcgataaggaaatcgctgatggcggggtttttaggcagcaacgagccgtgcatgtaggtgccgatcacgttgtgcacgcgcgcgccctcggtatggtcttcgccattgttgcctcggccgtcctgatcgacggtgccgagtggctgaacgccttcgcgcaggaaggtctggccggagtggttctcgtagccaatcacatcgccgaactggtcggaatgctcaacaagattgccgatcatacgcacgttctggcccacggtataagcaccgataacgccgatgccgtccagacgggtgccgtccacggtttcaaagtactcgccgaacagctggtacaggccgcagatcatcagcatcggcgtaccgtctgcggcaagcgaacgcaacaggtcggcgcgatggtagaagtcgtcgatgattttcttctggccggtgtcttggccgccgcctcccagaataaggtccacctggtcgggccaatcgtcgccttgattgtactggtgaacgaccggttcataaccgtacagttccagccggcggcggatagtcagcacgttgccggaatcgccgtagatgttcatgtctttgggatacagggacaccacatcaattgttctggccatgtcacgttctccttgtcgatgtcttcccgctgacgggaagcgtcttattcctcaccatgtcctcccgcaggcgggaggtggcgcgcgggcgctagaggatagttacttgcccacgcccgcgtcccgtacttcggtgatgcggcccagtacggcgcgggttttgagcatggcggtgtaggtgcagtagatgtgcttgcgtgtgccgggattggcgttgacgaatgcggtgacggcctgttcgaggtcggtgttcgtatcggcgactggcacttggtcataccccaggcgcaatgccatgtcccaggcacgcacgccggagaccatggcgacaccggacgcgcgcagggaagtgaagtccacgtcccacagccagctcatgtcgcggccgtcggcatattcgtcgttgatggcgatcatggtgtccgcgttggccgggtcgaagctggcgagcgagaggcggaagcccatcgggttcttgaccagcagcagttcgaccggggaaccgttgacgtcgatgacctcgccacggccgaaagccggcgtgacgcgggaaacggcagcgatgagctcgtcggcggacacggcgcaggcgttggctgcggcggtggccttggatgcggcggcattgtcttgcatcaccgcacgtaccacagcgagcgcggcggccgcgttgtacaggttgtagacgccttcaagcttgacgtcggtggcgtagccctgaccgtccatctggaaggtggccttgtggtcgcccactgcggtaagtgtcacgtcggcgggaagttctgccgtgcctgcggaagctcctctcagttcgcttcgcggactgaggggagttctggctgaggggagcggcccggccacaccttccaccgacacggtcgtggccatgtcgtcatcggacgggaaatagtggcgcaaatcgtcggcgaggccgaagtatcgcacggtggtgccagccggggccttcgcggcgagcgcggcgatacgcgggtcctcgcggttcagtaccacagtgccggtagtcgccgcagccacatggctgagcagtttggccgtggtgtcgatttcaccgaatcggtcaagctgatcgcgcatcacgttcagcagcaacgcataacggggcttgacctgcttgacgaagtggacggcgtacgcctcatcgagctcgagcacggcgatgtccgcgtccaatttgccgccgagcgtgacttcggtaagcagtgcggagaccacgccgcgcacgaagttcgagccggtcggattggtgaacaccttcagccccagatcggagagcatcgaggcgaccatgcgggtggtggtggtcttgccgttcgtgccggacaccaataccgcgccaagcggcaactgcccgagcgtacgggtcaggaagccggggtcaatcttttctacgactttgccgggcaaagccgaaccgccatgtttggtgacgcgggatgcaaaccgcacgaagcggcctgcggccacggtggcgaacgcataccacggtttgcaggtctgtaccacggacgattggtcttgcgaaacatcgcgtgaaacgttgcttgccatcatcacaccccctgattggcgttgtagtcctgcggcatgtctttgaatttggacgtggcaccgaggaaggcgaggtggaaggtttcggtcgggccgttacggtgcttggccatgatgatatcggcctcgccggggcggtcttccttgtcgtagaagtcagggcggtggaccaggaacaccacgtcggcgtcctgttcgattgagccggattcacgcaggtcggagagctgcggcttcttgtcgttacgcatttccgggccacggttcagctgggaaagggccacgaccggcacttcgagttccttggccaagagcttcagggcacgggagaattcggacacctcttgctggcgggattccacggccttgcccgaggtcatcagctgcaggtagtcgatgactacgagtttcagatcgttggtctgcttcagacgacggcatttcgcacggatctccatgaggctcatgttcgggctgtcgtcaatgaacagtggcgcgttctgcatcttggtccagaactggttcagggtgttccagcgttcgggggtgatgtcgtcggcgcggcgcagggcggccatcggaatattggtttcggcggagataatacgctgagcgagctccaccttgctcatctccaagctgaagaccacggaagtcatgttgtggtgcaacgcggcggcgcgggcgaagtcgatgccgagcgtggacttacccatggccggacgtcctgcgacgacgaccatctgtccgggctgcaggccctgggtcacgtcgtcgatgtcgcggaagccggtcggcacgcccttgttgacgaggccttgctgcagtttgtccagctggtcgagcgcgtcgtggaccaccgggccgatggcggcatagtcctgacgcaccttgcccatcgacatctcgtagatctcggactgggcgaggttaaccacatcctcagcctgcgatccctcggcggaataaccgagctgggcgattttggtgccggcggcgatcacattgcgcaaaatggcccgctgatggacgatctccgcgtagtacatggcattagcggcggtcggtacggatgcgacaaggctgtgcagatagtccgcgccgccgaccttgtcgaggttgccatccgccaacagctggttggccacgagcaccacgtccaccggctgactggcggaaaacagatcgatgatcgcgttatagatcgtctgatgcttgggctggtagaaatcggtgacgtcaatggtctgcgagacctcgccgatggcatccttactcatcagcatgccgccgagcacggccatttccgcgtcatcatcatgcgggggcacgcggtcgaaaatcgggtcgccggccgccgccgacgtctgcgtgccgccccggcccgcgcggtcgccacgatcgccacgatccaggccaccgccgaacccattctgatacgagtgttcacttccttctggcatagcctccaagtataggatgtggcgtggcaggtgaacgatatcgtatggaaacgaaacggttgcccgcatcggttcattccttattcacctatgagtcagcgccacgacacgcagaaagcaaaatgtggatagaaaaataagttatccacattttggggataattctggggataatccactaagttatccacatactggggataacttggtggatagtctggggataacattccgcgcccacaacaggtgcttgcgcaacgcagtcaggcgtgatatgcgtgtgagcgtgcccatagactcttccgacgccaaagccaccagttccggcgatactacacgccgcgatggcttcggcaccccgcatgccggcgcaaacacaaacgtcagcaacggcccgaccgacgcccgctccaccaaccgccggatcatggcgctggccctgccgaccttcggccagctcatcgccgaaccgaccttcatccttatcgacacagccatcgtcggccatatcggggatgcggcgttggccggcctgtcaatcggctccaccatcatcctcacggcagtcggactatgcatattcctggcctactcgaccactgcgcaggtggcacatctgctgggagcgggtcgtcgtcgcgagggactgcaggcaggcattgatggcctgtggctggccttgagcatcggcaccgtactgggattgggattgttcgcggctgccgagccattatgccgggcactgggcggtcagggcgaagtattggaacaagccgtgacctatacgcgcgcaatcgtgctgggtgcgccaggcatgctgatggtatatgcggcgaacggcattttccgaggattgcagaaggttcgtatcacgctgatcgctgcggtgggcggcgcggtggtgaacacggtgcttgatgtgttgttcgttattgtgctgaattggggcattgccggctccggagtggcgacgctggtagctcagtggttcatggggctgttcctggtaatccccgccattctgtggtcccgggcggatggtgcgagtctgcggcctcgtttggccggtattgcggcagccgggggcgacggactgccattgttcattcgcacattggcgattcgtgcggccatggtgactacggtcgcctgtgccgcgcgcatgggtactgccgtgttggccgggtttcaggccgtgaactcctcttggaattttgcgatgaacatgctggattccgtgggcatcgccggccagacgctggtggccacagcgctgggcgctggcagcgtgcagcaggcgcggcggctgacgcgggcgaccgggcgtgcgggactggtcaccggcgcggtaatcggcacggcttttgcggtagtcggcctgttcgccgggcacttcttctcccctacgccacatattcagacgctgatcgccgtgggcatggtgacgatgggcatcttcttcccactgcaaggctggatgatggcaatcgacggcattcttatcggcgcgcgcgactaccgctatctggccgtcacatgcacgctgaccgccgtggtgtatgtgacgctcatactcatactggccaatatggtgacgccggcgctgacgagcgacctgatgcgtaccgccgtactctgggccgcgttcaacgtggtgctcatgggtgggcgcggtctgtccaacggactacgcgtgcgctcggacgcatggatgaggtaggtatcggccgcgcgaagcgctgggcgattccgtttacatagcggcgcgggcggcggaatacatgccgcggacgatttgttcgcgccacttggaccagccgtattgcttggtgatggtctcaccggcggtggcaccgagcgaggagccgtcggcccgggtcaggtcgaacagcatatccagcagcatcttgtcgtggtgcaagcggtcggccaactcctccgccacggccggatcataggggtccttacccgtggcaaattcggatagcgtcaaatgctcacgcaccagcacggtagcccagtcgacgatgtccggcgcgtagcccatacgcttgagaatcaccggcacatggcgggcaccctcggcggcgtgatcggccacgaacgcgcgcttgccgatgtcgtgggtgataccggccaacagcaatgccttgaaatgatcgtcatcataccgtccaccggacggtgtctcacgacccagacgcgacgtgacctccaccatatgccgatcgatggtgtaccggtgggcggccgaggcggacggacggttgcggacgccgagccattccggcatccatcgacccggaatgtccacgaaatcgatgctctcccacacttccataagattcgatccgcacgcaagcagacggataaacagctcgcgcgattcgtcatcccactggttgtcgtgaatcgggcagcgcttcagattaaccaaggtagacgggttgatgggaagaccgaattcgccggccgccacggccatacgcaacgccagcttggcatccttggcaggctcggcaccgggcgccaacaccaattcgccttcgtgcttggccacgccgggagccaccacgtcgaattgcggggcttcgcgcttgccaccagagcgctgagagaacatctggaagaacgcgaatcgcggcttttcgtgggtcagcgaatgttcggcgcgggaagcggtggaatcaagcgagaaggagatgcgccgaccgatacgggcaagcagtgtctgcagatcgtcgatcgagtaggcggcacgctcgttttcgggccaagtcggatcggcaaggccaagcatggcagccactttggcctgatagggcgtcagcatcaggttggtatccttgccggccaccagatggatgcagtcgcgtacgtcgagcagacgttccacagcttcgtcgtagatgccgtgcgggcggtcggccagccatgaggcggcgagcgcggagacgagcaccgaatcgcgcaaccccccacgggcctctttgatgtcgggctgattgacgtattggagccggccgaattcgtcgagtcgggctttggcggagtcgagcagttcgggcaggcgcttgcgggcggccttgcgccagcgttcgaggatggacgtggcggtggtggtgatcagagcggtgtcgccggcgatgggcttcacgtccagccagcccatggcggcgggaaggtcatggtcggtgacttcctcgcattgggcgcgcgtgcggatggagtggtcgaggtccagaccgctgtcccatagcgggtaccagagtttgttggccaactcgttgagctgctggtcgttcaacgtgcgaggctcgtagatgatgaccaggtcgaggtcggagctggggcccagttggccacgtgccagcgagcctaccgcggcgaagccgatgccggagtcgggcacggggaaagagacatccttgcaggccgcattccacagctcagtgaggcattgcatggccagttccgtgcgggctttgcgcttggtcgcaccattccggtagacgccgtcgtcatccggctggctcatatccatgaatcgttgtttcaagccatctactgctgaagtcattgcttcatctttcattgccaaaaaaagtccccgcacggcgtcaattcgcggcgtgcggggacctttcctatgcagtccatccccttctaagcatggacgtctgtgttatcagatcgcggcggaaccggtctcaccggtacgcacgcgggccacggagtccagcggagcgacccacaccttgccgtcaccgatggtgccggtgccggcggacttgatgatcacaccgaccagcgtttcggcatccgcgtcatcggacagcacttcaacgcgaatcttcggaatcaggtccacagtgtattcagcgccacggtagacctcggtgtggccgcgctggcggccgtagccgttggcctcggacacggtcagaccgtgcacgccggcggccgcgagggcctccttgacatcgtcgagcttatggggctgaatgatagcggtgatcagcttcatttcacttcacctccttgagaacggagctggcagtaccagcaaaatcgtaagcacgttcgccctggtcggcaagatcgatgccgccgacttcctgagcttcggtgacgcgccaaccgatggtcttctccagagcgaaggcgatgatcgcggtgatcactgcggagtagaggatggcgacgagagcgatgaccagctgaacgacgagctgcttccagtcgccaccagccagcagaccggtgccttcaccgaagaagccgatgaggatggtgccggtgaaaccaccaacgccatgcacgccgacgacgtcgagggagtcatcgtagccgaacttgaacttgagaccgcaggccaggcaggtcaggacaccagcgatggcacccatcacgatggcccacagcggggaaaccacatcggcggccggggtgatggcgaccaggccggcgaccatacccgaggcggcacccatggcggtgtagtgaccggagcgaatcttctcggtgaagccccaagagagcattgcggctgcggtggcggcggaggtggaaacccaagcgtaaccagcagtaccgttggcggcgaaggcggaaccagcgttgaagccgaaccagccgaaccacagcaggaaggcgccgagcatcacgaacggcacgttgtgcgggcggaacggctgcgtgccgaagcccttacgcttgccgatgatgagcacgatgatcagggcggcgactgcggcgttgatgtggacgacagtaccacctgcgaaatcgtgggcggccgcgccgatggccttggagatggcgccgtcagcagacagcagaccaccgttccagaccatgtgggccataggagcgtagtcgaaggtgacccacagcgccacgaaaatcatccaggtgctgtacttcacacgctcggcaatggcgccgcagatcaggccgacggtaatcatcgcgaaagcgacctggaaggcgacgtccacggaaaccgggtagttgttgccgttcagaccggtggcggtgaacacgccgtcctgggcgaccatggagtccttcagcaggaagccgctggccgggtcgccgaagatgcctccgatgtcggaaccggcgtaagcaatcgaccaaccccacagggtccagataatcatggtgaccgacagggcggccgcctcaagcatcagcatgttcaggacggccttggcacgaaccataccgccgtagaagaacgccacaccaggcgtcatgaggaaaaccaaggacgcggatgtcaggatccatgcggtgttaccggaatcaatcgctcccatgtctacctccctctctttcgttcagggcaccgggggctttgcgcggccggcgtcgactttgtctctacaatgccgtcccccttgtgggggctaacagttcgtcagtaaaagccggtctcgttttggtttcgttacggcaagttacgcgattgttaagcgcacctgacagttaggttggcatcggatgggctgattccggcatgattccaacggatatgggaaagccccaaatcatgtttcgaatatgcttcggggctaggtttggtgcgttgcgggcgtttcccgcgcccacaacgtggacggacgcagggctcccctcgctgaggggaactgtcgagcaaagcgagactgaggagagctcgaccgtctacgcgagaatgccgtccacgaaaccttcgggatcgaaaggtgccaaatcgtccggaccttcgccaagaccgacgagcttgaccggcacgccgagctccttctgcacgctgatcacgatgccgcccttggcggaaccgtcaagcttggagagcaccacaccggtaatgccgatggcttcggcgaacaccttggcctgggccatgccgttttggccggtggtggcgtcgagcacaagcagcacttcatccaccggcaggttcttttcggtaacacggcgaatcttgccgagctcgtccatcaggttcgacttgttctgcagtcggccggcagtatcgatgatgagcacgtccgcgttcgcttccttggccttggcggatgcctcaaaggcgacggatgccgggtcggcaccgtccttgtcggagcggacgacgggcacattgacgcgtgcgccccaggtttcgagctggtcggcggcggccgcgcggaaggtgtcggccgcgcccatcatgacctgcttgttttcggccacgaacagtcgagccagtttgccggcagtggtggtcttgccggtgccgttgacgccgaccatgatgatgacgctgggcttggcggcacccggcttttcggcattgaggcggcggtccgtatctcgaccgaccagatcgagcagcttctccttgagcgtggcgcgtacttcggctgggtcggctttaccagtgatgcgggcgtcggttctcaggtcatcgaccagttgggcggaagcatccgcaccgacgtcggcaagcagcagtgtgtcttcgacgtcttcccaatcggcctcggagagattgtctttggcgaggatgtcgaacagggccttgccgaacgggttgccggacttggcaagttttgccttgagtcgggtcagtcgagagccgaccgattcgggggtttcaggtttggcgggagtgggcttggaggcaggttgggactcgggcttgggcgcagctgccggttcgggttcggcctgcgcggctggcgcaggctcggctttggccgattcggctgacttggccggctcggcggcagtcgcagccttagcttcctcggcttcggcggccagccgagcgtcggcggcggccttggcgtcgcgggtcttcttgttgtcgggggcaaccttgcccatcgcacgatccaaatcgcgcttgcgggacttgcccaaccagatgctcagggcgattacgataaccgccgccacaatcacgccaagaacggcgagcacagtattcatatccatacctgtcaagtctagcccgcagatggaatcccctacgaattcggcagtctcaggccgacaactccacccgacgacttaagctgaaccgcatggcacattcttcacgtatgacgtcgctgcagcgccgcgagcagctgattgaagtcggacgctcgctattcgccgccaaaggcttcgaagcggtaagcgtggaggaaatcgccgcgcacgccaaagtctccaagccgattgtgtatgagcatttcggcggcaaagagggcctgtatgccgtcattgtggatcgtgagatgcgcgcgctgaccagtgtgctcaccgccgcgcttgacgatccgaccgtgcacccgcgccagattgtggaacgcacggcgcttgcgctcctcacctatatcgaagagaatgccgaggggttccaggtactggtacgcgactcgccgagcaccgacccgtccggctcattcagctcgctgatgggagacatcgccgtacgcgttgaagacattctttccgaaacattcaaacggcagaagctgtctgccaagggcgtgccgtactacgcgcagatgctggtgggcatgaccgtattcaccgggcagtactgggccgaccggccaaaggtgagcaaggagcagctggccgcatacattgtggatttggcctggcatggcctgagccggcttgactccaagccccagttgttctttgagggcgccaaggcgcggaaggaggccgagcgccgagccaagcgcgagtccgattccggcagcccggattcagaccagacgagttctgcccaatcggatcccgagcacgccaccggggaagattcagggttgcagaacatgagttcaggggcacaggttacgcaacactctgccgagtcgggagacgaagtgctacggtttgaacaggaaactgaacataacgactaaatatgtgaggacgtaagactttcatggccagcacggcaaagacgctcacctttgtgatccccgcatacaatatggagtcctacctcgaccgttgcgtgaactcgttgctttcggcaagcgacatcagcgacctcgaggtgctgattgtggacgacggttcgaaagacggcacgctggagtacgcgcgcaagctggaacgcaccaatccgggcgccgtacgcgcgattcatcaggagaacaagggccacggcggcgcggtgaacaccggtatcgcggcggcgaccggcatgtacgtcaaagtggtggatgcggatgattgggtcgacccgcaggccatcgacacggttctggccacgttgcgtgcacagcatgacaccgacgaaccgattgacatgctggtgaccaattacatgtatgacaaggtggccaagcgtcacaagaccgtagtgaacttccgccgtgtgatggaggccggccgtgtactcggctgggatgacctgggcaagttcggtctggcgcagtacatcatcatgcatgcgctcaccttccgcacgcaggtggtgcgcgattccgggctgaagctgccggagcatacgttctacgtcgatttctattactcgtaccagccgttcccgtgggtgaagcgcatccagtacctcgatgtgccgttctaccactacttcatcgggcgcgagggtcagagcgtgcagaccgacgtgatgattaagcgtgtggaccagttgcggctcgtcaatcggctgatgaccgaggccacgcccgaacgcggtacggtgccggaggggctgtaccggtacatgattcacttcctggcgatcgaatcgtgcgttacctcggtgttcctgattctctcgcgcgatccggccaactacgttaagaaaaccgagctgtgggatgcgattgacgcctattctccggccatcggcaaggatgtgcgctcgcagctgatgtcccgcgcgctcaatctgcccggcaaaaccggccgctggatcgtgcgcaacggctatctcatcgccgaacgcatcgtcggctttaactgattcggattgtggttttgccctgctgacgcgttatcagcagggcatccctattacctccccagtcgaggttttactactcggcccaacggtcggacatcgcgaagctgttgtgcatcaggttgctggaggtgtatagcacgtcgttcagcagcttggttgtgtgctcgcgcaggtagtcggccatctcgtcgttggccgcttcgagcgcatccgccacgccttgcacatccttctcatcgccgtggccgccatcgagcggccatgcattcgtatccgtcgattcggcatcgcttcgagcaagcaactgctcatccgtgcgctcgatgagccggtgcccgaacgcgcgcacgccctcggcatacccttcgatgaaccggttcgtctcataccagtgtgcgtcggccacgacggcgatcaggcggttcgtccaatacaggttgccggtggagacttcgggcgtggtgtcgcgcaggtaggcaggcgtgtcgttgacgttcgcgtagaacggcgcggcggcggtgaacggaccagagccgaacgatacccacatcaccgtgcgattggccgccggcacatacggacggacctgaatcgccaccatatggccggtgcggttcacgccgatcggacggtaacggtggcgcgattccgccgtgccggtcgtgccgtacgggtcgtacggcgtgccttcgaagtgcgaggacagcaggaaatcaacgtcttcgaggctcaccttgtcttccggcacgcggcaccacgggatgtcgtcggattcgggcgtgtagcgggcggccggcgaatcccagtcctcgctggggttgaggcggcgttgcatgtaccaggcacgcggcgtgttgtagatatggtccttcggcgtcgcggtgccgaaggccttgcgcgggttgaaacgggtgggaagggcaacggttgttccgaatccggcgctatgcacgtgacggccgttggaagagaccggcgttcccattgtgcggtcgaggtgatgcgtggccatgaactcgcgcaggtcggcgctgcataggtattcgcgctgctcgccgaacgcatcggcgaggtcgaagtcgtcgatgccgagctggttggggatcgtggcatagcagtcatcgggcactcggcgggcgatccaatggtggccgccgatggtctcgacgtaccagatctcgtccacatccgaaataatcacgccgttcgattcgtaggtgccgtaggtttcgagcagttcgcccaaccgcgcgacgccctcgcgcgcggtggtgacatacggcagcacaagggtgatgatgtcttcctcaccgataccgccgggctgctcggcctgataatcggtgctgtccggttcgccgacagccggccgcaactcgaccatcgggtccgcaccgagcacgcgctcgttgacagcgatggtttcggtggcgctcatcgccacgttgtgttcgttggcaccggcttcggccagaatgccacgattattcagcacgttcggtgcgatggtgtaccggcaaggattgtccggtagttcgatttcgacatggctcagcacgctgcggtagtggcgcggctggtcgtcgggggcgacggcgacgaagcgcttgggatcgtaacggcccgagcccgaatcgtcatcgcgggcgatgatggtggaaccgtcgtaactggcatttttgccgacaagaatcgtggtgcatgacatgggacaccactctaggagccaggctggtcaaaacaaaaaaatccttggaaccattgcgattccgaggatttgttgtgccccctgtgggattcgaacccacaacccacgacttaaaaggacgctgctctaaccgttgagctaaaggggcaactcttctaaaatacacaccgttttgggatatttcaactacggcgttgcgtacacgtttgcgtacgcgattggcccaacgcacggcacagcacacgcaatgtggcccaaatcgcagcccaaatcgcatatcgcctctagcgatagatagccgccggcgactacccttgtacattatgagtgaatcccccaattggagcaatcccctgcgcgactcgcgcgacctcagactgccccgtatcgccggcccatgcagcctcgtcattttcggtgtcacgggcgatctggcacaaaagaaactactgccagccgtctacgacctggcgaaccgtggcctactgccgccgagcttcggtctgaccggtttcgcccgccgcgactggacacaggaacggttcatcgaattcgtcaaggccgccgtccaggcgcattgccgtacgccgttcaaggagtcgacttggcgcaatctggccgccggcatccgcttcgtgcagggtacgttcgacgacccggaggccttcgagcgtctgagcgccaccgtgcaggagcttgaccgcgaccgcggcacgcagggtaaccatgccttctacatgtcggtgccgccgcgcgcattcccacaggtcgccaagcagctggccgcctccggcctgtcgcgctcgtccgagggcgcatggcgccgcgtgatcatcgagaagccgttcggccatgatctggccagcgccaaggaactcgacagcgtggtatccgaagtgttcgacccgagctccgtgttccgcatcgaccactacctcggcaaggaaaccgtgcagaacctgctggccctgcgtttcgccaacgccatgtacgagccgatctggaacgccaactatgtggaccacgtgcagatcacgatggccgaggacatcggcatcggcggccgcgccggctattacgacggcatcggcgccgcacgcgacgtcatccagaaccacctgcttcagctcatggctctgaccgccatggaggagccggtgagcttcaccgccaaggacctgaccgccgaaaagaccaaggtgctttccgccgtgcgcctgcccaaggacctcgccgccaacaccgcgcgcggtcagtacgccaagggctggcagggctcgcacgaagtggtcggctacttggaagaaaaaggcatcgaccccaagagcaccactgaaacgtacgccgccatccgcctcgatatcgacacccgccgctgggctggcgtgccgttctacctgcgttgcggcaagcgcctcggcaagcgtgtaaccgaaatcgccgtggcgttcaagcgcgccccgcatctgccgttcgagcagaccgccgtgcgcgaactcggcaagaacgccatcgtgattcgcgtgcagcccgacgagggcgttaccatgcgcttcggagccaaggtgccgggcggctccaccatggaggtccgtgacgtgaacatggacttcagctacggccgctccttcaccgagaactcgccggaagcctatgagcgactgattctggacgtgctgctcggtgatccgccgttgttcccgaccaccgaagaggtgaacctcagctgggagatcctcgatccgattgaacaattctggtccacgcttggccagccgcaggcctaccgcgccggtacgtggggtccggcacaggccgacgaaatgctggcgcgcgacggccgccactggaggatgccatgatcatcgatatgccgaacacccgcacccgcgagattgcacacaaaatcgaacagctgcacgaggagcgcggcgaatcggcgaccggccgcgtgctgacgctgctcatcgccaccgaggacgcggacctagagcatgcgctggaaatcgcgaactcggccagccgtgagcacccgtgccgcgtgattgccgtagtaccggataccaatcctgccgatcagtccggcgaaggcgaaccgaacgcggccgaagtggccgccgaggtgagcgcgagtcgcgataatccggccgtcgatttgaccgacggcccgaacgatccgaacgattccaacctgaacgcccaagtgcgattcggcgcggacgccggtgccggtgagatcatcatcttgcgtccgcgcggtggccttatcaaccacccggatacgctggttatcccgctgcttgtgccggatgcgcctgtagtggcgtggtggccgaccacaccgccgtcgaacccggccaaggatctgatgggtgcgatggcccgcagtcgcatcaccgacgcgttgcactccaataatccggaggccacgattgagcgtttgcgccgcaattggacaccggaagatatcgacttgtcctggacacgactgaccgtctggcgcgcaatgctcgcctcgatgctcgatcagccgccgcacctgcccatcaccgccgcgaaggtgaccggcaaggccgacttcctgcctatggaaatgctgtgcgcatggctgcgtctgaaacttggcgtaccagtcgaaactgagttcgtgcccgacgcgcaggccgtgaccggcgtgtacctgacccgtgaggacggtgtgatctcgctggaacgcccgtatgaggaccaagcgctgatctcgctgcccggccagactccgcaggaagtgtccgtgccgatgcgcaccatcgaggactgcctgaccgaggaactgcgtcgcatcgatcccgatgagatctacgccgaggtcatcaacgaaggctgggatctgattcgtcactgaagtcggtagaacccgttgccacagcggcgttggaatgagttcggcaattgtggccgagccatgccaacgccgttgctcatcgtttcctacctcatgcgatgccgaagctcatgcccgcggagtaataaagtgacatatgcgatgtcgcacaatgtggattgtgttgtcaactgacaacacaatccacattgcaaagtacgacacataccccatacaaggaccatacatggcaactcgaaaactcattgtgtatccgaataaagatctgatgattcaggctggcgcgcaacgttttgtcttggcgctactcgatttgctcgccgaacgattgcctgatggcacgcatcgcacgcgtgtggatgtggcgctgtctggcggttcggccgcgcagccgctgggcttggtgctgaacgatccgctggctgacgcgattgattggtcgcgcgtgcatttctggtggagcgacgaacgttttgtgccggcttacgacaccgatcgcaatgctttggaggcccgtcgcctgctgcttgaccagctggtggcagatggcaagctgcctgagtcgaatattcatgagatggcggccgatacccgttcagccgatgacatcgccgatgtgatggatcaggccgacagcgatgatgcttccgttcgcgccgccgccgatgccgcgaatgatgcgttgctggacgatgtcgcgagcgactatgagcgcgagttggtgaatgaattggggccggaaccggtaatcgatctgatgattctcggcatgggaccggacggtcactatgcgtcgctgttccctggtcatgatgaggtcaaggttactgataggctcaccgtgggtgtgaaccactcccccaagatgccgccgctgcgtgtttcattgaccgcgccgctcatcgcgcgttcacgccatacgtggttcttcgccgccggtgccggcaaagccgaatcgctggcccatgtcttcgagcagcccaacaaaccggattacccgtcctcctacgccaacggagtggacgagttcatctggttctccaccgaagaaaccgtcaccgagttgtgagtgaattaagccccctctgatgagggggcttaattcgtctatggctacgcctcgatctcggacttgctgttttctcagctcggctatcgccgagcctgaagaaggccggacagcccacagggctgtcctaaacctgaaatcacgaggctacgcctcgatttcaggcttgccttcttcagcccacagcgtgtggaacacgccgggcttgtcgacgcgaccgtaggtgtgggcaccgaagaagtcacgctgggactgggtcagagcggtaggcaggcgcttggagcgcagaccatcgtagtacgccagggagctggagaacaccggggtcgggatgccggcctccaccgcgcgaacgatcacgcgacgccatgcatcctgcgattcgccgatgatcttctcgaagtacggatcgaacagcagggaagccggcgggttatcgcccctgaaggcctcggtgatgcggtcgagcaggaactgggcgcgaataatgcagccgccacgccaaatgcgggccacttcggacaggttgatatcccagccgtattccttggcaccgtcctgaatctcgttcaggccctgagcataggccacgaccttggaagcgaacagagccttgcgcacgtcctcgacgaacgcggccttgtcttctccggccagatcgatggtcttgttcggtccagccagaccttccttctgagcgtcttcacgcagctcaccgtgcgaagacagtgcacgagcgaacacggcttcaccgatggcagccacaggagaaccacattccagaccagtctgcacggtccacgtaccagtacccttcatgccggcatgatccacgaccacgtccacgaacggcttgccggtctcggcatccttgtggtgcagaatctcagcggtgatctcgatcaggtaggagtcaaggtcgcccttgttccattcagcgaacacgtcgccaatctcctcggcatccatgccgagtccacggcgcagaatgtcatacgcctcaccaatcacctgcatatcggcatactcgatgccgttgtgcaccatcttgacaaagtggccggcaccatcggtgccgatgtgggtcacgcacggttcgccgttcaccttggcggcgatggactgaagaatcgggcccaaggtcttccaggattccgcagtgccaccgggcatcagagacgggccgttgagcgcgccttcctcaccaccggacacgccgcaacccacgaagtggaagcccttggcacgtacttccttctcacgcttgatggtgtccttgaagaaggagttgccaccgtcgacgatgatgtcgcccggttcgaacacctcttccagctgcgcgatggtcgcgtcggtcggagcaccggccttgaccatgatgatggcggtacgcggacgcttcagggacgcggcgaattcctcgagcgtttcggccggcacgaagttgccttcggtgccatgctcgttcatgagcttctcggtacgcgagtagtggcggttgaacaacgccaccgtgttgccatggtgcgccagattacgcgccagattggagcccatcgtggccagtccaatcacaccaatgtttgctgtagcttcggccatgtgccttgcctttcgtttgattgtcccatcgtcatcacgcgcgtcacaaaacagcgcatcagcggagggaatcattccttcaacgcttgaaagtgtatcccgcttaccacccacacgcgagggctgtcttaggttctacgcaccttctgcccgcgaagcgtaattacttgccggccattcacatacgcccggccttggaagggtcgatatgcatggtctggaagcgattggccatgtaagcgtcgctgtagcgttcgctgaaccacatcgcgaccggtgaatcctgcggctggccggccatgcgcccataccagcaatccaaggccatcagcgtgaaggcaatgtcgatcaccatcagcaccgtgcataccgcagtcagcgaataccgcactttccatggaatgcgattaatcagagccagcagtcgcggtaacagccacttgatccacaccacaccaatcagtccccagaagaacatgaattggcccgaagtacgtccgtcgatggacagccaacggccggtgtaatcccacgcggtaataccaaacgccgcttccatgaaccagctggtgcaatattcgaacgcgccgccgatcaccgccgaagcgcagaaaatcaagaacggattcgccttccacagacgattcaggcacacggttaccaataccgcaccacagccgtaaatcggcgagaacgggccccacagcaaaccagcgcggtcctgaagttcaccgttatacagcgccatatggtagatcgtctccacaatcaggccacccaccgaagcgatggtaaacagccagaagatattgaaaaagtccagcgcaatatagcccttgccggactggtcgcggcctagcatgccggccgccacagccgattcataatcatcgcgatcgtccatacgcctgagcgcgcgctgcagacggcgttcctcgctcagggagggatcggcggtcaccgaaatcacgacgagaataatcatctgaatcagcggcagcagcaggttgaagccaaggccggtcagggccagcgacagcatgccgtcggccaacgtcaacggcatcagcacgtaggtccagcgcgcggcataccggcgatgattgcgcagcagcatcacgccgagcacaatcaggcatgcggcactgactaccagcaccaccgcatgaatcgcggacaggatgaaggtcaggctcatcgcatcgacgtgcacatgaccatccagaatctcgcgcacggcatagaggatggaaatcaccataatcggcaatgtggcgagtccgtccagcagcacgaccgcgccatagatgcgcgccagaatcggtaatcgcttggcgttcaggttcaagccggcgtcgtccagttcgacggccaccagatcggccacgactgcggactcggcgtcacggttctcccgcggcttgccgggggtagtggccgtgccatcgtccttgaattcaaccatggtttcctccccacatagcgtcccctcaccctatcacccgattgcggttttgctgaacttgatgggcggtcggtacatgtctgtctacattgccgagcaccgagcctatccatcgcgttcaggaaacgtccaaaaaccatccagaaatcttgtcaataagttccagaacgcctttcgctctgcccagcgacacacgataagccgctgggcagcagcgttattccgccaaaaacatcatcaatcaccccattaatctccggcagccgtattacgctactacaaacgtagcgctacgattaacgtatcgctacggaaaacgtagcaaccaagcaacaccaagctccggaggtatcagtgggcaatatcttcaaggtcctcagacgcgacttcctgcgcctgttcaaggtgccggccgcatgggtgatcctgttcggcatggtgttcatcccgccactgtattcgtggtacaacatcgtcggcttctgggacccgtacggcaataccaaaggcatcaccgtcgccatcgccaacaatgacgacggcaccgacaacgcgctcatcggcaagcagaacctcggcgatcaaatcgtcaagcagatgagaagcaacgaccagctcggctggaccttcgtcaccgaagccgaggccatggaccaagtggaatccggcaaggcatacgcagccatcatcattcccaaagacttttccgacgatctcgccggcgtggtgaccggcggcaagagtcggcccactctggagtattacgtcaacgaaaaagccagcgccatcgcccccaaagtcaccgacgtcggcgcgtccactgtggaccgcacggtcaattccacattcgtctccaccgtatccgaagtacttaccgaagtcatcaatacggttgacggcaaagccatcagtaccgaagacaccaccaaagccaaggccctcacggcccttgccaaggcctccgacgatgtgcagcacacacgcagcaccatcgccaagctcaccaccaaactcaccgacaccccagagcagacacgcaccgcacgtcaggcgctggacgacgcgcgcacacttggcatcgacactgcagaaggtctggccggcgtctccaccctgatcggcactacccagaccagtctgaacggcttcgtcacctccacgtccgaagcgcttgaccaaggctcaagcctgctgagccaagccgcagcacaggccaaccaaagcgtgggcacggtaaccggaaccatcagcgccgccaatcagcaggtaggcggactgatcaatacggcggaagacatcaaccaagcgaacgccgacatcatcgaccaactcaaagggctgccgaacgccaatcgagaaccgctgcaatccgccattgccacactggaaagccgcaatagcgagcttgccggcgcactgggcaacctcgatagcctgaacaccactatcggcaatgcctccacagacaccgccggattggcgcagcatctcaataccgccacccaaaccacggtgcgcgaggccaataccgctcgcggcaccatcacctccggcgccattcctcagctcaacaccggtctcaacgccctcagctcgaccgccagcactctgtcgaccggcatcacgtcgcaaggctcactcatcgatcagtcgaagcataccctcgaccaactcgacaaagcagcctccaccacggtgaccgcgctgcgcgacaccgataaggcgctggccggcgtacaaaccaagctcgatacgctggtcaccgacatcaaagccctgagcatctccagttcactcagttccctgatcggcaccgacggcaaactggatgccgccacaatcgccgacttcatgctctcccccactgttatcagcgaacaggccgtctatccggtcgcctcctatggttccggcatggcaccgctgttcaccaccctgtctttgtgggtgggcgcgttcgtgctcgtggtcattcccaaactcgaaaccgatgatgagggcatcgacgatctcacaccaacccaaggctatctcggtcgcttcctgctactggccacgctggctgccgtccaaggcctggtcacggccatcggcgatcttgtcatcggcattcaatgcgcgagcgccccagtgtttctgctcacctgcgtcatcacctcactggtgtatatgtcggtgattttcgccctctccaccacgttcatgcacgtgggcaaaggcgtatgcgtggcgctggtcattctgcaggtgccgggcgcctccggcctgtacccgattgaaatgatgcccgcgttcttccgcgccatctacccgctgctgccgttcacctattcgattgacgcgatgcgtgaaaccatcggcggcttctacgacggcctctggttcgcctatatcggcaaattgctggttttcgtggttctggcctttgcgcttggcctcggcgcccggccgaaactggccaatctcaaccgcctgttcgcgcgggaaatcaaggaaagcgacatgattatcggcgagccggtgcatctgcccggcagcgaataccgtgtcactcaggccattgcagcactggccgaccacgacgaataccgtcatgccatcgaacgtcgggccgccaaattcgcctaccgttatccccggctgctgctgggtgcgcttattgccggattcgtggtgccggccgcgctcattatcgtgtttgcgctgaccaccagcgagaaaatcgtagtcatgggcacatggctggcatgggtgctcatcatcatgggcttcctgatggtcgtggaattcatgcgcgattccatccgccgccaaaccgagctcggcagcctctccgacgagtcgatccgcgccatgctgtacgggcataaggccaagcgtcgcgacacctccgccgaacgccacgaagaagcggacccgagcgccgctgttaccgcaatcatccccactattccgccgaccaaggaaggcaggcacgcacgatgaacaccatgtggaaactgtttaccggcgacatcaaacgcctgaccagcaacgtggtctccatcatcatcgtgatcggcttggtgatgattcccggcctgttcacctggttcaacgtggccgcatgctgggacccgttctcgaatatgaagaacctgaaattcgcggtggcgaatgtggatgaggggtatcgttccgacctgatcccggtgaaagtcacggtcggcgatcaggtggtgaacgcgctgcgcgccaacagtcagctcgattggacgatcacgtccaaagccgatgccgtcgagggcgcacgatccggcaaatactacgcggccatcgtaattccgaagtcgttcagcaaagacatgatgaccttcttctccgacgacgtgcagcatgccgaactgacctattaccgcaacgagaagaagaacgcgctggcaccgaatctgctcaacgagggcacggatgaggttgcggcggaaatcaacaccacgttcgctaagaccatcacttcggccgggctggaaatcgcgtcttcgctggccgatcagctgtccaagcccgaggccaaagagcaactgaataccttcaacgccaacatcgccaatttcgccacacagcttgacgatactgcggatctgcttggcacatacagcgcattgaccgatacggccggcgccttgctcgacacctcgaactcactaatcactcaggtttcctctgccgccaaacaaggcggcaaggatcttgccagcgccaaacaggaagtcaccgacgtggccggagccctgggcaccaccgctgacgcgatgagcagcgcactggacgcgagcgcctccagtttcggcgcggtgtccgattccatagacaagctgtattccgacgcgaatgatggtgccaccacggtcgccgacgaattggaccgtcaagccacggccattggcaagcagacggagaaatacactgaaattcgcaacacgttggccggcatactgggcaacgactcatccatcatcacggcgattgaccgttcaatcgcacgacaaaacaggctgcggcaagcgctgaatacggcggcgaccgatattcgccaaggcaatcaggacgcgcaggatcagcatgcgcaggtcaagaatctggctgatcaagcgcagaacagtattgccaatatcaagtcagatttctcggccacggtgaaaccgcaaatcgactccctgtcgtccaccgtcgctgacgcctccggcatactgagttccggcgccacccagttggactccacgctcggcgacctgaaagggacttccgacgacgccagcgatatgctcagcgacgctcgcactaccttggacaaggtgtccggcaaactgcgttccgccggcgccgaactggcttcgttcaacagcacactgagcgacgcactaaacagtggcgatatgggcatggtcaaagaggtgctgggcaatgatcccgaaacgctggccagtacgttggccgcaccggtgcagctcaggcgcaaggccgtattcccggtggcgaatttcggttcgtcgatggcaccgttctacacgctgctgccgctgtgggtgggcgcgctgctgatggtggtgacgctgaaaaccaccgtgtctcgccggacgcgcaaagcattgggcgatccgcggccgcatcggctcttccttgggcattacggggtgttcgcgctgattgcgctgctgcaatccacggtgtcgctcggtggcgatctgctgttcctgcgcgtgcaggccgtgcatccgctgctgtttatgttgtctggatggctggcctcgctggtgttctcgttcttcacctatacgatggtggtgagtttcggcaatgtgggtaaggcaatcggcgtgcttatgctcatcgtgcagatttcgggtgcgaacgctgcctacccggtgcagatgttgcccgacttcatcgccaaagtcagtccgctcttgccgctcacccatgcggtgacgatgatgcgtgcggccatcgccggcatctacgacatggattactggcgggccgccggaatgctgctggcattcgtgccgccgctactgttgcttgggctgttgctcaggaagccactggtgcggttcaaccagtggtatgtagcccaagtcgagagcactaaagtgctgagctagtaggtattatccgggagttgcctacaaacggcatggacttaccaccctcagtctggctttgccagccagctctcgccagcgggagcgtacgggagcatatttcgaagagaagagatgacggagatgacagacacgacggcgacaccgcgcggtgagcgcacgcgcgaggcgacggatcgcaagctcatgcgagccacgctgcagattgcggtggaccgcggcatcagcggcgtgaccatcgaggaggtggcccggcgctccggtgtggccaaaaccacgatttaccgccgatatcataatgccgacgagctgctgcacgagatcagcgcgatgtatctggccatcccggattccgacccagtgcccagccccacgcgtgagcatttcacgcaactattgcagcgattggtcgattgggtgcgcgacaacgacatcgacgtcaagcgcgtgggcattgtattgtccagcgaggccgagttcttccagcacatcgtcgaccaagtggtgaccccgtggctggagcgtgtgggggcgttcctcaagcagggagtcgcgcagggcgtgtttcgcgaggacgttgacgagaagttgctgttgtccacgattatcggatctttggtggcgtatgaggccatcgagggcaaagcaatggacgacgacaccgcctgggcctcgcgcatggccgatctgctgtggccagcattgctgaagtagcggtcttactcctgaatcgaagcctcctggcgggcgacttcgagggctttgttgaaggcgtcggaggtccagctggcgccggcgaccttgtccactttgagacccttcagaggtttgccgtccaccacgccgttaatggctttggcgaagtcgtcctgatggttcttggaaatcgtggtgaacgggtgcccaatgatattgacggtctcgacgttgccgtccttgatggtcagatggacgtcgatggaatcctcgcctaccgggccgtactggccgttgatcgagtagttgccgtccttgtagttgccggtgtccttcttgtcggacgtggtggtggacgggtcgttgtgcgacgagctggaatcggagccgtcggagctatcggagccgttcgactgggattgcgactgctcttcctgcgacttctcggtctcgcccgagttgccggcgtacgcatcgtccatcggcgcggccttggattcgccgcatccggccagcagcgcgccagccacgaccagtccggccgccgccaatgtcgcggatttcttcaacgtactcttttcggtcatattcacgctccttaagcccccctctgacgaggggggctgtcagcgaagctgactgggggagagaccatcagcttgccatgtattcctcacatagtgctcgatgcccctgacggccctactcctcgccgccggttttcgcggccttggtggggtcagtgaaaccaatggcggtctcgccgttctgcgcgccctcgacctgtgcacccgtggaggcgggcttgccgccggccgcctcgtaggccttgcgcgcatcctcgtcattccacttctcaccgacgagcacgccatggttgagcatgatctcgcgctgcgcgcagctggcgaccagcgcatcgtgggtgaccacgataatcgtggtgccctgctcgtgcagcttgcggaacaggtcgagcacgattttctcgttcttctcgtcgaggttgccggtgggctcatcggccagaatcagcttcgggtcgttgatcagcgcgcgggccacgcacacgcgctgctgctcgccgccggagagctggccgggcaggtggtgggcgcggtccttcaggccgaccttttccagcgcctccatggcctgcttctcatcgaccaccgaatggtagtactgggccaccatcacgttttccacggcggtcaggtgcggcaccagatagaacttctggaacaccagtccgatgaggttcttgcgcacgtcggccagctgcgtggcgttcaggtcctccagcttgcggccttccagcttcacggagcccttggagggcgtgtccatgcagccaatcatgttcatcagcgtggtcttgcctgagccggaggagccgacgatggcgagccattcgccttccggcacggtcagattgaggtcgtccacggcacgcaggtcgccgtagatcttcgagatgtggtcgagttcaagtagcatgacgtttctctttctttattcttcgcgaagcacgacggcggggtcgatgcgggtggcgcggtggacgggcgggatggaggcgacgatggcgaccagcgcgctgaacagcacggaaatcagggccagccaccagttgaatacgatggagcgttcgaacaccgccacgcacagccaactggcgagtccgtagccgattgcggtgccgataaggccgccaatcaggccgtagagcgacgattcgatgtagaactcggtgccgatggcacgcgagctagcaccgagggccttgcgcaggccaatctcgttgcgtcgctgcgagacgatcgagctgattgtggtgccgacgccgacgagcgtcagcaccagcaccaccagcgagacgatccagaacagcgtctgcagcatggtgatgatgcgggtgtcggaggcggtgatcttggtgacctgctgtgccttgacgtgcatggaggtcatgtcgttgatgctggacaccaggcctgcgaggtcgctggcgccggccgaatactcgatgacgtccacgccgcgcgtgatgccggtgagcttgttgacgtcggcgttggtggcgtagatgatcgagtcttcgctgccgccggtgtccacgatgccggccacgcggaattcggtaccggaggtgtccatgatgtcactggagacacggccgtctttggtttgctggtcgatcgaggagttcgacgaagtgccgttggtgctggcgttatcggatgcacggtagccgatggtgatggcggagccgattctcaggccgatggcgtcggcgatgtcgcgtccgaccagcaccttgccgtcggtcggccacgagccgtcgaccacccagtgatggttgaggttcttgacctgcgccgcattcacgccggccatcacgtacggcgaggcgttgacgcgcacgttctcgtagcggtaggtggcgtatttcgcggaacccttggccttgaccatttcagtggtgtgctgcaccatcgccttgtcgatgccggccttgccgtcagcattggtcgattcggtgggcgtgacaatcaggttcgcgccgtacgcacgcatctcctcgttcatctgctgcggcacagcgaggcagatcatcgccagacagaacagtgtggctgcgccgaccagcgacgccaccacagccatcaccgcgcgcgaacgccgacggaacacggcgctgaacagcattctgaagaacataccggtgttggtcatcggttccctccttccacacctacgtagataaactcagcgaccatggagcacctccgcgggcttgagattcagaatcgaacgaatcgatgaggcggacgccagcagcacggtgacagccagcagcacgaacaccagcacgaacaccatcggccgcatcgtaatgccggaaccgaacaccacccggcctatcagctgggccacgccggaaccgagcagcgcgcccacaatcgcgcccagcagcgagattgccgccgtttcggccagcatcaggcgggataccgcggcatcggtggcaccgagcgccttgagcaacgccagctcgcccgaccgttcgccgatcgaggcgaccatcaggttggccacggccacggctgcggcgatcaggctcagcacggtcatcagaatcatcacggcctgcgtcttttgcagcacattgccctgcaacgcggccacctgacgcacctgcttggccaccgcgcccggaatcacctcttcgatctgataggcgatcgagctcgggtaggcggtgcagtaccaggtctcccattcctcctggctcagcgcggccgggttcgcggcggccttacgggccaggtcgttctccggcgtggtcagggccttgacctcgattttgtcgaccgaatcgggcaggtcggcgagtacctgggccgtggaggaggcgatgtagagcgagccgttgtcctcgtcgccggaatcgtagacaccggtgagcttgattttctgctcgttcttcttgcctgaggcggtggttttgttgagggtgatggtgtcgccggtggtcacgccgagttcggaggccagcgtcttgccgatcacgccctggtcggaatcgtctttgggccacttgccgtccagctgccaccacgagcgcatgccttccacgcccacgacggtagtctcgccggtggagatcttgaggttcttgttgaaccacgtgccgacgaccggcacgttggtaccgttcaccgtggcgtggatgttgagctgcggcgcgaagctggtgatgttgaacgaccagaagatcgtcttgatcttggccgcgtccgactccttcagaaaagcggtcgggtcgctggtggacgtcgcgccgcccgactcggtgttgtacaggtcggaaacgaccgcatccgccttgggctgcacggtgatgttcgaaccgtaggtggacagctcggcgttgagcttgtcgcccacgtcgaacacgacgcccagcatcgatacggacacggtcgccgacaggcatacggtcagcgcgataagcaggcgccggcgcagctgtcgggtgaacgagcgagtaatcatgcgcagaaagaacatgattcttgtctcctgcctgactcaccggaagtgggcgctcagcgcgtccagatccgtagtttgaatggtgatcttgccgtggccggtcttgtacgggaatggtatcgggttgcagccacccttgaagccgatggtcgccaggttgatggccacctcgcacttcttgcagatgatcttgccgtccttctcgtagtagccagcgtcgccgcagttctcgcaggcgtccaggccgatgccgtacgcgccaccgttctttcggatgatgatgaagcgcatgacggtgccgtccttggccttgtattcgaagcggtgcaggtggccgtcctcgacctggctgaaggggatggtggccacgccgtccttgagcgagtaggcttccggcggcgaaagggtgatggtctgatgggtcgcggcaacgcccacggtcagggttgcggtgacgccgatggctgcgataaggctccacacggcagcggcgatggcgtggcggcggaataccttatgccggcgcaacgtggcctcgttggctcccggcacatcatgggttttcatacggaaaccggccacgatggaggccacggcgggaatcaggaacaccagcgcctgcgccataatcatcgtggagttctggttgatggaccaagccagcgccacgaacatcgtatggttcatcgggaagcctcgcgcctgcagaatctgggcaagaccagtgaagtgttgaatcagcagaatcaccatcatggccgcgacggccacggtgaacgcccagcgcacggcagtggtgcgcatcgtgcggaagatggcgaccacaataatggacatggccacgccaagcaggaaaccaagagcgcgcagcagcatggccgaagtgaatgcggtctcccctggttccacccagatggtgagctgcagaatcacgtccggcagcgcgtagaacagggtgagtgcgatgtcgatggcggccacggcgttagcgatgtgcatgaacaccttgtgctgctgccaattggtggtgatgcggcgtgcgaacaccaccacgacgatggtcaggatgtcggcaatgatcgcgcaccacaacaccgggtagttgacgaacgtgcgctgattgatcacggccgaggcgcgcaggccggcgaatacgatggcggcgatcagaccgacgatcaggccgatgagacgccaatgcgagcttatcggcttatctcgcccctcgccgaccgtgagcatcacgctcaggctcatcaccagcaatgcgggggccaaagtgcccggcatcactgccacgaattgttcaagcattcgcgtcctttctctgttcaccttaggctcccctctctgaggggagctgtccgcgaagcggactgaggggagttttagaccgtcctaagaattatctccctaaagcggcgtaaagccccctctgacgagggggctttctgcttagtcaatcaccactggcgaggagtgtaatcccagttgtcgaaggtgacctcgatcggctcggtccagaagtggcccttgacgccggtctccgggtcaacgtgcagcatccaacccttggaggccggggattcgatggagagcttcagctggtaggtgccagccttgtcgagcttgacgttggcgccgtagtgcgggccatcggaagcgttcatctgcatgaaggtaccggaggtggcggtgccgccctcgacttccttgccggtggacttatcgatgatggtgtagttcacggtcagatccggcacgaagtcgcccttgccgtagccgagctcggtgcccttctggttggcatggatgtcggcctcgaggtggaaggaagcgtcagcagccttcaggcccatggaagacggctccatatcgatcggctggaagtacacagcgcccacggtcagcgggccggcgtcctgatcctgctcttcagcagtaccggacgggccaaccggaacctcttcgaaaccggcgccggaatcggaggaagaatcggaggaagaggagtcggaagactgggaggaggagtcagccttagtgtcggatgcggagttggtggaaccgcaggcagccatggacacggtcatggaaccggcgagcagcaggccgagcagagcggccagtttcttgttcttcatcattgttattccttttctctatctctggtgaattaggattcacgcttagataattgcaattattcagttatgagataagtgcggcgtgggctggaggaattggcatcgatccgaggccgtgccgcaagtctgtcagttgtctgcagttatgggaggaaacggacgagctagacgggctacgccttcacggccgggacctcgacagtagcctgcgccttcagcttgcgctgcttgatgaagccgaccacgaacagcgcgataaccgcaacggctgcgatggcctgcgccactaggcattcgacgtacgggtagaggccaagccaatcgttcgtcggcacaccgttcaggtagaaggcgggcagcaagtcgccctcgatcagcgagtggacgccgccgccggcgaacaccaccaccagcacagacatcagaatcgaagtgaccaggaagaacggaccaatcggaatcttcacggaggtgaagcggaagagcaggaagatgccgacaagcaccaccgcggcggtcagaccaccgatccacataccgcgagtatcgcggctcatcgtgtagatggactcgtagaagatcacggtttcagcgccttcacggaacacggcgaggaagctcagcatagccagcgagaccacggttttcaacgtcacgttgtcggcacttgcggcggcttcggcatcagccacagcagcctcggtcttcttgcgaatgtaacggttccacgcttccacgctggacttgttcagcatccagttactcgtccacagcagcatgcccatggcgatcagtgcgcaggtgccttccatgatctcctgaatcgggccggagccgccgaaggcgaacacgaagatcacagccaccaagccggcgccgagcagaccgacgagcacacccaagtaaatccacttgacgaagcgcttgttatcggacttgaccaagtaggcgacgatggctgcaaccaccagcagagcttcaagaccctcacggataagcacgaggaacgcctggccggaggagctggtgaccagcttggtgaaaccgtcttccttatcggcggcaccaccgtcaagaatgccggcgtccttgatcagcatggccttgaggtcgtcgatcagcttcttggtgtctttcagggatgcgccggcgttcatggacttgcggcacatcttgaactggtattccacctgcgagacgcggttgccgctgatggcgttcatcacgttcttttcgaagccgagcttctcgtaatactggtagtacgcgttgttcacgagcgtggcgcccttggcaccatcacccttttcgtaagctttgtatgcattgtcgagaatcggggtcatttcgttggccacgtcggtccatgaacgattgcccttgcctgggttcttctttttcttggcgtcgagctccttgcgctctttggccagctgcgcctgcagcgcttcggcgtacgccttcggcttggcgagatcggcgttggtgtcgagctgctgggccgtggcgtcaagatcggcggtcaacgcatcaatctgctgagtcagttgatcgtcgttgccaggcgtgtaggaaagattctgaacgctttggaatgcctgctgttgggcgagctgcttgtccgcgccaatggtgtcgtgcacgaccgcggtgaagttggaggccacgtaaatcttgttgtacgcgcccatgaaatcggaggtggcgccagcggtgttgccatccttgtacgtctcaagaccgctgttcagctgcttgtccatcgccttggagacttcggcccaggtggcgtagtcaacgctggacgagctggtgctgctgtcggcgaaggccatcggagccgtgactgcaggagccacagtggcgatgaccatggcgaacagaaatacaatcgcagccaggactcgcagctgcctcacgctggtgtgttcaacggaccgaagagcagcctgggcgcgacgaaccatgcctatccctctctctctgcgcggctaagtaatcaaaaaccaactactcaatataaagaaaaacttttttgaggaacagtcttgattttttaggatttaagaggtattaggcactgtttttcgatcaattattaccgcagattgtctcaatattcgatattgtcccgctcacagatgggagacttcccgaattatgaactccccgcgactggccactccccatccctcatattgcatgaccaactgtttcaccaaggttcatagcctaaaatcactatgttgcatcacggcaagaggctggcaataattcacgcgatggcatgcgcaggtt

SEQ ID NO: 900 - DNA, 1074 bp, Unknown
  gut microbiota DNA sequence
cgtgcaggtcggaacttacccgacaaggaatttcgctaccttaggatggttatagttaccaccgccgtttaccggggcttgaattcaccgcttcacccgaaggctgacggatcctcttaaccttccggcaccgggcaggcgtcagtgcatatacagcggcttgcgccttcgcatgcacctgtgtttttggtaaacagtcgctaccccctggtctgtgccacccccaaaagctcccacagcaagtgtgttcaccatcgggggtctcccttaaaccgaaggaacgggagtgatttgccgagttccttgaccaggattcgctcgatcgctttggtattctctacctgaccaccagtgtcggtttggggtacgggcggctttgagcctgacgccgaagcttttctcggcagccgggatcaccggatatcgggccataaggcccccatcatcgcacctcggacccatgcgggacggatttgcctgtcccacgccctgcgtgcttgaccacggaagaccacctccgcggccggctacccttctgcgtcactcctgcgctgacctactacaaggatcggtcccaacaggccagggcatcccgcccccgaaggagcagtaagcccggacccggaggttagtactccaagcctcggttttggcggctgaaagccggtacgggaatatcgacccgttcatccattcgactacgcctgtcggcctcgccttaggacccgactcacccagggacgatgaacgtggccctggaacccttggtcatccagcggacgggatcttcacccgtctctcgctactcatgtctgcattctcactcccatgaagtccacggcgcgttcacacggccgcttcgcccctcatgggacgctctcctacccagtacaaaatactgccgcgtcttcggtggtgtgcttgagccccgctacattgtcggcgcggaaccactagaccagtgagctgttacgcactctttcaagggtggctgcttctgagccaacctcctggctgtctatgcgactccacatcctttcccacttagcacacgcttcgggaccttagacgacg

SEQ ID NO: 901 - DNA, 233686 bp, Unknown
  gut microbiota DNA sequence
acagaaaacgggaagaaacccgatttcctgttcccctcgcaagccgcctacgaggatccgacattccccgagacgcagctgcggatgctcgcctcgaagacctcgatcaaggaccgtttccgtcaggtcgccgacgaggccaacaggatcagggacaagcacctattcaccctgacccccggcgacgtgacccatcccaagctcgcccaactcgatgaactgcacatccacctggtcatgcccaaggtggtcaaggaatcatacgacgaccttatccagggggagaccatgacgttctcccggttcatcgaggaggtccagggacttcaggcgggccgtcctcaaagcctgacccttctctgacggcccgacgggagtcctccctgatttcgccgacggttcggcgacggcggcgacgctgttcctgaagtagaattgacggaaaagcaaggagccacgatggatgtttcgatgatcagacggccacaggactggcctttccccatcccgcagatcacggcggagagcatagacgagctgatcgacgcgctgcaccgggacgtgtcggactcgactctgagcatctactacgacgccgtggacggatgcagccgcgagatggagaacgaggatcaggagatgatggtacgcgagtactacctgcatgacggatgggcggcgaagcatggaacgggtgcgtgatttctcgccgtatgagttgaaggtcagcgtgtatgacggggccgccgaaaagcgaaccatgctgatggacggccacctctacatggtcaagttcgggtatgacgccgccccgcaggaggagcatcccagtcgtaccagctacgtcaacctgcccgtcaacgagtatatcggctccaaggtgttcgccgcttcgggcatccccacgcaggatgtcattctcggtgattacaagggccgttccgtggtggcgtgccgtgatttcatgtacgagatggatccgaacctcatgctgcttcatttcaagcagctggaaatcagcatgcccggtggaagcagccgatcgaaggccaggcccgattgggagttcgtcagccaggtccttgacgaacatgacgcgctcgaaggcatccgcgcgcgggcgcggcaccgcttccttcagatgacatgcgtcgatgcgctgatagggaacttcgaccgccacgcgaacaactgggggttcatagcggacagaaggaccgcggatattcttgatctcgcccccgtatacgactgcggttcgtcactgtccccgagcctgtcccgtgaaggcatgagggaacgggtcgaggatcctcagcaaatgcgtgaggcgaacatggccgcaccctacatggcgatgaacgtcggcggcaagcgacgcaagttcgccttcttcctgacctcggagaccgcacgccccttcagggcggagctgccggaactctggccgcgcctgtccgaggaggtcacggaccgcatcgtggagcagacccccggactcgatgaccttcaacgtgatttctataaggccacgctggacgcccgccgcaagtacgtgctcggacccgcataccggatggcactcaaagaagcggaaacctccaccgccaccgtcgggaacgacacccttgcgaccgacatcgttccggggatcccgttccctggccttgggggaaaccccggtctcctgcactgaggactccacgcggctcacagtccgggaaggtcctcgttctcgccgtcaatcgttcccggatcgttcgatgacggtatcaagatggtcgattagttcccggcattgccggacggcgtaggacgccgatgcctcgtcctcgatggtcgcgttcatctccctgttcgcgttgtgcgcgatctggttgacgttgcggccgatgcggcgcagctggtattcgatctccttgagcgcctggacggtgggcgaatcgcgttcctcctccttgacttgcagtctcccctccaacagtttcacagcctcgatgatggtgagggagaccgtctggttccttttcttggcggcggtgcggatcatcccggcttcctcctcgttcaccatgagatgcacctggatggagcgctgctcgccccctcctttgctgctcctctttcgcattattccgattccttcctcattggccttcggcactcgggttgttgcttcagcgccgtagggcgcgggaggctgcgggctcggttcatgtacatgaaccgtctagcttgcttaccttcgatttgatgggcatctccatgtggatgtccatggacatatccatgtggatgtctatggacgtgtccatgtgggtgtccatggacatatccatatgagcgcataggaaaacgcatgagggtggatgatcgttcggggtgatgccttcttccacgaatgggaaggggctcttcctttttttggaatgtcatcttcccgcatccttcgtcttgagctccttgagcagcatcgtcgcgttgtcgcggatgctcgcgtccgtgagcggggagagctcgtccgcataggagcggcagaggagcgcgtacacccgttcccgcacccaggcgctgcgcgcgatgcccagcttgaatgcggcccggcacagcatctcgtattcgtcgccggtgagcatgacattgagctggcgtccccgcttcagcggatgttcggggtcggggtcggtgcggtacacgtcgttccaatcggtggtgccgggggcgagttccgtgtagctgaacggctggatggcgtatctcacgaaacgggatttgggtatgcccgtcttggcggaggcctcggcaagcagattgaacagctcctggtccatgaggacccggaaggcgtggctgtatcgtcgcatggtttcatcgtctccttggtcgttgccgtgcccggcgcggcatggtgcgtcgggcacggatggttggcgtttggtcagcggtcgaaatcgaacgccgtgccgcgttccttgtcgatgcggatggccgcgtcgaacttcttcccggatttggatgtgaagcccttcagggtgacggattgtcccgcgaggagcctgcgcgcggtctggtcggtgatggtcttgcccgcgatgcgcgcgaacatcttccatccgcagcctgcggtcgtggcccacttgccgtccttggtcttctcggtcttgttcgtggaacactgccacatccggccggttttcctcaccggctggccgcagcgcgggcagtcgccccattcctgcgcgtcggtgttcgcggttcgtgtgacggcatcggccttgaggttcgcggtcgcgtcggcggggattcgcaatgcctcccggtggaacatgtccatcacctcagacgggcctcgtttgccgtgttccacgtcggagagcgcctgttccatccgtgcggtgagcagcacgtccttcagtcgtggctccaccacgtcggtgaggcgttcgccttccgtggtggcgtgcaattgccggcccttgcgttccacgagtttggagcgcacgagcttttcgatggtgtccgcgcgggtggcgggtgtgccgatgccgccggaatgtgattcgtcgtcatcgagtgccgccttgaggtttttgtcctccacgcaccggctcgcgtgctccatcgcggccagcagcgtggcctcggtgaacggtttgggcgggcgggtctcgccttcctcgaccgtgaccttcccgaccgggcgaatgacgccgccttccatgaggttcgacgggatcacgttccttcctcccgccgggttcgcggtttcctcgtcttccggttcgggcccgtggccggtttcgacggccttccatcctgcggatacggtctcgtcggaacgactggagaactccctgtcggtgtcgtcggaaagccgggccttcacctcggtgacgatgtgcacatggtcgtcgcccacggcctcccacatgcggcgcacgatgcgtgtcatcaccttgcgctcgtcatcgtccaggccttccagcttcccggcgtccaattgcatggtcggcagtatcgcggtgtggccggccaccttcgcgtcattgacggccagctccgggcgcgggtgtccgggtatgccctcgcgggtgacgaacccttgggcgagacggccggattcgaggagcgccgtgagcgtttcgaggtcgtcatgcgtgatgtaccggctgtcggtgcgcggataggtggcgagtttgagttcgtagaggtgctgcaacgccgcgagcgtgcgcgcggcggtcatgccgtacatgcggctcatgtccttctgcaatccggtcaggtcatacaggcggggcggccggtcgttcacccgcctccggttcacggacatgatgcggaagcggccgtgttcggcctggccgcacagcagcatcgccgcatccttgctgtcgatccgttcgctggagagccgccatccgcccatgtccgcgatcacggtccagaacggcaccggtttgtggttcctgatctgccggtcgcgttccgcgatcatggcgagcgtcggcgtctgcacgcggcccacgctgaaccgtgcgttgtagagcagcgagtacgcgcggctcgcgttcatgccgatcagccagtccgccttcgacctgatctccgccgaccatgcgagcccttggtattcggattcgggtttcatcgcccgccacgcggcctggatggcctccgcctccaggctcgccacccacaggcgcagttccggcttgtgagagccttccatgtccgcgatgcggcggaagatggcctcgccctcgcggtcggggtcgcaggcgttgacgaggcaatccacatccgcgcgccggatcaattgcacgatctgccggtagcgggagccggcaccgcgttcggcgctgatcttccaccgccaatggccggacgggtccacaggcagcgtgtccagactccatttcctccaatccctgtccttgtagtcctcgggcatggcaaggtcgatcaggtggccctgcgcccatgtcacgaacagctggccgcactcatagcatccgtccctttggacgggcgcggcgcacaacgcctgcgcgatggccgtggcgaccgatttcttttccgcgatgacgagcttcattcttcgttcgcgttccttccgttttttgggattccttgattcttgtccgacatgcgagggccggcgcgggaatcccttcccggccggccctggatggagaggcgtcgccaaggtcaggcggcgaagccgagcagcggcgcgaacacggcggcgatggccagcaccgcgatcagcatgaggatgacgccggcgatccacgcgatggccgtcaccagcgtgcggctccaggtctgtccgccggattccacgatcatcgggctgcccatgcgtttgccgatgatcgcgcacacgcccgaggcgaccacgcacagcagcacgagcaccacctggagcatcccgttgagctcgaccagccacgtccacaggcccatgaaccagccggcgagcatagagagaaacgattccattgattttcctttcacctgattggaacgacgcttccgattctcggccgcaaaacggccggccacggggcatggcgtctacacgccccgccttccgccatggggaatgtagacgccatgccccgtggaacgcgcgacgggaaggcagactcgccttgacggaaaaacgagcgaaaggaagatcgtcgtggcgaacaaccagaacaccatgcgcgacatgaaacgcagcatcctcaaggcggtgcgcgacagccagaggacgaaacaggatgcgatggacgagtacgtggcggcgcgcgtcaacatcaaatcattggaggaacgtctggaagaggcccgcgagaaggccaccctgctgcgcaggaaggcgaaggacgcgggaaacaccagcgccgaactgaaaacggcggacgacctcatagacgcgcggtggacgggggcggaagacgggtcggcggaagacgggtcgcccgaaaacgcggatccgggaaccgtgaaccccgagcgggagcatccggccatggaagaaaacacgcaaggcggcatgccgggtgagccgaaccgttgggaaggcggtgaatcgtgaaccggccggaaccgcgtccgctgccgaaaccgctgcgcgtcctgtgcctgttcgtcgccgcgctcctcgtgtgctcgctgggcgtcatcgtcgccaaccaccagccgtcaacggccggcgacgaccacggttccgcgacggacgcgaaacaggagtccacgggcaaaaggaaaacggattcgggcccgcgacggtacgccggcctggaggcggcgggaatcccggttcccggcgactggtctcagcgcaccaccgcgttccccgttgacacccacaaggacggcacccgcacgctctccgaaaacgcggacggcatcacgctgcacaatggttccggcccgatcgacaccgcattggaaacggtggacgcgctgctcgatccaaacggcagcgacgacgaatggcgcaagaacgtgttcgcgctgctcggcgacgacggtgccggggagagccatccggtctccgacgcgccgcgctggtggtggacccagcgccgcttccacgccggatccgtatgctcgggccaatacgatgacaagtacgtcaactacgcctacacctgcacctccgacggcaaatgggagggctcggatacggatgccatccagtcccagccgttctggacgacgaaggaaaccagcttcccgatcccggaaggcggcggaccgtcatccacgacggatccgcagcagaccgtcagccaggcgtacaacaccgtgctcttgccgatggacgacggcaactggcacgtcaccgtctactgcccggccgcgctcgacgcgtcattgctggacaaggatgccaacgagctcgaccccgatcaggtgaaggccggcgacgaggcgtacacggtgatctccgccaccggatacggcacggtccagcatccctgccggaccgtggaggtcgtggtcggcgggcagaagcccttctggtcgctgaggaacacgcaatgagccgggccagccgccatcggatcctcgcggccatgctctcggcgtgcctgctgtccctgctcggcggatgcacgccgttgaccgtgctcgcggtcctcggcggctgcaaggacggcggctccaacggatcgtcgggaggcgtcacgggaagcgtcacgaccggcgaggtgcgtgacggcatgaccatcgcgcagaccaaggcgtggttcaacggatccgacgggcccgacaacgtgtgccaggcctatccggacgggcaatgcacatggtgggcgtgcatgagaggccataaaatcggattggacgtgggctcctactggggcaacggcggcgactgggccgccagcgccaccgccgccggatggaagaccacccgcaccgatcccgtggccggcagcatcgtcagctacccgcccggcgtggccgacgcggacaccctgtacggccacgtcgccgtcgtcgaggcggtcgaccggacggccggcaccgtgaccatcagcgagatgaacgggcgcggcggcctgggcatcgtcaaccaccgcacgcacaggatcaacgtcggcgcggtctacatcctgcccaacggcagtgtgtccaccaatggttccgccggcacggattccacgtcatccggttccgaatcgtccgattcgtcgtcatcgtccgactcgtcgtcctcctcttcggatccggtggaggcggcatggacgtgctccagttccgactcgggctccacggacgtgatggtggactacgacggcgacggcacccacgccacgccggaacaggcccgggccatcgcccggaagatgatcgcctcgtacaaggactggggcgacggcgactatgacgcgctcgtatggctgtggaacaaggaatcgggatggcagtggaatgccaccaacccgagcagcggcgcgtacggcataccccaggcgttgcccgcgtcgaaactcgcctccgcaggagacgactggaaggacaacgccgccacccagatcaaatggggattgaactacatcgccggacggtacggcagccccagcgccgccaagacgttctggctcgcccacaactggtactaaggagcgggacacgtaaagggaccgagcatcagatctcggcggaatcatctgacccgtagacgccatgccccgcgcgaccgcccgtatgggctgatgatcggagccatgcccgccggacggcgcggcaccgatcatccaagggaaggaaggacgcatcatgctgatggaacccgacgaatacacgccccaggaacgggccctgaccgacaaggcgaaggagctgatcgagcagcacgagctcgactggggcaacggggaatgcttcatccaacgcgacgccggccgcagcgaacgcagcgaactgtacatgacgctggaggcacccaaccacgccacggtctcggtcacggtgccggccgaggcggacgagaaggggctgaggcgcgccatggcggacgggctcctcgacttcgaccccgacgagaagttcgacgaatgctggtcccgcgagttcgcggcacgcaacgggttcacgccctccggcttcctgtccggcctccaggaagacaaagcgtatttcggtctccgatctgaggcgttgcttcatcccggtcaaagcaacgccgggcaaggcaacgaaacgattgcggagatccgctggacggaggaggaccttcggcactggctgaaagaccatgactggcccgacaacaacgagaacatggacgcgatgcgcgacatgatctcggccggggaattgcgggaccgcagcatcgaggagggatgggagatcatcgacgcgatggtggacgacggccggctcgcccgcaaagacgaaggcgagaaggccgaaacgtccgaaacctacgatcccgcgaacccggccgacccgttgagcattgccgatacgtctgcctcggccgcagccacacgataaaagacccgagcgaaggagcatcatcatggccggattgaaggactaccagatcagcgtgtacgtcgccaacctgggcaaatacgtggagggcgtgttgcagggcgcgtggatcacgctgcccatgcccgccgaacgcttgcaggacaccctgaagaccgaggtgggattgggcggccggtacgaggagtacgcgatccacgactacgagggcggggaaggactgctcgccaccgtggcgaatcccggcgaatacgagtcgctgacggacctgaacctcatgtgccgcgcgttcgaggcgcgcgaggacgacgacccggacgtgtacgagaaggtgcagacggtccgcgacgatcttgacgcggccccgcgcaccccgttgcagtacgcgaacctcgcgttgaactcggacgagatcccctatcactcttatgatgcgccgtcctcggccgaatcgaaggaggcgaagtatgcctggaccgccgtgaaccatgggtgggcatcggatgccgtgtggtccatgttcgatacggggctcggctatctgatcgatatggagatgtacggccgggacctcaagctcgacggcgatgtgtcgcttggcgacaacggctatctggaggacgcggactggccgagcgatatcgacggccggtactcgcgcgaggagatcgccgaggaggtcgaatggctggatgatttcgacgcgaagaccggttcgccggccgcgttcgacctcgcctcgctcgtccagccgggcgaacgcatcgcggactacacgatttccggcaccggcacgaactggggagccccctcataccagtgcatcgtggaggagggttccaccgatatccatgccgcgcttgaggacacgatgcaccggatcatcgacgcgcgcgccgctactggcgacgccgtggacgtgctgcgcgagaccatgggcgcaatgcccgcagcgtccgtcggcgaagacgacggcgtgagcccgatcgaccttgatctgggatatgtgctgcccggtgccgtcacctcgttcgcggaacgcgcgcaggcgtgcgacccctcggacccgctgaatatgaccgatacggccggttccggcctttccaagtgagaaagggcgagcgagatggccttgacgccttttgacatggagggtgtgaaccgcgacctgctcgcggccgggaatcccgccaagcccgacatgcaatccatcctgcgcaggaacgcgcgcgatctcgtgctggggaacgcgattctggtctcttccgccgatgccaaggaattggagttcggcgtccacatggcgtattccgacgcggacggcggcttcgacaccgatccgagcgaggacgtgtggttcgaggcgtcctcgctcccgattcccaatgaacgccctgatctgcctcccgacaacgcgctcaggatcagggtcacggacgtgctgaccgaatacgggttcacggacattgacgtgaaagccccggacaggacgccggaaggcatctggatcggtttcgaggccatgcagccagtcaggctcgacgtgacctcggcccaggaagggcgttccgtttccttcaccctgacagcagccgaggccaacgattggcgttccggccgtctcgacgcgcacggcctctcacgcatggccgtcgaacgggttctcgccaggccgggcgacacggtgacgctcgcctacggggattcgctgttccggccggcggtgatgtgcgacggttcgggaaggcttcccgagcatcgcgtcaaggccggtatcggcacgttcgtcatcggccgtgaaagcgaggcggtcatgcccgagatactgcggatcgaccgcactgttgacccacgagacccgctcgtgatcgaaaaggcgttcggaaaggagaacgacatggagaacgggaatgtccccgaatactggaaaggcctgatggacgaggccgatctgccgttggcgggcatcgtgcgcgagcacggcggcgggttgatggacttccaccgcatgaagggcatcgaacgcctgaccggttcgagtgactgggatttctactcctggacggtggaaaattacgacgatgacctgctcgacgtgtgcgaacgggagaacgccgccgacgtgctcgccgacttgcaggcatggtggaaaacgagccagcccgacatgcggcaacacgtggacgagatgatggcgggcatcgacgcggccatggaaccgctcgacaagcgcctgtacgccgccgccgaaaaggagttcaaggagcgcgcgttggacccggacggggaatgctaccaattggacggcggcacgttcatctcccaggaatcattcgacggcatctgcggcgaccaacgcgaccgctacatggcatggaagaaccaggccgaacccgccagactcgtgagcgcatgggacgaccccgcacgcctggaccggctcgtgggcgacctgatcgacgcggacgatggcggcggatgcttctacaccgacgcgcagcccatcgactacacgcagggcatggattacagcccacagcagctggccgcagacagcgggctgggagatacggtcccgctggcgtgtgagtccaacgcttcctacagcctcgcgcaccaccccgatatcaaattcaccgccaccgggtctcccgacggcagaaaggcgctggaggtctcggctcccggttccgcccgtcatgcgctaatcacggccaaacccggaacgttcgacgtgagcctgcatgacgagcgcggcatcgtgtccggcgaatccttcccttacgaggcaaacgattcctggacgtaccggctttccggccaggcgttgcgcggcgcgctggacctcgccgtcggctgggccgacccacaggaaacgtctcttgagaccgcagggctcggcctcgcgttggatgacggcatggaaacgacacacggccgctgacgccgtacggcaacgacgaacagaaccaaggagcacacgatggacatgaattggatcgacgagattcgggatcccgaaccccgcaaacggtacatctacaacgctgacgactacgacccgcaatacggggacccgtattaccgtgaacacagcacccgcgccgacagcctgtggcggctgtacgaggagagcggcacgtcgatcacgttcgatgccttcgcggacgaatcccgtcaaaccgattacaggatggagaccggcgctctgcgtgatttcttcaatggatcccagtcggcgctctcctcgtacaggaacccgatgggaggcaacccgctgatcgcgttcggaagcataggccgatgggacggcgaacgcacgggcatatcctcgttcgagaccttcgatgatctgatgaacggcgatgattccccgttcaaggactgcgagatcgaccacatctgggacgagaacggaatcctgaagatgcgcggccaccaccacgacggcagtgtggaggtggagatacgccagctcaccgaccagggatgcgaggcattggaatcctacgagcagtcatgggctggcgaaccgttcgacgccgcaggccgccactacgacggcggcaaggaatccgtggaccgcttctggaacgacctgaaaaccgatcggggcctggccgtggagccccggtacgtggaactcgcgttcggatgcccgcccatcgaatgggacatcgatgccagggtgagggacttcgccgaacgcatgggcgacgaatatacgagcctgtacgagcaggacacgaccggcatcaagggcggtgatttcgaacgtttcggcgcgttcgcggacaatcacctcgacttcatacgcgccctgacgaaggccaggggcatggatcccatcagcagcgaccgggagatagccgcattcctcaacacattcgacaagctcgccgcgatgcccgaaccatcaccggcatcacaggaaaaggacgaactgtccgccggagtatgcgatccgaccgacccgacgatgggctgcctgcaaccggattcgccggcagccatccgatagacgcgaaaggagtccatgatgattttgacgcaatccgacctcgaatcggattccacgcgatgttcgagaacatccatccattcacggacggcaacgggcgaaccgggcgacagattctgaatctcatgctcatggctgccggctaccggcccgtagcaatcaaacatgatgccggccgcagctatgggaaaagtctggaagcatggcaggttgacggcgatcccaagccgttcatttcccagcttgtccaatgcgttgatcaggaagagcgcgccgtagcggaaatcgtcggcagattaagagagaaccctttctcggaaaacgccatcgacgggattggtctcgaagacggtccggcacgagggcgttccctctgattggaacgcttcaggattgtgataggtgtacatgaatatgcgtttttacatatattcatgtacacttatatgcatgaagaggagcgaggcgattgatcagctgcgcgagatggatgccaagtactcgtgctacgtgtattgcaagaacgaactggccgtcgtgctgggtgagcaggggcagaaactgaaccgaaccctgtccagcctggtatcggcgaaggcgttggtccgtgccgcccgtggcgtctacgtgttcgcgtattcctcccatctcggcgaggggacacttcatcaggtcgcaaagcggttgcgttccggcgagctggtgtgggaaagcctcgaaagcgctctgtcgcgctggaacgtgatcagccagattccggtggatagggtcacgttcatgaccacgggccgtgagggcgagttccgcaccgcgtacggggtgatcgagttcacgcactgcaagctcagctggagtcgcatcctgccgaacctgatcgcccgcgatgacggactgacgccgctcgcgtcgaaacagtgggcgtatcgtgacctgaaggccgtcggacgcaacctcgatctggtggacatggacgaattggaggacgatgatgactggagctgacggcacctatgactacaaggctatggcggccgggatcgtctcggccgggggcgagggcatgggcaatctgcttcccgtggtcgagaaggaacttctgcattatcgaatcctggatgccatgatgcgcgagggtttcttctcctcgctggtgttccagggcggcacgagtctgcgcctgtgccacgggtccccaaggtacagcgaggaccttgattttgccggcggcacctcgttcgacatggacacccttaaagggcttggctcctgcatctccgattcgctctcggggatgggcgatgatgtgacggtccgggtcaaggagccgagacccgacgccgatgggctgacgcgcagatggcgtatagcgattcgcacggccggtcagcgcaaggatctgccgagccagacaatcaagctggaggtggcatcgattcccgcgtacgagccgcagcatcgtcccgccttggtcaactatccgatgttcccggccttgtcgggtcagatcatcctcgatgtggaaagccccaccgagattcttgccgacaagctgctctcctatgcctgcgcatcgcacctgcggcgacgcgacctgtgggacatgtgctggttggcgtcgagaggcgacgtcgattcccgacgggcgatggagcttgcggaattgaaatcatctgattacggcgaagaaggactttgggcagaccgtgctgatcgcgtggcgggggtcgccgatgtgatcggctcggatgccttcgccgacgagatgcgccggttcctccccgccggcctgatgacatccacggtcgaatccccacgttggagcgcatgggcgatcgaacagatcgggacgctgtacggcactccaggcactccatcgtcggccgatgcggttcccggattccctattttcggtgcgtcgaacgactccagtccaacccgctgaacgctaaggaggtctgcgatgtcgaatctggactataacttgcctgagccgacaaaggcgcaattggagtacgcgcgttacctcagccgtttccaagcgccgcgtgaacgccggactcttttcgcccgcaccgaatcggatatcgcagccgccttccgtgaagagaccgcgaaccattcctggaacgccgacgaccttgcctcccaggccggtatcggtccccggtttgccgatgctctgctccagcggggcgaagccccgattgaagcggtgttctccgcagccgatgcgctggggatagacatagccgcgttgccgctttccagtctcgggaacactcggtgagcggtgttggtatacgccaatatgcgcaaagaagcatgttggcgtataccgtttgttcatccgatcctcgcggtgctaagggaataggtggcgacgctgccggctgttccgacgacctggttcatgggcatggtcagtctcatgtcggtgcgggtggtggattccacggcgttgcgcatttcgtcctgcacgaggccgatgtaacgcatggtggtggcgatgttggcgtgccccagcatacggctgacaagcacgatgttgcagccgttcctgtagtagacgcatgtggcgaacctacggcgcaggctgtgcgacgggtatccggttaccgtcttgatcctcttcgccacgtaatcgacgccgcagtgtccctgcacgtctccggggaacagccatacgccggtgcgtttccgcaatgccgaagcgagctttgccggcacgggaagcatccgctccttgttgcccttgccgtggacgtggagcaccatgccctcggcgttctcctccagatcggtcttcaggttgattctggtcatttcgatgcggcgcaggccgcagaacgcgcccagcatgacggccagccgcgcgttctcgtcgggtgatgcgagtccttgttcgatgttctcctcgggacagatgcagccggacggaagggtcatgggcgcggtgggcacttcgtccgccggattgcggcgggcgagccctcgcttcatgctccattggtagaagaccttgacgcagctgcgtactccgcgtctgccttcggttcccatgccggctaggtagaatatgaggtcgtcttcggtcacgtcggtgatgcttttatcgacggctttggagaatcgaacgatctggtaccagcgggtgcgcagggtgtcgttcgtgcgtccgatggcgtccatccagtcgatccatttctcaatggattctttccaatcctcccgtggctcgacgtgttcgcagctcttcctgttgtcgttccaatacctcatggggctccttaagcgcatagaaaagggaagtgacttcttcatcacttcccaaggaatactattgcgcgtttctggccgatgctcttcggaaaaccagctgcaaggcgaacatgcgcgatgacacgccgatttgaaggaacagcaaggctggtgtattgtctactcctgttgcaaaaagccctacggctgcgagccagaaccgtatatcggacggtcactggttcaagcccagtcgcaggagctcacctgaacgggtaactccggccgggatgaaaattgaatattcctgcgtagctcagttggcagagcatccgactgttaatcggacggtcactggttcaagcccagtcgcaggagccatcgaaagcctcggttctccgaggcttttttattttcatcgcattggtgaccagacacgacaccccatcatcaaccgggaaatccatggcgaagacctcaccactactcacatcaggcagacaggtcactgtcaattcaccgatgagaggcacggtattcccagtatcagtctgggaataccgtgcaaatcttacatcgagaccttggtcaggggcatggcggagtcgatcgggaagtcgggggcgctgggggccacgccggcttcgaccaggttcacgccgagcatggcgaccatggcaccgttgtcggtgcagagcttgatttgcgggatacggacgtcgacgccgtagttctcgccgaattcgagcagtttggcgcgcagctgcgagttggcggagaagccgccgcccacgatcagcgtgttggaatcgtactgccggcagccgcgcatggacttacgggctagcacggtggccacggagtcggccagggatgcgcacacgtcgtccaccggaatctcatggccggcggcctgctcgctttccacccaacgggccacggcggtcttgacaccggagaaactgaaatcatacgggtgcgcggcaccggccttgccttgggtcagacccatcggcaccttgatggcgtgcgggtcgccgttgcgtccatgacggtcgatgtgcgggccgcccggatacgggaagccgagcagacgggcgactttgtcgaagcactcccccgccgcgtcatccagcgtggtgcccaccacatcgatcttgcgcggcatgtcctccacatgcagcagcgaggtgtggccgccggagacaatcagagccagcgtgtccttggggaacgggccgaactgcagctgagtgacggcgatgtgcccgatcacatggttgatgccgtaaatcggcttgttcgcagcccaggccagcgccttggcgccggacacgcccacggccaggcaaccggccagtccaggaccggcggacacggcgatggcatccacgtccgccaacgtcatgttcgcgtcggcgagcgccttggacacgcatggcacgaaggcctcagcgtgcgcacgggaggcgatttcggggatcacgccgccgtatcgcgcgtgttcctccatggatgaggccacgacgttggagagcagttcgcggccgcgtacgatggcggccgcggtttcgtcgcaggtggattcaatgcccagtacaaccggttcgctcatcgtgcttctccgttcttctccgtttgcttgccagtgatgtcttcagtgtccgccgatgccgtctgcggggcggcaaagcccacgaccctaggtttcaggtccaagctcatggtgtatgcgtcgatgccttcaggctggtagtagcgtttgcgcaatcccatgcgttcgaatccgaaccggtgatacagggccagcgcagggtcgttatccacacgcacttcgagcagcatgcgcgaggcgccctgacgcttcgcctcgtcgaccagtgcctgaagcaacgcagcggcgatgccttgccgctggtatgccttgcccacgccgatggtcatgagctcggcgtcctcgccgtcataccagaagccggcgtagccgcggacaaccgcctgttccacctctcccagcacatccagcagatacgtgcgggccggtgcgtccagttcctctcgcaccatgttcgcattccatgcgccgcggccgaacagttcgccttccaactgtgcgatggagcgaaccgcaagatcacgacttacggcagtgatgtcaacaatcatcggaccacaacccacttcacgccttatcggcaccggcatggccgagcacgtgcttcagtgggttcggtacttcggcgtccggccggcgcaggtacaacggttcgatcggcacgacctggtcgccgcgcagttcgcggctcaacgcggtggtcgcaaagacggcgagcccggctttcccggcatccaataccgatccgtccaccacggagcccagcgcacgcagtccctgccagacggatgcgtatttggccgcgccgtggccggtcacatccaccacatagctgacgccgtcgcgttcgccgtgttccgcgagcgccgcgttcacccgttcgacgatatgctccgggtagtcgatatccatctcgatccagcgtcgttcggcggcgtcctcgtccggcaggctgatgctgccgtggttgagcgagaagtacagctgcttgcggcgcgcatcgttgacgcacagcgtgacgtggcggtcgagttcgtgttccttggcctcggcgtccgggacgtcaccatccgattggcgcgaactcaagcgcggcacgtcggccaggaaatcgatgccgtcgaacatggcgctgtcacccagcacgaagttcatcatctcgccttgcgggtcgagtacgttctgtccgacgagcttggccccggtggcgaaggccaacgccttggcggccacgatgccggcgcgcaggccggtgaatggcgccgggccgatgcccacgacgatctcctcgatatcggcaggagtcaggccggcctcctcgaccgcgcgcgcgatattgacctgcagtttctccacatgggtgcgcgaatcggtctctacaatgggctcgcgccccacaatgccgaccgtcgagccgaatgaggtgtcaatcaccaacgtgcaacccatgaatcctcctagtcgtaaagcctctagagagtgtacatcgaggagtctatgggcgcatggcttattgcaggtcgaacgcggcccatcgcttgccgactgggacgaatgcgacggtacgagtgccgttgctggtgagttcgccgtctgatccagcggatgcgacatcggaggaatcgagaggtcgatcgatatggatttcaagtcgttctggtgccaaggcggtggccatttgttcgccccactccataagcaccaccgtgttctcgccggggtcttcaagttcttcgtccaatcccagcgattccagctcgtccaacaaacgcccgatggcgtcctgccccggcgcataggctgagccgcccagacggtaggcatccacatgcaccagatgagccggagtgccgtcggcgaaatgcccgtcaagttcgcgggcaatggtgaatgtaggagacacgatgggttcggtaatgtccagccccgcgccgaagccctgggcgaatgtggttttgccggcaccaagagggcctgagagcagcaatacatcgccgccgtgtaccattccggccacgcggcggccgagctcctgcatggcctcgctggtgggagccgcaatagtgtgttcgctcataaatacccctttatcgacttttaccgacctttatgactgatgtcttcaatgcagcgttccagcgcatataccgggtcgccgccgttcgttttgctttgctcatccgcccaggcgagcatacggatgcaatgcgcgagtcctgccgaagtccagccgccaagttggcgcatcgcattcttcagcacccacggattggttttcgcttcggcctgtgaaatcgtgccggcccggaccgccgaggctttggcaatggtacggagcttcatggccaacgcgccgatcagcgcgatgggatcggtcccttgttccacagctgcacgcatcatgacgatggcttctgcggttttgccttccacggccttgtctgccacggcaaaaccggtgacctgcggattggcggtcaaatactggttgacacggtcgagccccatcggattatcgtcaaagtcgaaacacaattgctcgcacatggcggcgagttcgccggttttgccgccgagcacggataccagctgctgcgcggccatcggttcgactctacgaccgcgtttctcgaattctccgagtacgaaattgagttgggcatccggtttcttcaaatccggcacgtcctctttgcgagcgccggctttcaccagttggtcgatgatcttgcgccctttgacgccgccctcgtgctggcagatcaccacgctggagccgttcggatccttggcggcctgcttggtgtacgtcaccagagcttcggcgagcttttcgtcggcattctgcaggttgacgagtttgaccacggcaacgtcggaaagcaacgatgggctgacggcttcatcgaaggcatattggtcggccgatgtggcgtcgagctcgatgagttcggcgtcgggtcgcgccttcaacgcttgtgcgcacagtgccttggtgcgcgcgtcgttcaaatacgagtcgcctccgggcaccacggttaccggtacgttcgctgctgttttcgccatgcccccatctcgccacacaggttggacaatgacctgccggcataacggcccggcagcactccgcgattaggcgtatgcctcatccaacagggcgtcgatatccgcgaaacgcttgggagcgggacgccataccgggtgaccggccgcgatgaccagtgccgggtgttccaacgcgcgcaggtcgtccagcggattggcattcagcacaagcaaatcagcggatttgccgacttccaaagaaccggtctcggcatcgacgccgagaatggaggcgttgacggcagtgactgcgtgcagggcctcggccgggctgaaaccggcgtatgcgaccagcagctccagctcacgccatgtggcgtactgcggcacgaatgtcatgcctgtatcggtgccgacgcctatcatcaatccggcctcgtgcgcttgacgggcacctgaaaccatgccgccgaccacattcttggaattctccaattggatgtcggtgatgccggtcgtgtcctgtccaagcaaggtcaggggaaggccggcggaaagtgtcggaaccagcgccgagtatccgcgcaacgcattcggattgtgccggaacatgccgatcaattcgtcgtcgagcacgctgccgtgttcgatggtatcgacgccggccagcagcgaacgccgcacgccttccgggctttgcgcgtgcgcgccgacaataacaccgtactgatgcgcctcatcgcaaatcgcccgcatctgttccacgctcatctgcggactgccggcctcgccgatttcctgtgcatcggttacgccgccggtcgcggcgattttgatggcgttgacgccagccttgagattctgcgcgactgcggtacgcgcctcttccggggtgccgctggtcagtgcgataagcggggcgccatggccttcgggaatcgccatcagcggtccggatgccaagatacgcggtccgaggatttggcctgcatcaatctgatcgcgtaatgtcacgacttcatatcccacgtcgccaagcgtgcggatcgtcgtaacgccggattccagcaatgttgtggcgttgtgttttacggttgcggccatgtacggcttgcccaatggcgaatgcgcgaatgtggcgaccatacgttggcctttgggcgtcgccagcttcggattgagcggcttgccttgggagaacagatgggtatgcgcattgatcagccccggcatcacgattttgccggtgccgtcaagatagtggtattcggctgggatgctggtttcgatgctgggtgcaacctgttcgatacgtccgtcggctccgaccacgatcgtcatgttacgcagtatggttccggctttatctccggtgacgatggtggcgtgggccaatgcaaatggttcgactatcggattatgagacaacatcatcgccggcactccttcatgcagctggttgaactggtctcaactgtatcgcagttttaccggctgatggtttatgccgcgcggcctatcgcataggttcggctggctattgcgatggttgctgcaccgaataccgcattggctattcggcttgccgccgcgtaaagagacgtctcgtctcctcgcaccagagactgaggcggacatgccaagcggaaccgaagcgcacgccaggcattccggcctcataacgacggacatgctggaggcaacggctgacgaacaccagtagcatgccgataccgatttccaccgccacaatcagcacggcacccgtaacgccatctttccatgggatgacggccatcgtgctgccacccagccacaacgccacccgttccatcaccagcgtgccccatgacgatatccacgcgaatacgccggccagccatggctcgcaccatgcgcaggccaatgccatcaatcccgccatcgtggccaatcccacaaacggcgacaccaacaggttcgccggcacggacagcaacggcaactccggttccatcaacacctgaatcggcagggtgaacaactgcgcggccacggtcatcgccgtcatttcggcgatgccgtgcggcatcgctcgctcaaaggcaccggccagccgccccgcaaacagcacgatacccagtacggcggccgaagacaaggcgaatccgtagctggccgacatatccggattcaccgccaatacaccgattaccgtccagcacagggcgctcaacgcttgcgtacgccgccccatcgcatacgtcaacgcacctatcaatcccatgatgaacgcgcgggtgaccgaatcactggggaacatcgccaatgccagcagcacatatactccagagaccagcaacgccgtcagccgccgatcaagcagcatccacatgcataaccggcgcaccaatcccgccaccagtacaaagtggccgccggatacggccatgaggtgcatgatgccggactggcggaactgattctccaacgtttgcgcatacgtgctgttgaccggcatcggaccggtctcgccgccgatataatcctggccaagcacacccatcgtcaatcccggcaccaacacacgcccctgatcggacaattgttcggtcacggtgaaaaacgcctcctgcacatgcgcaatcgcggcgagatgccacggcggagcccgcacctgtgctaccggctgttttccttccaagagcagccatagtggtatgcgtccatatcgcgcttgctgcaatacgcctgtcagcagatagaccgcgcctcgacgcaactgcccacaatacgattcgtcggcgtatacacgcacagcgaccgtggaacgtacatccgtaccatccacagtgatgccgctcagccgtatgtccgtctgacaatcgtatgtgcgttggtccgaagcgatcacgggcgtcgtcaccgtggccatgacttcgtggtatgaactggattggcgagcttgtgcggaggcaggatcatgccaagcaatggtgtccgactcgattgccgtcatactgccgatgcacgccaccgcaacgcatacggtcaatgttcccgtccaccggatccgcaggcggaaagacaccacaatcatcgccgccacggcagcacatgacgccactgttataggcaatattcgtgtgacaggccattccatgccgattatggtgacgtcaatgccagctccggcatcagcctttgcctgaccggtgccgagtccatcagacatcctccatgcgaataatgcgtgcgctcccagactcgccgcccacatcactatggcgatcggcagcatcctccaatcgcggctcccctgctcgcgcagtatccaatccctgctcatccgaccgtcacctgccctcgcatggtctccaacgtcttggagccgatgcctttgacatccagcagctgatcgactgatgtatacccgccaatcgccgtgcgatgatcaatgatccgctgagcggtaaccggcccaatacctttgatggattgcaattcctcagcggtagccgtgttgaggttgataagaccatgcgtggaagcgccggcatcgctgccgtccgtctgcatgtgcggagattgcgtggtatccgattcggggttcgctgtggcatcggaatgctccgactgctgcggatccgtgcgtttctcgtccgtggtgttctgcgatggcatcgtctgatctccagcggagccgcccgtggtctgcatggcggtcggttgagacagcatggccatattcatcgactgttggaccagcaatgccaagctgatgccaagggcgacgatcagcagcaatatcacggccaaggcatgcccaatggtgaacgacaatcgcggctgatcccgggtgagtctggctgattcgccgacggcatcggcggaacgtacgccaatcagatccgataacgcacgtttgtcacgggtcgcctgccgcaggccgctctgcgccctttggggcgggtggccagccggacggatccgtgcatggccaggaggcggcggaggcgtcgtgggccgttccactcgcggttggggcatggctgcgctctgcctgctgaatgcgcgcaaacggttggcggcatggtctgcgcgatggttatgagaaacgcccatgcatccacgctgatggattcatgggcgtttgtccagctgaaacggggtatgtggttctagcttatgaagttatccacaattgaggtgggcggttgacgctcccctcagtctcgctacgcgagccagctcccctcaaagaggggagctggctcgcaacaagtcactccgcgggaacgatggagacgatcttcggggccttgacgatcaccttgcgcggctccttgccgccaagacggtcggcgacggcggccagcgcctgcttctcgagatcggccggatcgatgtcgaccggcacttcgagcttggcgcgcaccttgcccttgatctgcaccacggcggtcacggtgtcgtggcccacgtagcgttcgtcggccaccggccacggctcggcggacagggattcggcgtgaccgagcttgctccacatctcctcgcagatgtgcggggcaatcggcgcgagcatcaggatcagcggctccacggcggcacgcggcacagccttcagaccggtcaggtggttgttgagcacgatgagcttggcgatggcggtgttcgggcgcatgccttccatttccgcggtcacttcggcaatcgtgttgttgagcagcttcagggtcttttcgtccggcgtgtcctcagtcacatgggcctggccggtggtctcatcgaccacattgcgccacagacgctgcaggaagcgcatgccaccgaccacgttgcgggtgttccacgggcgagactcgtccagcgggcccatgctcatttcgtacaggcggaaggtgtcggcaccgtagttctcgtacatgtagtccggggtcacgatgttcttgagggacttgcccatcttgccgaactcgcggttggcatgttcgccgttccaggtgaaggtcggctcgccggaggcgtcggccgggccttccacgacctcgtcggccggcacgtactggccgcggtcgtcggtgtaggcgtaggcctggatcatgccctggttgaacagcttgtggaacggttcggccgagtccacgtagccgaggtcgaagagcaccttgtgccagaagcgggagtagagcaggtggagcacagcgtgttcgacgccgccgatgtacaggtccacaccgccttcatcacccgagtacttgttgtggttcgggcccatccagtagtcgaactcgtccttctccaccatgtgcttggtgtcggtcgggtcgatgtaacgcatgtagtaccagcaggagccggcccagttcggcatggtgttggtgtcgcggtagtaggtcttcttgccgtcgcccaagtcgagctcgaccttgacccagtcctcgttgcggctcaacggtgcctccgggttggactcggcgtccatcggatcgaaggtgcgcggctcatagtcgggcacgtcgggcaggttgatcggcaatgcggaatccggcagcaggtgcggggtgccgtcttcgccgtagacgatcgggaagggctcgccccagtagcgctggcgggagaacagccagtcgcgcagacggtagcttacggtgcccttgcccacgccggcggattcgagccaggcgttgaccttggcgatggcgtcgtccacgcgcaggccgttaaggctcagcgcgtcgcccttggcttcggtggcctcgacggaggagttgatcacgatgccgtcatgggagacgaacggcgccttgccctcgtagttggccaagtcgtcgccggaatccggcagaggcgtgacggtgtagatgacaggcagaccgaacttcacggcaaagtcgtaatcgcgctggtcgccaccaggcacggccataatggcaccggtgccgtagtccatcagcacgtagtcggcagtaaacagcgggagcttcgcgccggtgatcgggttggtggcgtacaggccggtgaacagaccggtcttctcaccggcctcgttcacgcggtccttggcggtcttggcttcggcggccagacggtaggccttcaccgcctcgaccgggttggcatagccgcccttccagtcttcgggtacatcggccggccattcggcgggcacgttctccagcaggtgatgttccggggaaaccacggcgaacgtggtgccgaacagcgtgtcgggacgggtggtgtagatttccatgtccttgtcaccgtcggcagtggccacgatgaagtgcacggaggcaccatgggattcaccgatccagttgcgctgcatgagcttgaccttctcaggccagttgatgccgtcaagatcggcgatgaggcggtggccgtacttggtgatgcgcatggaccactggcgtagctcacgctggaagaccgggaagttgccacgctcggacttaccttcggcggtgacctcttcgttggccagcacggtgcccagacccgggcaccagttgaccggggacttggagatgtaggccaggcggaagtcgttcaagatatcctgctgctcggcgtcagtgaggtcggaccactgcttgccatcggactcgtggcccggaatggccttttcgccggattcgaacttggccacgagctcggcgatcgggcgtgcggagcccttggagccggacgggttggtggcgtcctcgtcgtaccaggaatcgtagatgcgcgagaagatccattgggtccagcgcacgtagccggggtcgatggtggcgaacgtacgacggttgtcgaagctcaggcccatacggtgcagctggcggctcatgttggcgatgttcgcctcagtggtcacgcgcgggtgctggccggtctggactgcgtactgttcggcaggcaggccgaaggcgtcgtaacccatggcgtgcaggacgttctcgcccttcatgcggtggtagcggctcaccacgtcggaggccaggtagcccagcgggtggccgacgtgcaggcccttgccggacgggtagggaaacatgtccatggcgaagtaggcggtgcggccttcggcgttacggcccttgccgtccttcaaatcgccgttgacgttggcggcccagaaggtgccttgctcgtcccaaatcttctgccacttgttttcgatgtcctgcgccagtgcggcgttgtagcggaagttgggctcttcggtttgcgtgctcttctcgttgtcactcataaatcagcaaggtagcctcgcaactggacacgtcgtcaatcgttattcagcatccgagacgatggctttggggtcgccgttcagcgaaaccgtgagctttgtttggcttgtgaacgtatccttggcggccgtccagctgccatcctcaaccatgtcttccaatgcttccgcgattttctgcgccaattggctggtgccttgactcacggcgatgccataaccgacctcgcccttgtccgcaatcacgtccatatactggggcccgttggccgcttgaagaccggaaagcaccgccatatcggaggctatggcatccgccgaccctacttgcacggccgtgacgcactgcgcataactgctgcgctcctgaatccgggcctgcgggtggttgccgcggaagatgccgactgtctcgtcacctttcactgcgcacaccgtgccgtcgcctacgtcacccaccgaacctgcgtcattggtgaatcggccacgctcatccgacctgaccagcaaaccgacgctggtcgtgaggtatggtccggcaaaatcaacgatcgcgctggactcatcggtgataggccaagaggcgacgaccatgtcgacctgtccattgtccagcatggagcgccggttttcggggcgaacctgtttaaagacgatctgcttgttcgcatagccgagtttggcggccacgtatttggcgatggtgatgtcgaagccctggtatgtgccgtcatgccatgctcccaccgatggctcgtcggctgcgaccccaatggcgatggtgggcccctccggcgctccggagacggtggtgacttgaatttggccgcaaccggccagaccggataatagcaatatcacgccaaaggccgcggcgaatcctgccatcagtcgggagcgaaatccgcgccgcatcggacggcgagcgcggagcatgctacggctggcgaacgatgaccagtggtgcataaccgtcaaacgccttacttgaacatgcgcgaacgcgtgaggaaccaggcaaccgcaccggagagcaccatggaaatcacgataatgagcatgaaaccccacggcttgtcagtgaacggcatacccatcatgccgccatcgaagttcatgccgtacatcgagaagatcagggtcgggatggacagtgtgatggagatgatggtgaagatgcgcatcacgttgttcaggttgttggacacgatcgaggcgaaagcgtcggtcatgttcgcaagaacgccgctgtaaatgttggccatctcgatagcctgcttgttttcggtgatgacgtcgtcgagcaggtcctcgtcgtccgggtattgcttgatgcgttgcagggtggtgagcttctccatcacgatttcgttcgatttcagcgatgtggtgaaatacaccaaagtcttgctcagctccatgagcatcacgatctcgcggttctgcatggagtggcgcagcttcagttcaagcttgtcgctttcgcggtcgatgatgcgcaggtaacgcaggtacatcgtggcgttgcggtacaggatctgcaggatgaagcgcgaacgcatgaaggtgttgaagcctcggatcgtgccttccatgaatgggtggagcacgggcgtgtcctgcatgcagacggtgatgatgaggttttcggtgacgatgatcgacagcgggatggtctcgtaccagtcgcgtccgccacgctcttccacggtgggaatgtcgacgatgatcatcgtgtaatcgtcttcgacgtctacacgtgaacgttcctcgtcatccaaaggggcacgcaggtcggccaggtcgatgccggtttgcgaggcgacggtggcgagctccacatcagtgggttcgctcaaacataaccaggagccgttttccggtttctcgatctgctccacttggccattgattgagctgaagattctcagcatgtcgtctcacccgccttccgcgctttcttactgttctatcgctgtacggttccaaaccgagattagtctagacccaccgttcgaatttgcgagcggggtttcgcatagcgaccatcaccagacgattggctgccaacttggcatgtgcggtcctcgcagatcggtcggcccgttctcccagtcggcgctgtcggcgatggcgggagccttgttgtattcctccaactcccacaggggctgttcgatgggggtgccgttgacgctgtggcgcactttgagccggcaccaacaggcgttgcgcatgccgccgagtgcgttcatgccgtccgggtcaagttcgagcaggttggagatggtggcggtaatccatgagccatgggtgacgagcatcagcgtggtgggcgtgctgtctgaataggcggagtcgatgaccagtgcgcgcacggcatcggcacctcgctgccccacggcggcacggctttccacaccatgcttggtttcgcccccagtgtgctgtttccaagaggcgtagtcgtcggctgccacggctttgatttcggcgcgggtcatgccttcccactcgccgaagctgcgttcacgcagtcgttggtcacaggtgactggcaatcccaaaatatcggcgaaggcgtgtgcggtctgttgggcacggaacaggtcggaggtcatcaccaccatgcgccggccggcggcgggagcctcctcgaactggcgcgtatcagtgcgttcggcggcgtcaggaccgggctgggcgatggcttcgggatgctcggcaagtcggttcaccttggcccagtaataccgtgaagcgagcgcgaatccggtctggtcaacctgccattggcctacgatgtcgagcggcacatcgatctggccttgcaagcgatgttcgagattgtattgcgtacggccatgacgcagcatcatcacttcatcgatcatcggttttcgccacctcgttctcttgcggtttgccatactcatctcagcacaacccctagaatggcggcatggagatttctgagtcgacttgggcgttcatcgccaaacaccgccgtgaagatgtgcgtgatgtggccttgcacgccaagcatgatggcgacgtggatgtgccgttcgcgctggagcaaattgccggctggcagcgcgcttcactcaagctacctgactgggcgtcccatgatgggctgattttcccgccgcaagtcccaatggaacaatgttccagccaattcaccgcacagtacaaggctcggctggtacagcgattgttggccgaagaagcagtcgacgacgactccccgacatccctagtcgatctgaccggcggtttcggcgtcgacttttcttacatgtcccgagtgttcaatcgtgccatatatgtggaacaacaatccattttatgtgatatcgctcgccataatttcccgatactcggccttgaccacgccgaagtcatcaatgatgattcaacagcagtgcttgacacgcttggccgagtctccatgatcttcctcgatccggcccgccgtgacgatcatggctcgcgtacctacgcgattgccgattgcatgccggatgtgctgaccctgaaggatatgctgctggccaaggcaccgacggtcatggtcaagctctcccccatgctcgactggcataagaccgtcgccgatttcgccggcgcggtacatgaggtgcatatcgtctccaccgggaatgagtgcaaggaattgttgctggtgttggggcgcggccgttacgcctcaccgctcgtggtatgtgctaatgacgagcaggtgctgtcgtacaaggccggcgataacagcgacaatcacaccactatcagcgattctgccttggctgcacgcaatacttgcaataccgaagattccctgtctgaggaaagcgcgaacgacttcgattcctcgcattggaagtacctttacgagcccaacgcctcaatcatgaaggccggatgctttgatgttctcgaacagcgcttcgccgtgcatcacatcagcccgaatagccacctgttcgtggcggccgaacctattgccgattttccaggcaggtcattcgccatcgaatccatcgccaccatgaacaagaaagaactgaaacagctattggccggcctcacgcacgccaacatcgccgtacgcaatttccccctaaccgtggcccagctgcgcaaaaaactcaaactcaaggacggtggcaacacctacctcttcgccaccaccgacgcccaaggccgtcacctagtactgcgcactaaaaagcgaaaaagtggctccctctgacgaggaagccaccaatacgtcagctaatcagtccttggcgatggtcttgccggcggtcggaccggaggcaaggtcctggatctcggtgacttcgagaaccggaatcacggccggcttcttggtgcccttttcctcggcgaccttgacctgctcgttgtagatgtcgtcgtcaacgtgcagcaccacgttgccgcggaagcggtagccctgcttcttctcgaggttggcgaaagcgatgaccagcggggaaccgttcttgaggttctcatagtgctggccggcggtgcgctcgtggtaggcgatgtgcgtgtcgtccagcacgaacagggacatcttcgggccgaggtccagttcgccgtccttggagacggtggtgatccagccaaggttgttcttgatgaattccttgatttccggagtaatgactgccatgtcgaatcctttcatgattgctacggataacgtatccttactctttccagagtaccggtttcgaacgcgactagcccggatgttcgctgtgagtaacctcaccttcgcacagctttcatccggtttttgcctgcttggcgatgccatgccccggtcgcgcaccagccacacacctgtcacacacccgacacccatcgaccggtcgattttggccggtagttcccgtaatctgtgagccgagagagccacaagttttcctaactgtcctgaggtgcaccatgggtttggtcgaacgtttcagcaagctgcgcagccgctggtcccgcaactttcccccgaatctcgcccgactcatgttgctgggctgcgctgcattatggggtggcagctatctgctcgccaaattcgccatggaggcgattccgccccaatggctgatgggtctgcgcatgatcggcgcctgcctgtgcatgctggccttgttccataagcacatcgtgccgtatctgacgccgaaaatcattgtgccggcgctcgtggtgggcctgacctactggggcacgatggtcacccagaccatcggcctgcagaccattgaaccgggccgcagcgcgttcctgacggccgcctactgcgtactcaccccgttcgccacgtggattatttcaaaaaaccgcccgaaggccatcaatctggtcgccggcgtgatctgtctgatcggcgtcggcttcgtctcgctgaagccgggcggttcgctgtcgctgagcgccggcgactggctgaccatcgccaccgcggtcatcttctcgttcaatctgacctgccttggtgtctacaccaaacgcttcgaccctatcgccgtcacttttgtgcagttcggcgttgccggcgtattgttcatcatcggcgcgttgttcaccgaacccatgccgaacgccagctggctggcaccctcagtagtggccagcgtgctctatctgttcctcggcgccacgatgagtgcccagatcatgcagaacatcggtctggctcacgtgcctgcctcgcaggcgtcaatcatcatgtgtacggaaagtctgttcgctgtcacgttctccgcgctgttctggggcgagacaatcatgtggagttcactggtgggctttgcgctgatcttcgtcgccgtgctgatgtcggtaatcaagccgaccaaacagtcgctgcaccggaactgacgattcagtttcggccatggatggtcatgggttctccattgccctgaaccgttacggtgaaggccgaggctcttgaaggcgtgcaatcggaaatcggacttggcatcgccaaactgcatttcgagttgggtgccggcaacggcagcttcgcttgggctgcatgacgttctgctgaacgtcgttttcgctccaagcgaaccaatttcggttgttctttgcgctactttgcgccactttgcgctgattcccactgctcatcggcaccatatttttgagtcattccacattccgctggctaggttttgaaggtctcgtgtaggcatcctctcggtatcaccgagccttaagcaaccttccagcccgacactttacggtcgtgtcttgtgaagaagtttttcgaaggtctttccctctcatccatcgtggcgggcacccttgccgccgtcacctcattcttactggcatcgaaaatcggtatcgccggctcggtaatcggcgcggcagccagctacatcgtctccgcggtggccaccaaaatctatcaaaacatactcaccgcctccggtgagaaactacagtcggcctcgtcttccggcaatgacgatgacactacggataataagtccgataaggcagccgaatccgagtccgatacgacgatgaccggcatggtcaataccgtttccaccgcgcgcaagccgcgcgaagtcgtgtccaatcgagcgaacggacgaacctattcggtcaatgaactgcgcaaggcccgctcccataattcgaagcgcaccgccattatcgtcacgctggtatccggcctgctcgccgtggcagtaaccgccggcatcgtcatgctggtcacgcagggccgtggcacggaccatatcatcactccgttcaccacgcccacgcaaaccgacaccaaaacgcagaccgacacgtccaatcagaataacggactgccgcagccgggcattaccgacggttcgaatgattccaacaccaaggactccacatccggctcgtccaacgacggcaccgattcaagcacgtccggctcaaccggcaccgactcctcaaccgattccaacaccaatggatccaccgatggttcgaccggcaccgattcctccactaattcgggcacgactggcggttccaccggttccggcaccaccggaggcaccaccggcaccggcaacggttcaaccggatcgggttcaggatcagccaatggctccggttcctcttccagctccacgggcggatcatccagttcaaactccggtaatagcggttcgagcggctcctcaaccggtagcagcagcggaaccggcatcaaattcattggctgacaatcgccgactcgatagcagcgatggcggcaatgccagtcaatgacgtggggcaatgagaacatggaacgtatgactaccatcattatgaatacctctgagggcagcatcaccatcaacctgttcgacgacaaggctccgaacaccgtggccaacttcctgggcctcgccaccggcgagaaggaatgggcggacccgtacaccggccagccttcccacggcaagttctacaacggcctgatcttccaccgtatcatcaagcagttcatgattcagggcggttgcccgctgggcaccggtaccggcggccctggctacgagttcgacgatgagatcgacccgagcctgaagttcgacaagccgtacctgttggctatggccaacgccggtctgcgtcgcggcatggacggtaaggtccatggcaccaacggctcccagttcttcatcaccaccgtgccgaccccgtggctggacggtcaccacaccatcttcggtgaggtcgccgatgacgactccaagaaggtcgtcgataagctcgaagcactggacaccgatccgatggatcgcccgctcgagccggccgtgattctgtccgtggacgtggcggagtaagaccgacaacatatacgaaaaggtcctgattctgaaccgcaccccgattgttggactgaagtaattcagattcgatgatcggaggtgcggtttctcatgtgtagggatcgcaggcgtcattacgatgacggtttcatgcgggtcgtcgccgacctgatccggggcggggccgggaggcgttctctcgcccgccggcttggcgtgcccgtcagtaccgcgggaaaatgggtgttgtcataccggtttggcggggaggcggcgctcatgggagaacgcgaaggcaacaggagatacgactacgagacgaagctcgcggcggtgcgcgaccatgtggagcatgggctgacgaaggccgaagtcatggagaagtacaggatcgcgggtcccgccccgttggagcgctggtgccgcgagtaccggtccggcggcccggacgcgctgcgtccgaaaccgaagggcaggcccaagggcgcgaaatccaagccgaggccggctcccacaagggaacagctccttgaggaggagaacgcgtacctcaaggcgagggtcgcgtacctggaaaaagtcgacgccctgctggcgcggagatcggcaaccgggacagaacggtgatcgtctccatgctggcggggctgggacatcggctccggcacctgctcagggcggccggactggcgaaaagcacgtattaccatcttctgtcgcatccggccgccgtgacccggccggacatcgagccgatggtcgccgagatattcgcgcgcacgcccaacgggtgcggccaccggcagatacgcatgtgcctcgtgcacgagttcggggtgcgggtgagccacaagagcgtgctgaaggtcatgaggcgcatgggcctggaatgccggatacgcaggccgaacccgtaccggaaatacagctcgtaccggggcgagacgggcgcgagggtggagaacctgctgaaccgcgacttcacggccgagcggccgtgggtgaagctgggcacggacgtcaccgagttcagggtcgccgacggcaaggcgtatccggctcccgtatgcgacatgggatccaaggagatcgtggcctgggacgtcagccggcatcccgacatggcccagcagcggcgcctgctcgccatgctcgaggagaagctgcccgaagacgccgacccgatcctgcactccgacatgggctggcagtaccggcaccggtggtggcgcgaccggctcgcgggactgaacatccgccagtccatgagcaggaagggcaactgcatcgacaacgccgcgaccgagcaggtgttcggccacctcaaggacgagttctatgccggacgcgagttcgcctcatacgaacagttcaagaacgaactggacgcgtacatcatccactggaacaccaaacgccgccagatacgactggagggacacaccccggaggaattccggaacatgtccctcacagcctaatcaggtacccttaataaaccacgtccaacaatcggggcgcagttcaggtattccagtcaggaccttttcgtgttcttggctcccctctctgagagggagccagagtaaggtaacggcctacttcatcttgcgcagtcgaggttcggcggattccttggcaccagtgatgcggtacacgtcgaacacgccatcaatcttgcgcacggctgccagcaacgagttgagatgctgcggatcggccatttcgaagctgaactggctggtggccacgcgatcggaaccggtggcgatcgtaccggaaatgatgttcacgccatggtcggaaagcacacgtgtcacgtccgaaagcaggtttcgtcgatccagcgcctcgacctgaatcttgaccatgaacaggcccttggtgctggtccattcgacttcgaccacacgctcaggctgcttgtttttcagatcgatcatgttctggcagtcggtgcggtgcacggatacgccctgattacgggtgatgaagccgatgatattgtcaccgggcaccggcatgcagcaacgggccagcttgatccacacatcgcccacgcccttgacggacacgccggtggagctgctggaggccttgcgttccatgggcttcagcggcaggacttcctgctcgacttcctcatcgacctcgtcggcacccgcatccttgaccagatgcgagatgacgttctgcgtggagacctgtccgtcaccaatggcggcgaacacggcgtccgcgttcgggaagttaaggtcgtcggccacacccaccagtgcttcgggcgtaagcaatgtgttgaccggcagattgcgcttgcgcatcgcgcgggtcagctcgtcgcggccctcctcgatggcttcagtacgacgctccttggagaaccactgacgaatcttgttgcgggccttcggactcttgacgaagctcagccaatcgcgtgacgggccggctgtatcggatttggacgtcagaatttcgacggtatcgccattatcgagcgtggtgtcgagcggcaccaaacgaccgttgacgcgcgcgcccatcgtacggtggcccacttcggtgtgcacggcgtacgcgaagtcgaccggcgtggcgtgagcgggcagggatacgattttgcctttcggcgtgaacacgtagacttcggacgagccaaggtcttccttgagcgagcccaagaattcgttggaatcaggggtttcgctggtccagtcggcgagctgctgaatccatttgaggttatcgacctcggaaagctcctgattgttttcatcacgctttcgatcggacttgtccggcgagctcagggcgcggccggcctggccgttttccttgtatttccagtgcgcggcgatgccgaattcggcgcggcggtgcatgtcccaagtgcgaatctggatttcgaccggcttgccaccggggcccaccaccgtggtgtgcagcgactggtacatgttgagcttcggcatggcgatgtagtccttgaatcggccgggaaccgggttccaccgcgcatgcacggcaccaagcgccgcatagcagtcctgaatggtgtcgacgatgatgcgcacaccgaccaaatcgtagatgttcgcgaaatcatggccgcgcacgatcatcttctggtagatggagaagtaatccttcgggcgtccggtgacgtatgccttgatgttctgctcgtcgagatcctcgttgatctccgccagaatctgcttcaggtacacatcgcgctggccggctcggcgagccaccagcaccacgatctcgttgtagatcttcgggtagagcaccttgaagctcagttcctcgagctccgtcttgatggcgttcataccgagtcggttggccaaaggtgcgtacacgtcaagggtttcacgcgccttcttctgggcggacgtggtcttcacatagcgccaggtgcgagcgttgtgtacgcggtcggcgagcttgaccaccaaggtacgcacgtcgcggctcatggccaccacgagtttgcgaatggtttcggcttgggcggaatcacccacttcaagctgactcagcttggtaacgccatcgaccagaccggccacggtgtcgccgaattcggcgcggcattgatccaacgtatagtcggtgtcttccaccgtgtcgtgcaacaggccggctgccaccacgatcgggcccatgcccagatccgcgagaatctgggaaacggccagcgggtggatgatgtacggctcgccagacttgcggcgctgggcggagtgctggatgacggcacgccggtaggcacggtcaagaatggacaaatcctcatcggggtgatgggacttgcacaccttcttgattggatccagcggattgagcggatcggcactgatctcacaacccaacttacgggcggcgtactgctcgccatcaatctctgccatgccagtcacctccctcgtcatgaagttcattgtagccgcgaaccggagccttgtgcattcacctgttcgccatcattggttccacaaccgttgttgccgtcatcaccttagtcattcaaccggcctaatccggtcaggacgccactcccgtcgaaccgaacccgcgttcggcgcgatcggatccgggcagtgtctcggccgggatgaaccgagcctcaacataccgctgaatcaccaattgagcgatgcgatcgcccggatggaagacggcggtgtgcttcggatcgaggttgatcagaggcaccttgatctcgccacggtagccggcatcaacggtgccaggcgcgttgagcacggtgacgccctgcttggcggccagcccggaacgcggatgcaccaacgccacgtagcccgcaggtagggcgatggccacgccggtgggaaccagtgcccgttcaaaaggcttcagcgtcacatcgacggtggtgatgaggtcggcaccggcatcgcccgcgtgggcatagtgcagctgggccggatgttcggggtcgaggctcttgaccaggacctcggtggattcgggctcgttgtaggtctcgtcgaacgccatcaggcggcgcactcctcacacaccggctggccatcctcgtccgtgtaggcgagctggctgcgatgcttgaccaggaagcactgcgagcagatgaactcgtcaccctgcatggggatgacggtcaccgaggaatcctcgttgctcaaatcggcgcccggcagttcgtagtcttcggcgatggcgttctcatcgtcgtcgatgtcgctcgaggcgttctgcgaggacttccccagcgcctgcagcgattcctcgtcctcatccttgttgcggggggaatcataatcctgagccatcatggtcctttcgtcgtctttggttcgtaagtcgatatatatagcacggtcagcgccgtactcgcccataggatacacgatttgaaatactcgtaaagttcgacacgtggggcatacttaaaagaagtaatgtctttgcgacggaaagtggtgcgaatatgccagatgatcggcttgaaaaagcccgtttcgtgcgcgtgagcaagacgggggacctcgtattctcccttggcggcagggaaatggctgtgagcgtggacgacacgctcgaacgggcgattcttgaggccaagcaggtcagaagcgagatgcgacaggctccccagccgcatcagcagtccactttgccgatttcccagatacagtcgctgattcgcgccggtgccgatccggcccgtgtcgcggagaaatatcatctgagcgaaatgctggtacgtcgtttctccatggctgtggagaccgagaaacagtatgccatcgaacagttccttgccgtggcggcacccaaagacagcagggtgcgcaccatcagcgaactggtggaacgcacgctggcctctgcgggaatcggcatggaatcagtgacctggaaatccacccgacgtggacttgagccttggcgcatcgtggcgatattcacttccgcgggccgtgagatccatgccgaatggacgtggaatatgcacgacaattccgtgatgagcctgaacaatgccgctcgaaaactgctcggcgaacagaatccggaatcagccacggattccaaactcaagccgacgattcccgaactgcccggcgactccgtacgctccgcgcgtatcgagcgcgccgtgtctgcttgggcggctcctacgccttcgattccggccgcacggcctgccgcaatccggccctctgtcacttccacaggttccatgcccccagtggatctatccacgtccatctcaccggccacgacccaggctcatggcactacggcccccagtccggtctcttcgcagaccgccggatctgtttcgccatctgccgcaggattacagcaatcgcctgccacggcaccagagcagggctctgacaatgtttcggacaagaccatacggagtggccccaatgcacagctagtagccaccgagcaggagcgggcggccgaatccgccgccaccgaacatgaggcaccagccaaaccggccaagcgtaaatcaggacgttcggccgtaccaagctgggacgagattctgttcggagactgaatttccgaatcaggccatatcgatcaggcagggaatatccatttccaatgctgtttgggagccatgcacgctcggcaggtgggtggccttgtctccttgcgtacgcgaatcgacgagggtcacggctcccgctgcctgcacgaccacatcgccgagcattggccggactcgctcgcagaccggtccaaacaatccgtccgcgatggcctcatccttggtccgcaccaaggctcggtcttgcagacaatcgcgccaccggcaagctatatcctcaggtcgttcatccggctcggcatacagcatcagcgagcgcggctcccccccgaccagtgacacgcctcgggtgagctgcggttcaacggcgatgtcaatccgctggtccatgtcggtttgcaccatgccgtggtcggctacgatgacgatcagcgtgcctttgggtgcgctgcgtttcaggagcgcgagctgggcgtcgatatgttcgaatgcggccacccagtgttcggaatcccacccgtaattgtggccgactttgtcggcgtcacggatgtacaggtaggtcaggccgggggtgcgggaggcgcgtgcggcggccagcacacgatcgcgtggggtgacgttgctttgatagtcggtgcctcgcaatgcggcttcggtcaatggcgatttggagaacttgggcaaccccgagctcgtgacgcgcacctcttgagccgcaagtttctcgaacaccgtctcctcgcgctgcaggtcgagcggatcgaccatgggcggcacaggaatgtgcggattggctggtttgggtgccagcgcgtctttgaactggatgagttggatgagcttatggctggcgggttcgagctgcgtatagcccgccattgcggtcagtcccgggcaggttccggtaccgaatgcggccatggccgccacagtggtgcttggagcgcaggtagcgatgggacgctgattggcgctttcgttcatcagcgaacgcagatagggcgcgtggccgaggcgcatggcgaggttccagtagcccaggccgtccacgagcaccacgatggccgattcggcatcaggcagccccaatgcgcgctggcaggccttgggatcggcgtggaccttggtgggggtcggatgtccgatggcggcggacaaggcgggcagcacggcggacaggtgcagtgctcccccacgccgatcggccggggcgtcatccccatagcccactgtgggcaccagccgcagcaactcgtccatatccggcgtctcaacactcatagttgcccattcaagtagcacccctccccttggctcagtgcgcagagaacggttctcaataacaactgtgcgctccaacgcacataatcaaacaaacgcacatcgactgaaacactggaatcacgccgttttatcggcaaacatgtgcgattggcgcaccgaaaccagcgcacagttgttatcgagaaccgttctctgcgcactgtttcgcgccctcccgctaatatgggggcgttcgaaagggagtttcatggcatcacaccgcaaaccgtccgcgcaaacctatgatccgcgcacggtcaaggagcatatcgtcgagacgccgctgaacgaggagatgagcaagtccttcctcgagtatgcgtattcggtgatttacgcacgcgcactgcccgatgcgcgcgatggcttgaagccggtgcagcgccgcatcgtctaccagatgggcgagatgaatctgactcccgaccgcccgtatatgaagtccgcccgcgtggtgggcgaggtgatgggcaagctccacccgcacggtgattccgcgatctacgaggccatggtgcgtttggcacagccgttcgcgatgcgtctgccgctggtagacggccacggcaacttcggctcgctggatgacggccctgcggcctcccgttacaccgaggccaggcttggcccggccgctctcggcatgaacgcggatatcgatgaggacaccgtcgacttcacgccgaactatgacaacaagctcaaggaaccgaccgtgctgccggccgccatcccgaatctgctggtcaacggcggctcgggcatcgccgtgggcatggccacgaacctggccacccacaatctgggcgaggtggtaaacgccgccaagttcctcatggcgcattcggacgccaccctggaacagctgatgcgttacgtgcccggccccgactggcccaccggcggcacgatcatcggccgcgacggcatccgtgaggcctatgccactggccgtggtacgctcaccacgcgcgccgccacgcatatcgagcatgtcacggcccgcaagcaggccatcgtggtcaccgagctgccgtacatggtgggcccggagaaggtaatcgaacgtatttccgacggtgtgaagaaccgcaagctggaggggatttccggcgcgttcgatctgaccgatcgtcataacggcacgcgtatcgtcatcgagatcaagactggtttcgacccgcatgcggttctggtgcagttgttcaagcacacaccgttgcaagacaacttcgccatgaacaacgtggcgttggtggagggccgcccgcacacgatgggtctgaaggagatgcttcaggtgtgggtggaccaccgccgtgtggtgattcgccgccgcagtgaatatcgcaagaagaaggcgctggagcgcctgcacctggtcgagggcctgctgctggccatgttggacatcgacgaggtgattcaggtaatccgcacctcggatgatgcggatgccgcgaagagccgtttgatggtcgttttcgatttggacgaggtccaggctcagtacatcctcgacctgcgtctgcgccgactgaccaagatgaaccgtatcgagcttgaggccgaacgcgatgatctgaagaagcgtatcgaggagctgacccggatcctggcctccgccgaggcgctcgaccaggtggtcaccgacgagatggacgaagcggtcgccaagtggggctcgccgcgccgtaccgtgctgctggacgccgacccggatggcacgttgacgccggtcgtggcgcagggtgccggggcttcgggcgtgtccaagtccgcgctcgaagcggtgaaggccgccactacgatctcctccgccgaagccgatgtggccgcagccgcagctgcggccaagaagaccggcgaacagtccacgctgaccggagccttgaagatcgaggacgagccgtgcgtggtgatgatgagcgctaccggtttgattgcccgtaccacgccaagcgcgatggacgtgttcaatgcacgatccacttccgatgagcgtttgagagacgatcagatcaccacaatcttcgagacttccacgcgcgctacgtatgggctggtcacgtcggccggccgcctggtgctcgcgcatgtggttgatttgcctgccttgcccgctaccgccacattgtcgctgaagggaggagttcaggccgacgaactgatcggcatgaccgaatccaccgatccgattcgcggtgagcgtgtgattacggcgattgccatggagcagccgacgtccggcaagaccagtgccaaggacgagagcgaggatggcggggccgccgaggccaagccgttgccgtcgctggctatcggtacccgtaacggtgtcatcaagcgttggaatcgtgaggcacccaccaccatggattcttggcccgtcattgatctgaaagatggcgacgaagtggtattcgccgccgtggccgaggatgacgaccgtctggtgttcatctcctccgattcctcgctactgacctttgaggcgaagaacgtgcgcccgcagggtcgtactgcgggcggtatggccggcatcaagctggccgagggcgcccgtgtggcggccttcaacgtggttcccgccggcaaggtggcatggacctatgaagagggcgagaacggcttgacttccggatccggtgcagtggtgctcaccgtggccggcgattccgatgcactgcccggcaccgaaaacggcgcggcgaaggtcactccgctggaaatgtaccccaccaagggtcgcgctaccggcggcgtgcgttcccagcgattcctgaagggccagaacacgctgattcttgcctgggtgggcctctacccgttgcacgcctctacatccgcaggctctccggtcgagcttcccaagcccgatatgcgccgagacggttccggagtagacctcgcctcccccatcgccttcattgcgtaacctcaattaagctccctctgatgggccgagccgtaaagcaaacaccccagtggggtgtttgtaggcgaggagcgaacgatagtgagccaaacaatagagaagagaccctgaacccggcctacactaagcattaaggaggtggcgatgagactactggttgccgtatccaatgaaccgttggcccacgccattcatggtgccctgcttgccggtcgtcatgaggtgtctttggcaagcaccggtagtatcgcgctcgccgctgtcgccaaggagtcatttgacgcagtgattcttgatgaatccctgctcggcatttccaccgagcagctcatcgaatcccttggcgagcgctgcctgacgagtacgcccctatcgaagagacgccctacagctccttcagcgcggattcacgcgcaaacaactcagatgccgaagccgaacaacgctcggacaatgctgcctctagcgcacaagctaacgcacgacacccggatgtcgtgctgagcaaaccattctccgatggcgaactgctctcatacgtcggctcgcttgccaccgactcccccgtcatgatcattcgtggcaatctcacgttggacaccacgaatcacaaggcctactacgcatccactcacagcgcaatctcactgtcccgtctggaatacagtttgcttgaagcgctggtcaaggctgatggccagttcgtcaacaccaacgagttggtcaaacttatcggcggcccattcttcgagcaacagggcttactcaagaacgccctctacacactggataaggagctcacccgcgccggcctcatcatgacccaacgaggctccaactaccgcattcgatagctgggcccaatcagtacagccgcatgccttggggaacgggggtgaagccggactggtggaggatgcgggcgaaggggtgacgggcgttgaggggttcgccattgatgtcgctgaatgtcacggagccggtgccattgcgtttgagggcgtaggccagttctgtggcggccttgcgcatttgttcgtcggaatcattgacagcggcttcatggccgaccgattgatcgaacgctgtcaggtgcttggctttggcggccgcgtatagtagcgcgccttgcgcattgagcacgaccgtggctccgatacggcgtgccggtttacccgcaccggcaggcgcgtccggccacgcgatggcggagccactgagatttgcggggtcgagcacactcaatgccaccacggactggccacgatgctctgacggatgacgcaacgcatccacggtgtcgcgctcggcaaattgggccgcgccgaaaccacggacgaacatgcctcgtaccagtcgaccatgctcctccatgcgattcaataccggatacaacgctgagtagccacccgggatattttccttgtcaatcaccggctgcgcgatgacgccatacctgtccagcaacgtctcgaccagtgcgagtgcccgttcggtctggtcggtgtcttcggcttcagcttgcccgattacggcggaccacaaacctcctaacgtcatatccgtagtggctcggcgaatcggagcgacacgcccacgacgacgtgatgtagtggatttacgcgggcttgctgcgcctgcggttaatgcacgcaccggcgcgaagctggaattggtgaccttaccttgccagaccaagctccacaaggcatccttgaactgctgttcgctccactcttgcggaatgatttcgccggtgtttggattgatgtccggctccgcggtctcattccacgcacgtttggcggcatccatcagttgacgggcatggaacgctccccctgagtccagtgcggtcagaatcgcttccggcatggtggcgtctgaggcgttcgatgtcgtaccatgttccacaccgctgaacaatattgaatccgccggatagaaagcaacctcaccggggtccatcgcactggttcccccggtttttgagccgacccagaccacatcgccgctggtcagcaacttatccagcaatgcaggttggtagtctcgtactcgtgcggggaatactgccgactcccagagtgcagtgggcagtgatatgccctccagctgctcgataacgcgcatgagcccgtcagcaccttcatatcgttcgccgccgaccggcccgataccttgtcggtcgataagaaacatctggaacgcctctgattctactggcttgactgctttacgcgccttggccaatgagcgagaccgaatacggcggaatacgtccttatggagccactgttggccttgctcgtcatcatctacaaagtggccttgcagcaactcgcctttggcagccagcacatccagagtgtgcacggcatccgtagcatcgaggtgtagatcggctatgagctgatcggcggtgaaaggaccatgggttttggcgtaacgggtcacgcgaccagtcacatcatcgtcggcaagctcattccagaaagtgtgctcccccagttcctgttcgacttcgcgaatcacgtccgggttgagcacttgtgccatatcggtggtgccgagcaagcgttcgagcacgtgcggatcgagagacagcagttgcgcgctacgctcggcctgaggttggtcatactggtacatcaccacgccgacgaagccaaagagaatgttctcggcgaaaggcgatggcgactcggtttccacgtccttcacggtaatggtgccggcttgcaatccggtcatcacctcgttcagggcgggcatgtcgtatacgtcttgcaaacattcgcgcgcggtttccagcagcagcggaaagttcttggccatacgtgcggattgcaggagctgtgcggcgcgcagtcgctgctgccataggggcacgcgacggcccgggtcggatcgcggcatgaacagtgatcgggcggcgcattcgcggaatcgtgcggcaaatagcacggactcgcccacttgacgctctacatctgctttgaggtcttctgggtcgaaaaggaacaggtcttgagcaggaatatgtccgtcaccgtccggtagctgaatgacgataccgtcatcggcggcatatacctgcccgtcgaaaccgtagcgttggcgcagtctgcggctgatggccatggaccacggttcgtgaacgcggcggccgaaggggcttaacagcacaatgcgccatccgccgtcttcatcgcgtgtgcgctccacgataagggtttggtcgctggggactgcaccagtggcggcttgttgctcggagagtaggcgggccaagttggtgatggcgttggcatctaggccatcgtggtggagacgggtgaggattgttgggatgaaggttgggacagctggaccttctgcggcagacctcccctcagtccgcttcacgtctaatccggcggcgatttctcgggtgaagcgggctatggtacggctgaaaccgtagtcacggccagcgccttcaccgtgccagaacggcaggcgggcggtgcggcccggagccggagtcacgaccacacgatcacgggtgatttcctgaatctgccatgtggaggtgccgagcgtaatgacatcgcccacgcgcgattcgtagaccatctcctcatccaactcgccgacgcgacgctggcctttgccggcgtccgcctcaggcaggaccacggtgtacagccctcgatcgggaatcgtaccgccagaggtaacggccactttctgcgaaccgggacgggcggaaatcaggccattatcccgattccataccagtcgcggccggaaggccgagaattcctcgctgttgtattcgccggacatcatgccgattaccgcatcgaacatgtcacgtggcagttcggcaaacggcgcagcacgacgcactgtggcataccagtcatcagcgttcaaatcgtgcatcgcggcagcggccacggtctgctgggcaagaatatcgagcggattgcgcggcacggccaatggttctatatcgccggcaatcatggcttccagacttgcggccccagtgacaatctgctgacgggtgagcgggtagaacaatgcgtgagagacgccaccgacctgatgatcggcacggcctacacgctgcaatccggaggagaccgacaacggcgtatcgacttgaatcaccaagtcgaccgagcccatatcaatgccgagctccaaactggaggtggccaccacgcaacgcaattcaccacgtttaagccgttcctcaatcattttgcgacggtctttggaaaccgacccatgatgagccatggcgatgacatcatcgccctcatgtgagccgacaagcatggtggtggagccgaccacagcatcgtaatgcgtggagaacccttcgcggccttccggagagcccagatcccgcacagtgtcgggattggtgccatgccgggtctgcgcatacagatcgttcaagcgcgcagtgagtttctcagccacaccacgcgaattaacgaacaccaatgtagtgcggtgcgcgagaatctcatccaaaatactgcgttccaccacgggccaaatggaaccggaggtacggtcgcccgccgctccaaccaacgcggaggaatcgaacgcatcactcgcatcagaatcgtccccagaagtggaagaaacatctctatcatccaccggcacaatgcccctgcgttcagcaagtcgctgcatggccggcgtgacaccactgatatgcggagcggaccgttcagcatccacgccaccgacacgctgcttggcattcacggactgcaaatcacgcatgttttccaacggctcaatcatgcgcaaatccattgcaggccgcccaccgggattcacgatggtaaccggttgcccgccgcccaggaatcgcgccgccttttcaggcggattcaccgtagcggatagaccaatgcgctgcatatgacgatcgccacggccagcatcgacggcggcatcaccgccctcatcagcatctgcatcgattgcatctcgcttgcgcgattctgtgacaaggttctccagccgttccagacttaccgccaaatgtgcgccgcgcttggtgcccgccactgcatgaatctcatcgacgatcaccgtatcgacagtgccgagaatccgccctgccttcgaagtgagcaacaaatacaacgattctggcgtggtaacgaggatatccggtggatgggaggctatgcgtcgccgctcctgtgcggtggtgtcgcctgaacgagtggcgaccgcgatcttcggcacgggcagcccttgcgcctcgcattgtgcagcaatgccctccaaaggctgttctaggttcttggccacatcggccgcgagcgcctttaacggcgagatatacagcacacgcacaccggcacgccgcgtgcgtggcacggtcatcaatcggtcgatggctgagagaaacgcggccaatgttttaccggaaccggtaggggcgatgaccaagacattgcgaccggaatggattgccggccatgcctgagcctgtgcctcggtcggctgaccgaaggcatgctcgaaccacatcttggtgggttcggaaaacaggctcaggctttcgtacatatgtacgattataggtcagctgaagtaggcgatgacttcttcggcggtaccgtaggcactttgggcgccaagcttggtggccgcataggcggagacgtaggagccgatttgcgcggattgcagcagcgtatgaccggcggccaagccagccagcacggtccccatgaacgagtcgccgcaaccggtggtgtccactgcattgacttgcgcggcggatacgcgatgccaacgtccgttctcgatcaccaccgatcccgacgcaccaagcgtcactatcgcccggtcgaatccgtaatcggtgaatcgttcggcgacctcataccagtcgagtgattccacgtcatcatccggcaggcccagcagttgagccacttcatgctggttgaccagcagaatatccgtggcttccaccagttcgtgaggcagctcgtccataaatggcgagtcgttgagcagcacggtcacgccagcgtcatgcgcggtctgcgcggcggcgataacggtggcaatcgggctctccagacacagtcccaataccgcgcattcggcgatggtcgtgcgatgtgattgcacatagccggcacttgccttggcattggaacccggcgaatagacgatggtgttctcgccctcagcgctcacggtgattaccgtggcgccgctggggccttcgacatgcaggatatcggcggtgtcgacgccggcctcatccagcttgcttaataggaagtccgcgttggagtcctcgcccaccgcgcccagcaactggacattgacaccgagacgagcggcggcagatgcctgattcgcgcccttgccgcccggcagcactttcatggcaccaccattgacggtttcacctggcttgggtagtcgtttagtggttacggtgtaatcggcgttcatcgagccgaccacgattaccgagcccggcgcatccttcagcgctctcaatcgctcccgtacgggctcgggcatctgttcatgttcttctccacttatcaccatgggctccaagcatagtaggcgacgggcccaaatgcgcatatgatcagccgcgcaacttgcgaagacgctcgtgcatggccaccatcagcaccaagagcaccagcaaataccacgggtagagactgattgtcacatattgcgcgatgatgccgaacagtggcggcatgagcagtgagcccacataggcgcaggccatctgcacgccgacgatggcctgcgatttgtcttcgccgaagtaggccggcgtcgagtggatgacgcacggataaatcggcgcgcacccgaagccgatgaccaccagcccaacgaccacgccaaggtggtgaggcaatggcacgaacatggtgaggatgccggcgaacaccagcacttggccgaggcgaatcatgaccgggtccttgaatcgcatggtcagaaagccggaaagcgcacgacccacggtgatgcctacgtagaataggctggcccagctggcggcggtgatcttgtcgatgccgctgtgcatcaccatatagctggaggcccacagacccgccgtggattcgacggcgcagtagcagaagaacatcacgaggatttccttggcaccgcgaatggcgagcacgccggccacgccgagcggtttgcgttcagcaacagacgccccttcagcattaccacatccctcggcattgccgtcagatgatgcggcaccatcggtcgattcgccgcccccagtcgtgccacgtttcttccacagcggcaggctcagcaccaggatgacggtcagcatcacctgcaggatcgcgatgtaccgatagccccacggccagccttggccttgagacagcgcatagcccatgatgtaggggccgaccgatgcgccgacgccccacatgcagtgcagccagctcatatgccggctttcgtagtgaatggctacgtagttattgagcgccgcatccacgccacccgcgccaaggccgtacggtatggcgatggccaacagcacccagtaattcggggcaacggagaaacctgccaaggccgccgcagtcaacgccaccgaaacggcggtgaccttgcctgccccgaatttcaatgtcattcggtccgaaagcagcgccgagacaatcgtgaacatggaaatcaccgcggagatgccgccagcccacgccaccggcacgttcagatcctggctcatggtgggccatgcggacccgagtagcgaatccggcaaccccagactgataaacgccacatagatgacggcaagcaacagactggccatgttccatctcccattcacagtacggcaccggttgtgataacgatgtcatcagtctatcgaatgactcatgggcaacacgtataaaacatatgacaacgtgctcacctcaaacgccaattacggaaattctcggtaagcacgatgtcattatcagcgacgtcttcgatcaggtatcgatcttggagcggtcgaaatcgtcggcgttgtcgacgatgaactgcttgcgcggcggcacgtcgtcgcccatcagcaggctgaagatctcggatgcctgggcggcgtcctccatgcggatgcggcgcagcatacgcgtgcgcggatccatggtggtgtccgccaactggtcggcgtccatctcgcccagacccttgtatcgctggatgtcgtcgttgtatccgatgtgcttcttgtcgaggtcggccagcttgccggccagctcgtcatcggaatacgtgtagatatattcgcccttgtgcgagccggtcaacgcgatgcggtgcagcggcggcactgcggcatacacgtagccgtgttcgataagcggccgcatgtaccggtagaacagcgtcagcagcaggatacggatgtgcgcgccatccacatcggcatcggtcatcatgatgatcttgtggtagcgcgactgttcgatgtcgaagctctggccggagccggcgcccaccacctggatgatggccgcgcactccttgttggagagcatctgcgtgatcgacgccttctgcacgttcagaatcttgcctcgaatcggcagcagcgcttggaaaccggcgttgcgggcggccttggcggtaccgagtgcggaatcaccctcgacgatgaacagttcggccacgtcgtcattgcccggctggcagtcggagagtttggccggcatcgaggcggattcgagcgcgttcttgcggcgcgtgacctccttggccttgcgcgactggatgcgtgcgtgcatttcgccgacgatcttctccagcacgcggccggattgttccttgtacccgcgcttggagccggtgatcatctcgccgaattgcttgtcggtgagccgggtgacgatcggcttgacctgcgcggtgccaagcacgtccttggtctggccttggaactgaggttcggccacgcgtgcggtgaccacggccacgagtccggcttggatgtcgtcgcgctccaccttcatggcggagtccttcatgttcaccttgagcttgcgggcgttgtcttccaccgccttgcgaatctgcttggtgatggcgttcatgaaaccgtccacgtgagtaccgccgccgggcgtctccacgatgttcacgaagctcatgattgtggtgtcgtagccgttgacccatcgcagggcgatgtccacgccgcaggtgcgttcgatttcctgggcgtgcagttcaccgccttcgcccacggcctgggtctcctccttataggtgccctcgccttggatgcgccagatgtcggagatcggctcgcctttggataggaagtcgacgaagtccttgacgccgccggtgtgcaggaattccacgacgcgcgggtgcgcgggctgctcgccgaacgcgccatcgacgacctggtcgccggccgtcagcgagaagtcctcctcggacaggctctcggtactgtcggcttgagcctcggtggagtcgtcgaagagttcggcatcgttggacgagacgtccaaagccggggcctggtcttgcgcaggttcgactgcgtcggcatcaatggcttcggcggtgtcagtcgccgtttccggtacgttttcgtcaacaatggtgattttgaggccgggcaccaggaagctggtctggcgcacgcggtcgatgagctgttcgtatgagaattcggcggttttgttgaaaatctccggatcataccagtagcgaatacgggtaccagtggttttgggagataccttgccgatgatttccagctcggtgggtcggttcttgcgagtgcgcttgaacggggaatcgggagacggattggccgggtcggcatccgtgtatacgccagggtgaccttggtggaaggtcatgtggtgcgtcttgccgtcacgatccacttcgacgtccagtcgggagctcagggcattgaccacggaggagcccacgccgtgcaggccaccgacggcgttataagacgagttgccgaacttggcaccggcatgcagtttggtcagtacgacctccacgccggacaggccggttttcggttccttatccaccggaatgcctcggccattgtccgcgacttccacggaaccgtcggtgtgcagggtgaccacgatatcgttgcagaagccggccaaggcctcatccacggagttatcgatgatctcccacaggcagtgcataagaccctgcgagtcggtggtgccgatgtacatgcccggacgcttgcgcaccgcatccaagccctcaagaacagctaggtccttggcgccgtattcttctttgggcatacagtcctatttttctcttcaaatgcttggctcccctcacagaggggagccagatgatcattgatccaggaagtcgcgcagggtctgcgaacgggacgggtggcgcagcttggacatggtcttggactcgatctgacggatgcgttcacgggtcacaccatacacacggccgatgtcgtccagcgtcttcggctggccgtcttcaaggccatagcgcatcttgatgacgccggcctcacgcggagacagggtttccagcacctgcttgaactgttcctgcagcagggagaaggccacggcgtcggacggagcgatggcgtcggtatcctcaatgaggtcgccgaactcggaatcgccatcctcgccaagcggggtgtgcagggaaatcggttcgcggccgtacttctgcacttcctgcaccttctcaaccggcatgtccagctcgcgggccagctcgtccggcgtaggttcacgccccagatcctgcagcatctggcgctgtacacgggacagcttgttaatcacttcaaccatgtgcacaggcacgcgaatggtgcgggcctgatcagccatggcacgggtgatggcctgacgaatccaccacgtggcgtaggtggagaacttgaagcccttcttccaatcgaacttctcgacggcacgaatcagaccaaggttgccttcctggatcaaatcaaggaagagcatgccacgacccgtgtaacgcttggcgagcgagaccacaagtcgcaggttggcttccagcagatggtccttagccttcttgccgtcggcggcggcccacttgagttcacgcttgcgcttgaactccatgccttcactttcggtgtcgagcaggtgctgggcgtacaggccggcctcgatgcgctcggacaggtcaacttcctgttcggcgttcagcaggctcacacggccgatctgcttcaggtagtccttgaccgggtcggcggttgcgccggccgcgatcacacgacgcttcggattgcccgaagggatgatgttctcttcctcatcatccgtgtcggagaccacgtaggcacccttttccttgggctgctcgggtgccttggacttggcttcttcctcgtcctcgtcgtcttccacatcgtcgtcgtcggcatcgtcctcatcgaggtcttcgtcgtcggcatcgccttcgtcaacgtcgtcaagatcctcgccgaggtcaacatccaaatcgtcgtcgttgacctcggcatcgtcatcaagctcgtcatcgacctgagtgtcctcgtctttgacgagctcatcgtccttggccttcttcgcggttttcttcgcggcggacttgcgcgtggtctttttcgagggctctgcggacttggacttcttggcagaagtcttgcgcgcagtggtcgtagagctggccttcttcttggtctcggtctcctcgctggactcggctgtctgcttggttgccgtcgtttccttcgtggccaaaactgctccttctgatctctcgccgtgaagtgcatataccacacgggcccacttctggcaagggcaaatcgtcaactatgtgagtaaaccaccctccacggacgattattcccacatcgttgcccgacgtgttgccgatcaccacacgctttccttccgcgcatcgcgcataaaacctcggaaatccgccgtttctgttcattcagcccgagcaccatgccggtgccacgcctcgatcggcggctgagaatatcatcgccgccagcgaacaatcctcatcgagcagcaggcatcgcaaggcgaacaccattgctcgcggatcgcccagccaccataaggtgtaggcgattacggccaatggttgtatgcagtacggcaccggtgaggcttcggcgatatcgagcaacataccgatgccggcatggcaacgctccttatccggcatcatgccttcatcctcgaatgcgcaagtcagcagctcgcccattcgtgttctcgtacgcgccagatgcggtcgcgccgcgaattccataagccatgacttggggcaacggctttcatcaataaccaacgagagaatcagcgcatcacgaatcgataaggtctcacgcatgcccaccgcaaacgcggccatcgtctctcggcctaggtcggtgttcccggcatcaagacaagacagccattcgtccaatggttcggccacccagtcggcattagcctgttgcgcgcctcgaagtcgtcgatcattgcgaaattcctgtgatctcgtctccaactcgtcaaagacaaaaggctccgtctgttcggcggcgtgccgtttggcgtgtcggctcttacgcggcttgtgcggcgtgttgttgttcatcatgtcctccttgactaatggtgtgcaatctattggtgttgtggtgcgcgccgagccggatagctcatgcgccgagggggtgtgtgcccactatggctgaaaacgccgtatgacgcaggaaaaaacgaccattgtggttctagcttcaaaacccttgattcccaacgttcttgtgttcttcaaaccctgtggataagttattaggcatgtgcacaactgctaacaaccgcgaaatcatcgagccacgcatcattcagttggtgcgggaactgactgccgcccccgccaccgacgaggttgccgacgccctgaaaccggtgatggaacaggttgtggaccaagccgcctcctccagccaaggaggcaaacgactgcgtgcgctgctcgcgttggacgccttcgatattcttgccggcgacgtgacgcctgatcggcgtgacgccatgatcgacctggcctgcgccattgaagtgtttcagacggccgcactggtgcatgacgacatcatcgacgaatccgatctgcgccggggcaggccttccgcacatcgtgccttggaacaggccgtacacagcggtgccataggccgtggcttgggcctgatgctcggcgacattctggccaccgcctgcattgaaatcacacgccggtccgccagccgtcttcccaacaccgatgccctgaacgaggcgtttcttaccatgcaacgcgaggtggaaatcggccaggtactggacttggccgtcgagatgaccccactgtccaatcccgaagctctggcgaacgcctcattgaacgtattccgctggaagacagccagttacaccaccatcgctccactgctgcttgcactgctggccgcaggagagagcccggatcaggccaggcattgcgcgttggccgtcggccggccgctcggactggcgttccaactggcggatgacctgttggatgtcgtcggatcaagccgcaataccggaaaaccagttggcggagacatccgagaaggcaaacgcacagtgctgttggctgatgctctgtctgcggcagatacggcggataaggccgatctgattgccatcttcgaagaagattgtcgcaatgacaaccaggtggcccgcaccattgaactgttcacgtcgaccggtgctcttgatcgatcccgcgagcgcatcgctgccctatggggtgagtcccgtaaggcgattgccggtcttgagctgaattccgaagcgcaacgccgtctgaccgaggcttgtgcgcgattcgtccccgaatccttgcgatagtccacaatgcgagccgccggaccatgagaccatgaacaccggtgaaaacccgtgaaagctatgcgctgatgctccggccgcgtaaccggggccatgtacactgaacatgtttagtcgtgattaaaggaaccgtacgatacaacatgagtgagaacgagcccgcacagatgattgagggacgctaccgcatcgtgcgcaatatcgccgagggtggtatggccaccgtgtatgaggccatcgatgagcgtctggggcgcaccgtggcgattaaggtcatgcacacacaactcgccaaaggcccgcatcgggagcagttcgtcgaacggttccgccgcgaggccaattcggccgcgtccatcgccaacccgcacatcgttcaggtgtatgacaccggcgagttcaatggacttgattttctggtcatggaatatgtgcatggcgtcaatctgcggcatgagatgaacgcccaaggcacattctccgtacgtgagacgctgcgcgtggtcgcggagacgctggatggtctggcttccgcacatcgcgccggcgtggttcaccgtgacatcaagcccgagaacattttgatcaatgatcgcggccatgtgcagatcactgatttcggtctggccaaggccgccagccaggccacattgagctccaccggcatgctattgggcaccgccgcttatctggctcccgaaatgatcgagaacaatcaggccaccgcgcaaggcgacctgtattcggtgggcatcatggcatgggagatgctgaccggcaaggtgccgttcgattcggataatccggtgacgcttgttttcaagcatgttcatgaggacgtgccgtccgtggccacggtctgtcagggcattgatccgtccgtggcggcgttcatcgcccatctgaccgcgcgtcaggtggatgcccgccccaccgatggcgcggcagcagctgaggaattgagccagttggccgccaaattgccgctggaggcgtggcaataccgtttgcatgccgaacccatcggaggtgatcataccgatgccaccgctgcagcgctggtaggcaatatcgccgagcaggccccgctgaccggcgtacctgccggtgcagcaacgttcaagccgtccgtaccagcgtttttggccgatgatgtcgcaagcaataccgtcgataccggtggcgccgcagacgtcaatcctccggctcctccggtcgcccccaccacggcacttgattcgtcgacgccagccgatgcttcggctccccataagacgcaaatcatggcacagtccggcagcgagacacaagtgctgcctcaggccggcgatgccttcacccgagcgcttgccttttccgatgagccggacgtcgcttccaacggcaccgggccaaagaagcagcgcagcaaaaaaccgctcatcatcgtactggtgatcgtgctggtactggctgcaatcggcggaaccgccggctggtggtggtttgccggaccgggcagctattggagtgtgcccaagccggatgacgtgacctgcgatgcgaatgcaagcaccgaatgctcgttggccggcgcggattgggccacgtatgagagcacgttgaaggctctcggcatcccctacaagacgcacaaggaatacagcgacgacgtggcggaaggcaagatcatctcttcttccgtgaacaagaccaaggccgttgtgaacagccgcataagcaagcgagccaatcaggagcttacggtggtggtgtccaagggcgtgcggatgaccaccatcccgaaggatattctcgacgcgaattcggccaatggcaaggacccgttgaacgcgctcaagaaggccggcttcgataatgtcaagcatgacgagtcgaaggatgagtattcgatggacacgccgcagggtgtggcattgacgatctcccctgatcccggtaccacggccaagcacaacgatgaggtgacggttactttgagcaagggaccgatgccggtgaccatgcctaacatcgtcggtaagacccaggatgagatgcaagccgcgctcggcgagttgaagctcacggccaatgtcaccgaacagtacgatgacaaggtcgaggccggtcaagtcatttccgcgtctcaggaagccggagcccagctgaagtggggcgatagcgtggacgtggtgatttccaagggtccggagatggcgacgataccgtccggccttgtcggcaaacaggaaagcgccgtaaccaagacacttgaaggtctcgggttcgaggtgaaaaccgacaaggtgctcggtggcctgttcggcacggtacgtaccgtgaaaagcggcgatacggacctctccaacggcggcaagattcgcttgcgcgacgccaacggcaaccccaccgtcatcaccctcaccatcgtgtgagagtaatcaactggctcccctcgctgaggggagccaacacatatcattcggcttcttcggcggcctgttgggccttgagctcggccttgaccttctgggcgtattcgttcacgaattcctgaccgctcattttctggattgcggtggaaacacgatcggtcagcgaacgcaaatcatcatgtgtaatttcattagccggcttcttcgcaacctcaatcggcttgccatacaacaccttggtcttgcccttcttgggaatcgacgtgccaatcggctgcagcttgtccgagccgatgatggcggtcggaacaatcgggcaaccggtctcgagcgcaagtcgtgcggcaccggtgtgtcccttgtacagtcgaccgtctgggctgcgcgtgccttcaatgtggataccgaacaggtgcccatcctcgataatctcgcgtgcatgctcgagtgcgccaagcgacttgctgccaccggaacgatcaaccgggaacacgcccacggacgtgaaccaccacttcttgaacttgcccttcaatcccttgccctcgaagtattcggctttgcccatgaagtgcaccatgcgcgggcaggtaatcggaatcaaagcatcgtcaatcaccgccagatggttggctgcgataatcgcgccaccctctcgaggcacgttattcagtccgctgacagcagggctcaaacgatgatgagcaatagggccgagacctttgacgaagaaccagtagagcacttggcattcctcccgcagacgaactagccattggccggtcgcctgattagagtgacagttatgactgagaaccagaatagcaatgccgacggagagcggccaacccccacgccgggcaacggacaggattccgatacttcgtccaagtcgtcgactcccggtgccgccggaccggccacgaatggtgccgatacaccgcaatcgcatgacatgaacgatttggatgcggcgtgggccgcgttcgaagccgagcatcaggccgacttgcatgacgtggcttcctccaggcaggccaaaaagttcgagaagcaggccaagaaacgcgagaaggaagcactgctttccgtagatgacttggatatcggctcgttcaccgatgatgctcgcccgagccgtggcggcaaaaaaggcaagcagtcaggcccccgtgatttcaccggctccagctggctggataccgataatgtgatggacacctatgatgatggcggcttcactcccccgaaccctgatcttggtccggtcaaagcgtctacggtactgctgacggcgttgcttatcattggtctcgtaggcgaagcggtgatgatattcgtccccggcttgaacgcgattcctctcttgggcgcgctgctcaatattctcttcgggctgggcgtcattttgggcttgggtggattggtggccaaaattctcaaccgcaaagaccgccccggtgatcagggcggctattacgacgacggcgcgagggtgtagctcgcgtaggctgtgtggtccttggctcccctctctgaggctgagccgttaagcgaacagcccagtgggctgtttgtaggcgaggtgtgagagatagcgaaccaatgtattgcgggcgtgtctcgtccgtaattgcggtcgagccacgataggtcacgaattgaagtcgatggactcctgtaactcggcaatcatggccttgatgcgggcgtcgcctccccaccagttgagacggatcgtcacgtcccctttggccggcacaaccggcacatcagcggcaccaaccgaagtgccgcgcgtcgcagtcacgcacaaggccacggccgccataacagtcgccatatagacacataagcccccctcatcagaggaggctgagtacggtgtatcacgccttggacttggcggtttcgatccacttgtcgaacagggcttcggccttgccggaatcgacggtttcctcggccagcttgtaggcttcggcgaaacgctcggccagtgtgccgttgccgaccagattgccgtcggccacgatggcggaggcggcgttgagcagtgcggtggtgcgggacggaatgtccttgccggccaggaagtccttgaatgcgttggcgttgacgtccggaacgccgcccttgagctgttcgacggtaatcttggccaagcccagatccacagtcggatcgaactcggactcggtaaccttgccgtcgcgaatctcccagacggaaaccgggccggtgggggcaagttcgtccatgccctcgtgggaggtgtagaccaagccagactgtccacggctggcgtacacggctgccataatcgggctcaccttgcggttggcgcagccgatggccacgtgtgctaggttggcggggttggtcagcggccccaggatgttgaagacgcacgggatgcccagcgcggcgcgaatcggccccacgaaacgcatggccgggtggaaagtgcgggcgaacgcgaaggtgatgcccacctcgtcgcccacttcgccgacggcttccggcttcagatccagcggcaggccaagggcttcgagcacatcggcggcaccgcacttcgaagatgcagcgcggttgccgtgcttgacgatcttcacgccggctgcggcggcggccacggagcccatggtggacaggttcacggtggcgaagccgtcaccaccggtgcccacgatgtcggtggtcccaccggaaacgttcagcggcacggcgtgggagaccatggccttggcggcaccacgcacctcgtcggcggtcagtcccagctgctgctgcatagcgagcgcggcacccacggcggccggattggcgttaccttgcatcaggtcgtccacgaaccactccgattcctcagcagtaaggtggtctcccccgaccagcttggtgagaatcgacttccatgtgatctcggccatgatgccctccttggcgtttcctacgccgtgtgatgtatgttcgccgctcattgtaatggttcgtcatttcaaggccctgaatcttccatattgcaaaatatggcgctattgctgttttcgtggatgtcggttcgtcgtcgagccgttggtttcgtaagcgtgaggggcgttcccgcgtattctgttttccgaccaaagaaatgaatcacgaagaacgcctgggcaaaagcccactcaccggattgccgaacgtcaaaggcacggttgcagaggatgcgcggatcacggattcgccgccgcgttccgaacccgtgctcgagatccgggtgcgtccacgtgcgggtatgctccgatgctcccgatgcggaaggaggtgccgcgggcatgaccagggcggcggcgtgcggcgtcgtggtcgcttccgtgccgtgggccgagccgggcagccggtccacacgcgatttcgaatcggaacgcgcgtggccgatgagcgtcgcgaaccagaagaccgtaagcggttttccgcacgtcgcgtggcgcgccgccggaagacgccgcccatagggtcgctgaacggttgaaagcgtcgatgccgtctccgttcggcggcctcacgtcgatcggcgtggacgagaccagctaccgcaaaggccacacgtgcatcaccgtggtcgtcgaccacgaacggcatcgggcgatatgggcgcacgacgggtacggcagggacgtgttcggcctgttcttccaaacgttgacgcccgaacagcgcgcctccatcagggtcgtcgccggggacggggcccggtggatcgactcatgcgtgcatgagtggtgcccgaacgccgaacgcgcgcccgacgggttccacatcgtcagttggacgagcggcgcgcccgacaacccacgaaaacagcagaagcctcttttttgtgctatcccgtaaaactgcgggacggcagctcattttcgccgtttgagccgtgccgtcccacatcaccctttgcggaccgtgacaccataacaccgagaatggcggaatttcaacgattccgtaattcgtactgcgggacgccacgctagtcaatcgattgacactcgtgccatcccgcaacagtgtgggatacgacgtcaaaatccgcgaaaatcgcgtgccgtcccgcgcgtacggcaccgcacgaatacatgctgatgaaccgcatagaaaatggctccccgtgtggggagccatgagctagttactaactagcgatgcgtcacttctcgttctggccgtggcacatcttgtacttgcggccggaaccgcacgggcacggggcgttcttgccagtgccagggaaggtgcggccgtcggcccacggcgtcttgagctcttcgctcttcggacgcttggaaaccgggaccttgccttcggcgtggctgatcggagccggtccggcaacaggcagcgtggactcgccggccccggaggcggctgcggattcggcgatcgcctgcttggcgtccgtatcctcgtcctcttcctcgacttcgccctcggcggcctcgaccacggattcgccgttctcgtcggggccggaggccacggcgatggtgtcggcgctttcggcggtctcctcgacctcgtcaacggcctcgtcggtggtggcgacctgcttgatgtcgatgtggaacagcagctggacggtctcctccttaatggcctcgatcatggagttgtacatctggtagccttcgcgctggtattcgaccagcgggtcgcgctggcccatgccacgcaggccgatgccgtccttgaggtaatccatctcgtaaaggtgctcgcgccacttgcggtcgagcacggcgagcaccacgcggcgttcgagatcacgcaagccggtctcgccgatggtctcctccatttcgccgtactgctgcctggcgtcctcgacgatcaggtcgcgcacggcctcgacggccttcgcacccttgaggccgccgacgatcttcctgacctcgtcttcgtcgaccttggtggggatcacggtgttgagcgccttgaacaggccctcccaatcccagtccttcggtttctcggatcccttgttggcacccttgatgtaggactcgacggtgtcggaaatgaaacgcaggatgtccttgtggatgtcttcgcccttgagcacggcctgacgctcggagtagatgacggtacgctgcttgttcatcacgtcgtcgtacttcagcacgttcttacgaatctcgtagttgcgggattcgacggccttctgtgcggtgcgcacgcccttggtcacggacttggcctcgatcggctggccttcctccatgcccttggccatgacctgggccaccagctgggtgttgaacagacgcatcagatcgtcttccagcgacaggtagaagcgggactcgcctggatcgccctgacggccggaacgaccgcgcagctggttgtcgattcgacgggactcgtggcgctcggtgccgagcacgtacaggccgcccagctccttgacctcctcatgctcgtccttgacctgggccttgatctcgttcagggtgcccggccaacgcttctcatactcttccggggtgtcctccggagagtagccctcggacttcagcttggcgtcggcaaggaactcgacgttaccgccgagcatgatgtcggtaccacggccggccatgttggtggccacggtgacggctcccttgcggccggcgacggcgaccacggcggcttccttctcatgctgcttggcgttcaggacctggtgagggatcttggccacgtcgagcagggtggagaccacttcggagctttccacggaagcggtaccgagcagcaccggctgacccttggcgtgacgcttggccacgtccttgacgatggcggccagcttctccttcttggtgcggtagatgaggtcgtcctggtccttgcggatcatcggcttgttggtcttgatcggcagcacgcccagcttgtaggtgttcatgaactcggcggcctcggtttcggccgtaccggtcatgcccgcgagcttgtcgtacatacggaagtagttctgcagggtgatggtggcgaaggtctggttctcggccttgacctccacgccttccttggcctcgatggcctggtgcagaccctcgttgtagcggcggcccggcaggatacggccggtgtgctcgtcgacgatgagcacctcgccctgggtgacgacgtagtccttgtcacgcaggaacagttccttggccttgatggcgttgttgaggtagccgatcagggcggtgttggccggctcatacaggttgtcgatgccgaggaagtcctcgaccttggtgatgcccgggtccaggatgccgacgaccttcttcttctcgtcgacgtcgtagtcctcgtcgcgggtgagcttcagcaccagcttggcgaactgacggtaccagcgggtcacgtcgccttcggccgggccggagatgataagcggggtacgggcctcatcgatgaggatggaatcgacctcatcgacgatggcgtagtggtgaccgcgctgcacgaggtcggccttctcccatgccatgttgtcacgcaggtagtcgaagccgaactcgttgttggtgccgtaggtgatgtcagcgttgtactgcttgcggcgctccggcggcttctgctcggtgatgatgcagccgacgttcatgccgaggaaacggtagatacggcccatcagctcgctctggtagctggcgaggtagtcgttgacggtgaccacgtgcacgcccttgccttcgagagcgttcagataggtgggcagggtggcgaccagggtcttgccttcaccggtcttcatttcggcgatgttgccccagtgcagggcagcaccgcccatgagctgcacgtcgaagtgacgctggccaagggtgcgcttggagacctcgcgcacggtggcgaacgcctcgggcatgatctcgtccaggctcttgccgttttcgatttcctgcttgaacttcggggtttgggccttcagatcctcgtcagagagggcggagatctcgtcctcaagagcgttcacggccttggccacgttctccagcttcttgagctggtggccttcacccattcgcagggctttgtcaacaatatcgaccactgggttctcccttgactgataagtggtggtgtccgcgtaccagaatagcgcctcgcaccgtcagcagtcgaatttttcgaccttcttacgaaaaaatggaccgcctccatattggaagcggtccatgcggtatcagctgatcgtgtcagcagcccttaccctcaggctttcttgacattctccggagtatcgatttcgaacacgccgtagctccaaccgtgacggtggtagacgacggacgggcgtccggtctccttgttcacgaacaggaagaagtcgtgtccgatcagttccatctcgtacagcgcctcgtcgatgctcataggctcggcgatgtgcagcttgcgacggatgacaatcggcgtatccccaacctggacctccacggattcgccagggccaagatcggaggcgaccgcagcctgcgggctgttgttcggctcttcctccgacacctccggctcgggctccggggcgataacacccagatccaccgggaccgggttcgcgtaaccacgacggtgatccttgcgacggtcacgagtacgacgcagacgcagcgtcaacttatccagcgccatgtccagcgcactgaattcatcggtgctggaagcctccgcacgcaccacggtacgtccggcgataacggtgatttccacgcgcttggcggtatcggcctgacgcgggttgccctcatgggtcagcacgatctgcgcgcgctgagcatccggggcgatagcggtcacacgattcatcttggtctcgaccacatcacggaacctttgcttgacctgcgtgtggcgtccggtaacgacgatttccatgttgacctcctctaactcaagcggtgtaacccgctatatgtgttccgaacggcatcatcaccgaccgggtatgtttcattgtagacgaacaatgggtgaacggccggaaactcgcccagagaatatatgtttattcccgggcttttctctgcaatgaaacgatgtatatactggggttttggcagcagtctcctataagaagatttgataccggtttatcaggctggctcgtttgttcgtcatggtaaatactgcaatggataggcagcgttttcttgctctttctcgcacataccaagctcttacagatttgattcgtctccatacgacacgccacaacacgcccgacacgccccatccgatattcggcgcgtcgttcacgaatcgcccaactatgcccaactatggagaaaacaggataaccgggcaacgtcatggcctcaccgcagggcgggatgccgccttttccgcaccttatgtataattgcaagcttgagacctcttgatggccgcggccgtgatcttcattgggatcggctgaggaacttccgggctccatagagcacgatggcggataacgtccgcccagggtgacctgagagatagcgcaacagagaacagaccgcccgtcctcgacgggtaagggtgaaacggcggtgtaagagaccaccgggcctctggtaacagtaggtcgcatggcaagcctcatcgggagcaaggccaagcagatggcggtaagggctgctcgcccgtgtcatcgggtaggctgctagagcctggcggtaacgtcaggtcgagatggatggccatccgtgccgtgcgttcgcgcacggcacgacagaacccggggtataagaggtctcatttttttcttggctacaccaacaatgcggcggcgactcgacggagggtttcggggctgtggcctttgcggccgccggcggaccaaagccgacgctgacggacccgacgatcgaggccatgggttttgcgggctatttggcggcccaattcccatgcggcatcttcaaagatgccattttgttcagcttcgtcacacacctgttcagccagcttgcggtccacacctttgcgagcaagttccatgaccgtaccacgacggcccatcatgcgaccggcacaatagcgtacggccgattcggcataagcgccgtcgtcaatcagttgcacgcgaatcagccgttcgatgacctcgtccacgatcgcctcgccgtaccctttggcaagcaatcgttcgcgtaacgcaccggatgcacgcggggccgcgtccagcaaacgcaatgcagcctcgcggcaagcgtccaaatcattgggatcttcgacaacggcagcgtctctcccccgtcgagaaaaacgtcccgacggtttcgactgaacatgctgctcggcaatgggcatgtcttgcgacgcaacaggattgcgccgcaagaacgcttcggcactaatcatgttcaggccttagctgtgccggccttggcacgggtcgttttggcagcaggcgccgctgcggccttgctgtccttggccacgtcagccgcagcagcctcgctgacggcggccgctgctgcggcttcgccatcttccgcgaactgatcggcggaaccgatcagaccgaactcggccttgaccttgttctcaatctcctcggtgatggccgggttgtccttaaggaactgacggaccttctctcgtccctgaccgagctgatcaccctcataggtgaaccacgaaccggacttcttgaccacgccaacctgctgggccatgtcgatcaccgagccctcacgggaaatgccttcaccgtagagcatgtcgaattcggcggacttgaaaggcggggccatcttgttcttgaccaccttgacgcgcgtgcggttgcccaccgcttcgtcgccgttcttcaaggtctggatgcggcggatgtcgagacgcacggaggcgtagaacttcagagctttaccaccggtggtggtttcagggttgccgaagaacacgccgatcttctcacgcagctggttgatgaagatggcggtggtgccggcctgagccaacgcgccggtcatcttgcgcagcgcctgactcatgagtcgggcctgcaaaccaacatggctgtctcccatttcgccttcgatttcggccttcggcaccaaagcggcgaccgagtcgatgacgatgacgtcaagcgcaccggagcgaatcagcatgtcagcgatttcgagggcctgctcgccgttatccggctgggagacgatgagtgagtcggtgtccacgccgagcttgcgggcgtaggccgggtcgagcgcgtgttcggcatcgatgtaggccgccacgccgcccttcttctgggcattggccaccacatgcaatgcgagcgtggtcttaccggatgattcggggccgtagatctccacgatgcggcccttgggtaggccgccgatgccgagcgccatatcgagagccaacgaaccggtgggaatcacctcgacgttctgctcgggctggtcgcccagtcgcattgcggaacctttgccaaaactcttctcgacctgcgccagcgcggtgtccagcgccgccttgcgcttgggatcgagctcgtgcttgtcctcggctgccgggtccttggccggcttggtctcaagtgccatgatcttctccttgtcgaagtcgtgtgcgaatcggatgcctccaccgtatgacggacatgccatgtgaggcaatccaaaccaaccattgtggttccagcttgcccgagcttggccacctggcctccttaaaccctactgcggtaaggattatggcagatggcaagcaccctgtgcacacgtatgcggcttcttgtcactgtggataactataaccacacacacgaacatttgttcgaatttggcgtgcaacacgccgaaatcgccaatttcacgattcagcgactccgtaatcccgcagtgtcagacggcgggcatgggcggcgcgttatgatcgtggccccaacgcttggagtccggaacctccatttggtcgcagagcacattccagaccacgcgtggctcctcccccgcgtccagcgcctcgaccacggtcatattcgccagtttgggcatccgttgatcacgcgacagcgaacgaccgtaggtccgaccgaacacctcttcaagtaattcccagaattcccgttcacgcatacacgccagtgtgccaccaaccgcaggacagcaaaaacccgcatcgccacaagcgatacgggttcacagctagacatagattacgggacgcggcttcacaccgccaaccgatcagccctcgaccgagtcgagataatcagccaccatgcgcagcatgcgcgaagtggagactccgagcgcatcggcgatggagctcagcagttcggagctggcttccttctgtccacgttcgacttcggaaaggtagcctagcgaaacgcctgccttctcggagacttcacgcaacgtgcggcgatcgcgcgtgcgcagctcgcgcagcacatgaccgatagcaccacgcagcgaaaactcgcgaggctcctcctcagccaccacgggctcggcggcggcagtcggcttgtacgacggcgaatcctcatcccacatacgttcacgaacggcttgacgctgatccttggccttcttggcggcctgtgccttgagcacctgctgctgggcgaacatcaccgcacggcgctgggccggagtcagttcacgcatacgggcgacacccggctgcacagccatcggcttcttggcggccacatccatctgttcgttcactcgggtcatcgtttccatcgccatcgccccttcccaggtcggttcagtgtttccactatgtacaacacgacaacccaacggttttattccttaaaacttgctgtgaatagactcaagttttgcagaacgtggaatacggtgaggcgacgaatctcttcgcgcatgccatcaagatggagttcgacggctttgagcacttcggcatggtccggggtgaggcttgcggggatgcgcaggcccacatacaccagtccggccggcttgtcaccgtccggaccggggccggccacgccggtggtggaaaggccgatgattcggtcgccgtattccggctggctgtataggcgagcggtaccgacggccatctgccgggcgacttcggggtgtacggcgccttctcgatccaatagggccttgtccacgtgcaggatcgaggccttggcattgatgtcgtaagtgacagcggagcccaacaacacgttggaggcgccgggaatacgcacgaacgcatcggcaagcaggccaccggtcagggattcagcgcaggcgattttcgtattgttcgcctcgcagatcttgaggatgccggccgcgagactgtcgcacaattcccgcattggaatatccgtcacttccgcttcggggcgacgaacgtgttgtacaggtacacggcacccgagtagaggcacaggaccaatgccacgtagatgatggcgtaggtcaggaagtagtaagcggtcatccagaacggcgtggcttgtccgttacccagagaccagaacggcagcagcagcatggacagacccacgcactggaatacggtcttgagcttgccgggccatgcggcggcgatgactttgccgcccggacgctccatgacgaagaaacgcataacggtgatgccgatttcgcgaatcaggaacaggatggttacccaccagccgagctcgccgaacgcggagcatacaatcattgcgccgcaagtgagcagcttgtccgcgatcggatccatgagcttgcccatttcggtgacctgattgtatttgcgggccatccaaccgtcgattttatcggtggacgcggcgatgatgaacagcaccgcggcgacccagcgcatggtcagattgttctcaccccaggcaccggcgagaatgtcgagtgtcaggaaaaacaccacgagtacgatgcgcgagtaggtgaccaggttcggcggcgcgttccatccgtcgaacagcgatgatttgggcgatgactgcttgtccattgtgttctcatccatagtgttcacgttacccccacacttctaccttgagtgagtattggctggatattgactgccattattcgggaatcaggttgcgtgctgatggccgcgtggccgcgcttctctctccgccccttcggggcacctccctcatcagaggaaggtcggtgggtgaattattcgccgagttcgggctgttgcggggcggtggcttcgagcgagctggtttcgcctcggatgaaggcgagcacctgcggcaggtcctgcggctggacgagcacttcgcgggccttcgagccttcggacggcccgaccacgccacgcgattcgagcaggtccatgagtcggccggccttagcgaagccgaccctgagcttgcgctgcagcatcgaggtggagccgaattggctggtgaccacgagttcggcggcctgcagcagcacgtccatgtcgtcgccgatctcctcgtcgggctccatgctgtctttcttttcggcttccttggccatctgttcgatgtcttcgcggtatttcggcttgcgctgggtgcgcacgaactccacggccttgcgaatctcggattcggacacccacgagccctgcacacgaatcggcttggcggaacccatcggcaggaacaacgcatcgccctgaccaatcagggtctcggcaccgaccgtgtcaagaatgactcgcgaatcggtggcggacgaggtggcgaacgccagtcgggatggaatgttggccttgatcagaccggtgaccacgtccacggacggacgctgggtggcgagcaccagatgcacaccggcggctcgtgccagctgggtgatgcgctggatggagctttccacatcgttcttggccaccatcataaggtcggccatctcgtcgaccaccacgaggatgtacggatagggggccaccttgcgctgggagccggcgggcgcatgtaccttgccggcgcgcacggcctcgttgaagtccttgacgtggcggaatccgaagaattcgaggtcggagtagcgtgcatccatctctttgaccacccattcgagggcctgtgcggctttcttcggatcggtgatgatcggggtcagcaggtgcgggatgcctgcgtaggcggacagttccacgcgcttgggatccaccatgatcagacgcacctgttcgggcgtggcacgcatgatgatcgaagtgagcatcgagttgataaaactcgacttaccggaaccggtggcaccggccaccagcaggtgcggcatcttggtcaggtcggcggtcacgaagtggccttcgacgtccttgccgatgccggagagcatcgggttcgggtcgcccacggccttgtcggagcgcagtacgtcgcccaagtgcacgatttcgcgatcctcgttcgggatttcgatgccgatggcggacttgccgggaatcggtgaaaggatacgcacatccgaactggccaccgcgtaggcgatgttgcgctgcaggttggtgactttctccaccttgacgccggggccaagctcgacctcatattgggtgaccgaggggccacgcaggaagccgacgactttggcatccacgttgaactgttcgaaggtggaagtcagcgcccggatcacgcgatcgttggccggggtgcgcatcgcatggggctggcctttggtcagcaggttcaggtcgggcaactgatacggcctattggcgtcgtcgtctgtatcgttgccggcggtggcattcggctggccgcccgtattgggcacgccctggccgactccgctgccgtccgcatcggcacccgcgtaggctccggtcgcggctgccgcagccgcggcaccggcggctccggccgctcccatcgcaccggctgcccctgcgagcgcgacagtaccggcctgggcggcactgggtgcccacgggtcgtctaccgctcccccaccgggcatggcgacggtctggccactggtgatgacgcgggttcgggaagcgtcgccatcatctgcatcggcagcaggcgcagggctggataggtgcggacggccgtcgtacgaagacgatgcaatggttcgcgcaccgataatctcgccggtcatcggatcgaccaccggggtttcggcggtggcaccatgctggctggcggcacggtcgaatggatcgtcggcagcatacttgtcaagagttttgtcgtcttcggtcttggatttgcggccgaacagtcgtgcgaacaggctgggccgtgcatcgccggcctgatcgttgtcgcttccgtcatcgtcgccgtcatgcgagggaacaccgtcggcaaaggcgagagtggtatctcccacacggacctcgttggggaactggctggcgctcccatccgtctcctggcccatcggcacatacggtttgcgttggattttagcggcgattttgcgcgcatcctccggcaaatcggtgacgtgggtgccggtaatcatcagcaaggagaacaggccgacgaccacgaaaatgatgatggcgaacacgttggaaaggccccaggcgagcggtgagccgaggaagaagccgaacaggccgccggcggattgcagaatcgtgatgtcgaatccggtgtggtcggcggcgatcgccacgtcgatgatcgaacaaatcgaccacatgagcagcacccaaccggtgaccacacgcgggttattggaccctttaccggaattgcgcatgagtcggaaggccacggcggcgagcaacaccggcagcacgacgctcatcagaccaagcacaccggccgcgatggcgtgaagcagctggccgaatggaccgctgacgcggaaccattcggacgcgcagaacagtacggcgagcacgagcagcaggaagcacaaaccgtcacgacggtaggctggatcgtattcgccgacgccggtgacggcgcgtacgccggagccgaacgcgcgcggaatcgcgagcaggatcttcttccacaacggctcaggttcgaggtcaagctcgggctggaccttggtttcgccatcatgggtagacccgttgtctttggatttacggggtttggtgctgttggaggatgctgttcgtgccatatcgggtctgattctactagtacgggggtgcatggttggtgacgacaccgtgacgatatggtcgattgacgaatcccgacagccgattcgccgcgttcgtctgagtcgattccccgctggggcgcgaatatgccttatcatgggttgcatgacacccgcagagcgtgcgagcgcagtcgcatttgcactcaagaactgcgcactggaagcgatgacgccgggcgaggcaacgatgcgcgccgcggctgcctacgaacgcggcttgaagcccgtgacccatctcatcgacgtggcggacgaacagactgccatgcgtctgcgcgccgccgccgaccctgccggaaaggatcgtctggctgccggcagtctggatgatcatgccacggatcgggcggatgcggtgttcgcacgtaccgtgttgttggcggaacgtcgatggaatccgtctggcgacttggatgagctgaccgccattcataaggggctgttcgaaggcgtgtttgaggatgcgggcaagttgcgtacctcaaacaccacacgcgaggtgacgaacgaccgggctcgagccgcgaatcctgaggcgttcttcccggctgggctcattgagaccggcgcgcacaacatcgcgatggagttggcggacaagcgcaacctgcatgcgttggatcgcgacgtgttcgttcacgcgttcgcttctatttatgatgagctcggttatctgcatccgttccgtggcggcaatgcgatggtgctgcgtatattcggttcacgcttggcgcatgacgccggctgggatctcgactggggctcagtgacgcgcgaagagtatcgctccgccaagcactcggcatatcggggcgacacgtctgcactggagacgatgttcgacgcgatactacgcccggcgaatccgacgcgtgtgttcttgatcgccggctggaatcaggggcctgcacactgattgcgggtgattgcatcggcctttggctgattcctacgccgtgatatcgcccagatgatgctgggtgtattcgtcggctcgggcgtcgatcgggtcgtagtcgccggcgtcggcgtgcgcgataatggccatcgcgttgtcgaccagtttcgggttcagggcctgcagccagtggatgcgcgggtcacggccgaaccatcccatctgtttgcgggcgagtcgcttggttttctgtgcgatgtccgcgaaggcgtcgttcacatcccagatgccgtccagcaggtcgatgatctgctgatagccgagcgcacgtacggcggtggcacccagatgcgggcgcaaccgttcgacttcttcgatgaacccatcgtcatacatctgcttggtgcgcaaatcgatgcgatggtccaaatccgggcggtccaggtcgagtccgatctgcacggacggaatcacgtaccggtagcgcggcagactggccgaatacggtttgccggtaagctcgatgacctccagcgcacggatggtgcggcgtggattgcgtgggtccatgcgcgcggcggcctcggggtctttggcccgcaactcgtcgaacaaagcaccggcaccctcggttttctcgcgttcctcaagacgtgtgcgcacgtcgggatcggtgccggggaaggtgatgtcatcgatggccgctctggcgtacaagccggagccgccgacgagaatcggccggatgccacgtgattgcaggtcggcgatggtctcgcgcgcaagctgctggaatcgggccacgctcatcgtgtcttcggggtcgatgatgtcgatgagatggtgcggcacggccgcctgttcctcggcggtgggtttggcggtgccgatatccatgccacggtacatctggtaggcgtccgcgttcacgatttcggcccgctcccccgcttcggccagacgccgggcgatggcgatgcccaaccccgtcttgccggacgcggtgggaccgacgatggagacgactcgttgcgtcatatacgccccctcagtgccgcacggaataggtctggccggcggccacgtcggggtcggcaagcagattatggcggccggcgtgtgtgacggtggccgtgacgaaatcgccgatttcaggtaccggttcgccttcaggcacgccgatgtgcaccagcacgccggttttctcgcggccggtgacacggtgggtgtcggtgtctttcttgccgagtttgccggtgatcatcacttcgacgtcgcggccctcgaatgtggcgaggttctcttcggtaatctgctcctgcaacgccaccagacggtcgaaccggtcctgcaccacgtcgcgcggaatctgttccattgcggcggccggcgtgccggggcgtggcgagtagatgaacgtgaacgccgaggagaagcgcgcctggcgcaccacgtccatggtctgctggaagtcctcctcggtttcgccggggaagccgacgatgatgtcggtggagatctgcgcgtcgggcatggcggcgcggatgcggcccagtatgtcgaggaacttggcggagcggtaggagcggcgcatcgcgcgcaggatgcggtcggagccggactgcagcgggaagtgcagctggtgcatgatattcggcgtttcggccatggctgcaatcacatcatcggtgaaggcggccgggtgcggcgaagtgaagcgcacacgttcgagaccgtcgatggtgccgcaggcgcgcaacagcttgctgaaagcgtatcgatcgccaataccataaccgaacgagttcacgttctggccgagaagcgtaacctccttggcaccatcggccacacattggcgaatctcatcaagaatgtcaccggggcggcggtccttttccttgcctcgcgtggtgggcacaatacagaacgtgcaggtgttattgcagcccacggaaatcgccacccacgagctgatgcgggaggcgcgggcggcgggaagctggctcgggaactgccgcaattgttcagtgacctggacctgcgccttgccggtcgcacgattctgatccaacagcttgggcagatcttcgatgttcttggtaccgaacaccgcggaaacccatggcgcagtatccgcgatcttcttgcggtcaagctgggccatgcagccgccaacggcgatctgcaggttcggccggaccagtttgacgcgattgaatcggccaatggtgccatacatgcgttcggctgcgttctcgcgtaccgcacaggtattgagcaccagcaaatcgaggtcattgtcattgatctggtcctcggttgcaggcacgtagccattggcctccagcacgccggcgatgcgctcggaatcgtgcacgttcatctggcagccgagcgtatggatatggaacacgcccttgccgcgctcccccagcaaaccatcggttccatcggctgcaatcgaggcacgctccgcctcggtcatcatgtcttcattcataacgaccgattctatcggcggggttcgtcatgatccggccacgcatgccattggttgtcacgatgtcaaattatgggttcttggaaagattccccgcgaacgtccagattggctggaatccgccgagtatattggtggacgtgatacttgaccgacatagccgactcaaaacctccgatctgcaagcccgtctcaaagcgttggatcttccgggaggcaccttcactcccgaacaggtcgttgaattcgttgacctcatgcaggtgtatgaaggcgcgatgtacgagatcagcaccaaactggagattctcgacgacgagttccaggtgcggttcagccatgacccgatacatcatatggaacgccgtctgaagtcggtgagctcgatcatcggcaaactggagcgcaagggtctgccgatcggcgtcaattcgattaaggacaatctgttcgatgtggccggcatccgcgtgatctgtaattaccgcgacgacgtgtattccgtgtccaactatctgtcgtcgcagtccgatattcaggtgctgcgcgtcaaggattacatcaagaacccgaaacagaacgggtatcgttcattgcacgtaatctacgcggtgcccgtgttcctctcctcgggcgcgcattacacgccggtggaggtgcagttccgcaccatcgccatggattattgggcgtcgctggagcatgcgctgcgctacaagaccgatttgccggacaacaagctcgccgagcattcccagacgctgctcgactgcgcgcgctcattgcagaacatcgaggtacagatgcagaacatccaccgcgacatcaacggcgcgccgcaagtgggcgaagcgcctaagacctcggactgaggtgctatggaatcggcctgcggccgattcattcaccgttgcagccacttcggcagcctggccggcgcttgggccagtagggtgccgaggaagatgagggcgcagccgaggtagccgcgcggggtcatcacctcaccgagaagcaacgcaccgcctaccgccgagaagaacgattcgaggctcatcagcaggctggctcgcgtcggtggcacccattgctggccgaccacctgcaaggtgtacgcgatgcccaccgagccgatgccggcgtacagaatcggaatccaggaatgagcagcgccggcccagtcgaccgagccttcgatcagcgaacccgcccagctcagcacggcggtggtgcagaactggccgaatgaaagcttgatggcgtccacggtgccgcccaaagtatcgatcaccagaatatgcacggcgaacagcacggccgtgaacacgagcaggatatccgccaaaccaatcgaaccgaaaccatcggtgatgcacagcagatagaagccggcgatggacagcgccacggccacgaacaccagcatgccgatgcaccggcgcaggaacacgaaggccagcaacggcaccatcacgatgtacatggcggtcaggaatcccgcacggccggccgatttgccgtacagaatgccatactgctgcagggtgctggcggtgaacagcacgatgccgcagatcacggaaacgaccaccgggttagcgagcaatcgcgccacggccgaatcgggcttgttcgcattcagcttggcaccggtgatgtaacgacgtcggatgcaccgttcgatgcggcatctgtggagacggccccggatgcctcggtcccaacgacatcggccccggctgtatcgcccttatccgcgctcccccggccacgcatccacagcagaatcggcaccaaagacagtgctcccagcgtgaagcgcgcggcgttgaagaacatcggcgacatcgaatccataccctggacctgcgccacgaacgcaaaaccccagatcagcgcggtcaacaacaggctcagcatgcctacgagttcttgtcttttcacggggagccagcctaacgtgcgaatgtgacagacatgaaaaagcccggccacaatgtggtcgggctgtgacgtttgacgagcaggctacatgccgcccaccaatcggctgacgaggctagtccctgttaccgagcagctgcaggatgtacaggaacatgttcacgaagtcgaggtacaggttcagggcgcacaggatggagatcttcttgaccatttccgggccctgggcctcgtattcggtcagcagcgcgcgcgtggactgcgcgtcgtagatggtcatgccggcgaacaggatcaggccaatcgcgcacacaatcttggtcatgccgtcgacctgcacgaaggcgagcacgatctgcgagatgatgagcacgatcaggccgatcatcaggatcggtccggccttgagcatgtcgaacttggtagtcatgccgaacatggtcagcgcgaagaagaacgcggcggtgacaccgagtgccacgccgatcgagccgaggtcgtagaccatgaaaatcgagctcaaggtgaagcccatcaatgcggcgtacacatagaacatgacgcgcgcggtgaccgacttcatcttggtgacgcgcatgccgagcaccacggccagggcaatctgcaccacgcacaggccgatgaggcccaccatgccggtggccatgaggaagctgtagtaggctccggtgatctggccgagcacggcgaccacggcggtgacgaggatgccgatggtcatctcgccgtacaccttggtcactgagactcggcgggcttcctcatagttgtaggtcatcgtcgtgttgatggtggccgcacccgcaccggcaccagtaccctgcggcacgtattggtaggtgggagcgccctgcggctgggcatagtagtcctggccgtaaccggactgtgcgtattgctggccatatccagactgttgggcggcgttgtaatcaggcgtgttgtattgcgggttgtattgcccgttgttctggggctgctgaccgaatgtcataatcgctcctttagcgtttgttccagtaccaatcttagaggaacaaagctgaacattccatgaatatgatcgatcggctcgttctgctcatctcaaagcgtaacgggcgtttccaccatgcgcgtggcatgcacttgagattcgattgacattcgatcgcagcttggaccgccgcgcgattcactgcaacgtgaaggtatgcgtcaccttggtgtcttgatccgttgataggaacgcagtgacatccaccgtaatcggcgaatcgtcttgcagcacatagcccagcgtcaccgttgccgcggtcccgggctgtgcttgggccaaatacgaattcgcgtcatagccttcaggctgatcgaagtatactgccgtctccagttcggtgccgttctggaacacgttcgggtgagccaaagtggcgaacgagttgttcttggacgtgttgttcgtccattcataagtcaccagagcggtgggcttgccgttatagtcgttgacgcttttcacggcggagactattttcacgtgggcaccttcgatatcaccttccaaatcctgctcgccctgcgctttctgctcggatgccttgctcttggaggcatcagacgatttgcccgcggactttgatgatgaggattgtgacgtgtcgatgcccttggactccttaatggaatcgtcaatggccttgctggcagcggactgcatggccagcgtgatcacaatggccaacaccgacagcaccgccgccacaatggacagcaccttgccgcgtttcttgccccggaaggtgcccactatggcgataatcgccagtatgacgccgatgaagccaaggattgcggcgatattgttgacgatgggaataaaactcagcaccaaacccaacgcgccaaacaccacggccgcgatgccgcagatggtggtatgcagatgttgcggttgcggcggctgaggctgaggctgttgtggctggtactgctgtggggatgagggaaccggctgcggggcgatgttgtggttggacatgatgtgctccttctcgtatcttccccgaaatagggatgtgagcacgacgctaccggccgcgaaacagcgacgttagtggacgaacggtcattgttcgttgcctgttcgggcaatacggaggtgataacggtgcccgcatgtccagtggcgggggccggatgcaggtcatacagtggaaagcatgacgaacccacaacgcgccgccgggccataccccggtttccgacccggctcacggcctgacgctcgccctatgcccggcacggggtccccggttcctacaccggatacggacgaggtgcccgtgactacgcgcgtatggtgttcggtcgttatggtgccattggccagtttcatgtgcatggcgcaaacctcgttcttcgcccagaattttgcgcaggattccgcaggatacacgctgatggtcctctgcaccttgctggcattcccggcagggttcctgctcttggcccgcagcgaatacccggaggcgacgttctggatcgcctgcgcgctggtggtcgtgttcccgtatgactcgctcatcgcactgatggcgatgacctcattgctcgcccgtcgttcaaaccggaacacgaccatccgcgccacggttggcggcaccatcgtgacgctcatctcccagctccgcgacgccctgcaacagcccaaagcctcgatttggcatctgattttcgctcaaccgcataccggcggcgattcaggctccccgatggtgatgctggtggaggagccgaccgtcatcatcaccgccacggtggcctcactggtgttcgtgaccatcgctacgctcatcggcctgcatatccgttcgcgcgcccgcctgcgcacggcaaatgcggtggccagcgcggccaccacgcatgccgcgaccctgcagaccgacctgaccaaccagcagctcgccgacgccatcgcagccgaagcgcacgacaccctcgcgcattccctgtccctgatggccctgaacgccagcgcgctcaaggcggaggcggccaagctcggcgactcccccgaagcgcaatcgttggcggataaggccgaggacatccgtcggcagtcggccggggcattggacgaggcccactcgatcatcgacatgctgcgcaacccgcaccaggcatgggagcagctcgccccgtccgacgacacgtcgctgacccgcgaatcgctggatgcgctgattgcggacacgcgcaactcgggcacgtcgctcaacacctggatcgatatccagcagctgagcgtgatggatgagtcaatcggcaaggtggcctaccgcgcgatccaggagggattgacgaacgcgcggcggcacgcgcccggagcgccggtgtcgttggaggtctccgccacgccgcaggcgggcgtacatatccatatcagcaatccgatcgccacggatgcgaccgagacgcagcgggcccatggggccggactgcctggtttggcagcgcgcgtgcactcggtcaacgggcaatgccggtatgggatggacgatcggcacctgttccatgtcgacgtgcaactgccttggcgcagctaagatggctagcgtgagtgagaagaacgggaatagtgtgtctggtggaaagcccgaacgcggcggtctgaccggaagcggcaccggcttagagcccaagccgatccgggtcagcgtcatcgatgacgatccgatgatctgccaggcgatgagcctgatcctcaacgattattcccacgggcgcatcgaagtcgtctccacgtccaccgatggcgagacctgcgtgaggcgggctgccgaggaaaagccggatgtggtgctgatggacatcgccatgcccggcgtggacggcatcgaggcgacccgtctgctgcgctcgctctcccccgcgccgcacgtgctgatcctgacctcgttgagtccgtccggccgtggaacgcgcggtggaggcgggcgccgaggggttcgtgtcgaaaaccgatgcggcggacgatatcatccgccgcatcatcggggtatgcgagggcgcgccgcagttcaacacggccagtcagaaacagctgatcgacgatctgagcgtcacgcggccgcgttcgcgccgcgatgaggcgcgcgccctgctcgacgcgctgcccgaccgcgagcgcgaggccgtgatgctggcggccgagggctatacgaacgccgaaatcgcctcccgcatgttcatttcggagcgtacggcgaaggcgcatctttcttccgcggcgaacaagctcgacatgggccgcgtgcagatggcgcggctggtggagcgggccgatctgccggcgcggctgtaagtcgtccggttgttgagccgtatcagtcataatgggaatatgagtgaagcgattattcgaacattacgtagggatgactatccggcgctgatcgacctggtgcgccgcacctggtatgccgaattcgatgagcggaccggtctgctggcggccgaagcggactgggagaactgtctggcgcgcaccaccaacgcgttcgtcgccgaactggacggccagccggtcgccctgatcgtggggcgcgtcgatgcgctggaccatcggagcccgctcaactcgcatcggatcaactcgtggaacgcgctggcgcggctcgtgttcgcgaagggcggaatcaaggccgccggcgagattctgggcattctcggcatcgacaaacggctgcgcgcccaggccgcgagcgccgggcatgactatgcggcggaagtggtgctgttcgtacttgacccggcggcgcgcggccacgggctgggccggcgcatgttcgagacgctgatggacgcgttccgcctggccggcgtgcgcgactacttcctgttcacggacaccacatgcgatgtcgggttctatgtgcatcgcggcctgacgcaggtgtgcgagcagtcactgcccgcatccgtgccgggagaaaacccgtcttcgttctacttgtatgaggggtcggtgcccgagccggcgtgatgtgcccgccgtcgggcaaacactggtaggcttgagcacaagttggtatgccggcataccgtccacaggccggcgacgaaggggctgacatggcaatcagtgcgaaggaactaccactcgggaaagtgttcaccccggatttccggttcacgatcccctcattccagcgggcctacatctggaagaccgagaacatcctgcaactggtaagcgacttggatgacgcctgcaagtcgcccggtactccgtacttcctcggctcgctaattctggtgcgcgagggcgataaccgttacgacgtaatcgacgggcagcagcggctggtatccctgtcgatcatcatcgccgtgttgcgcgatctggagcgcgatccggacctcatgcgccaactcgatgcgctgctggtggagcccggcgacaagctgcgcggcatcgtcaccgagcctcgcctcacgttgcgcgagcgcgacgcagcgttcttccgcgaacacgtgcaggaagacaatctcgaatccgtgttcgatatgaacgacgatgatctagcgaccgcagcgcaacgcaatatcgtagccaacatccgtaagacgtacgacgagatttccaattggtcggatgccggacgccagcaattcgcgcagtatctggtcaacgaggtgacgctggtcatcgtgaccaccgacgatctcgacggcgcgcatcgcatcttcgacgtgatgaacatgcgcggcctgccgctcacctcgtccgacgtgttcaaggcgcgcgccacggccggcctgtcgaccgccgaacttgacgtgtacgccgcccgttgggatgacatcattgacccgattggcgacgatccgcatgactgtgaggaattcttcgcctatctgcatctcgtgctcacgcacaagccggccaccgacaagctcatcgaggatttcctggccgacgtgctgcaaccgtacatcgacaaaggcacggtgcccacgttcatcaaccaggtgctggcaccctacgcgatggcgtggcggatcatcgcgcgccccagcgataccgtactgcccgccgaggtgcgtagccggcttgagggattggatgattaccgcagccacgaatggaagcccgtggccatgtgggcgttggtcaattcgtatcgcgggctgggcgacgccgatttgtcgccgtttgtggttcgtgcctcgcgtatcgccagaaccacggccacgctggaatcgttgggtgcccatgacgagcgtcggctgctggaaattctgaccgcattggaacaggtgaccggcatccgcacgctgaatcgcactggagcgttggagcggcgcggttatgcgaacgccgccatccgtgatcttgacaagggctatctggtccagcgcgtgaacgggttgcatgtctcggacggcgaccgtgaaggcgcattggtccgtttgcatggcgagatgcagggtgacggcgatttggtccgtctgctgctgattcgcgccaacgagcagaaggccggcatgcagttggatcgaccacgccggttcagtgcgctgccgattatgccgttggatatcgaacggtcgaaatcgtttgcggactggccgcaggatcagcatgatttctggatgtaccgactcggcaatatggcgctggtgcagggccctgaggatcagttggacaggttgagtgaatatccggcacgtcgcgaccgcatgctgttgcgcgcggattcgcgtcgtttcccgctgaccaatcagttgaaggatttcgctgactgcacacctgccctgttggaagcgcggcaggaagaggcggtccgactcatcgtggaatactggggcatccggtatgacaaggacgcccgcgatctgaccaagcagaatgtcgatgagttgtcgaagacctctccacggccgtctcatagttcgcggcgcgtcacgatccggcaggtgattgacgcgggtcttctggtgccgggcgagcgtctggtgtgggagcggccgcgcaagggcgagcgctggttcgtcacggtcaccgaaaacggtcgtctccgtctggatgacggctccgaatatccgactccgaccgccgcggcccgtgccgccgccggaggacgtcgcggcggcggtctggacgtgtggaagcgcacacgcaacggtcagaagctcagcgacatctggaagcagttccgtctgcaggcgcagtaggctacagtaagccggcacgtcattggtggctccccctccgtgaggggagccacacgctcatttattccagcgccgccacgatttcagccggtgttttgcaatattcgggaaaatgactgattaattcggcatccgatgtgaccacacagttggcaccggattgttgcgcggcaacgatgatcagatcatcttcaaaatcccgatgccgtttttgcagggaaaaagccctatcacatgtcgactcatcgacagcgacaatgtcacacatctccttcacctgctcgatacaacgccatggcacccgtgacgacagaaagccgcgagtgaaattctccacttccgattcattcggtttgaattcgctacgaatcgccgatgatgataggtatgcgatatccttcagcgacaatgacgcacacaacaacgtaacgttgttcttcgcgccaagttccataaccgcttccgccatcttggcgtgatcatcgcgatggagcaaatagtccaacagtacattggtatcaagcaaaatacgctgcatggaaacgtcggtcatcaatcggccctcttcatgttgtaatacgtatcaagttgctcgtcgtacattttgtcgcggaactgcttgtaggtaaggccttccatgaggtcggtgtcttctgagatcagtccggccttgaccagttccttgtgtacgtatccggcaccttctcgaatcagtttcagcttgcgctgcttttcctcctcgcgggcttgctcttcggcggtcgtttccaatgccggcacttccttgcggtcggcgatgtacaaccacagcgaccggattacgtcactcaccgatacgcctttgcccttgaggacttcttcgacctcgttcttcagtttcgcatcaatgcgaacgttcatttggaccatggtcatggcaacctccatttcgaagatgctatacagtatagcattttggcatgcgtggaaaaggccggtatccgttggcggataccggccttgctcccctcagtcagcttcgctgacagctcccctcaagagaggggagccaagaaggtggttacttcatgaggttgcgcagcacgtactggaggatgccgccattacggtagtagtcggcctcaccgggcgtgtcgatgcggaccaccgcgtcgaactcggtcttggagccgtcctcgtgggtggcggtgacgtggaccgtcttgggggtcacgccctcgttgagcttctcgacgccggcgatatcgtaggtctcggtgccgttgaggcccagggactcataggattcgcctgccgggaactgcagcggcagcacgcccatgccgatcaggttggagcggtggatgcgctcgaagctttcggtgatcacggccttgacgccgagcatcaccgtgcccttggcggcccagtcgcgcgaggagccggtgccgtattccttgccggcgagcaccacgagcggcaccttgttgtcgatgtagtcgcgggaggcttcgaagatcgtggtcggcttcttggcgaggaagtcgtaggtgaagccgccaggcgtcacctcctcgcccacggaggcgagcagctggttgcgcagacggatgttgccgaacgtgccgcgcaccatgatctcgtggttgcctcggcgagaaccgtaagagttgaagttcttcggctccacgccgcgctcggtcaggtacttgccggccgggctggaggccttgaacgcgcctgccggggagatgtggtcggtggtgaccgagtcgcccaggagggccagcacacgggcgccgtggatatcggcgaccgggtccggcgtggccttcatgccgtcgaagaaggtttgcttgcgcacataggtggacttgtcgttccacgcgaacagctcgccttccggcacgtcgaggcccttccagcggtggtcgccgtcgaacacggaggcgtagtccttgaggaacatctcgcggctcacgctgccgtcgaccacggcggcgacctcggcattggtgggccagatgtccttcaagtacacgtcgttgccgtccgcgtcggtgccgagcggctgggtctcgaagtcgaagtccatcgtgccggcgagcgcgtaggcgatgaccagcggcggggaggccaggtagttcatcttgacgtccgggctgatgcggccttcgaagttgcggttgccggaaagcacggcggtgacggtcaggtcgttggcgttgatcgcctcggaaatctcgggcagcagcgggccggagttgccgatgcaggtggcgcagccgaagccgacgagctggtagccgagtgcatcgaggtcgtcctgcagccccgcggccttgaggtagtcggccacgacctgcgagccgggagccagcgaggtcttgacccagggcttgggcttaaggcccctggcatgtgcgttgcgggcgatcaggccggcggcgatcatcacggacgggttggaggtgttggtgcatgaggtgatcgaggcgatggccacgtcgccgttttcgatgtcgaaatcgccacggaagtcggtggacacggccaccggatccttgacggtcttctcggtctcgtaggcgggggcggtcttctcgaacatgctcttggcttcggacagcagaatgcggtcctgcgggcgcttcgggccagcgatggacggcaccacggtaccgaggtcgagttcctcgtattcggagtactgcggttccacgtaatccgggtcggaagcgtcgccccacagcttgttggccttggcgtaggcttcgaccaacgcgacctgctcttcggagcggccggtcaggcgcaggtagtcgagcgtgacattgtcaatcgggaagatgccgcaggtggagccgaactcggggcccatgttgccgatggtggcgcggttggccagcggcacggaggcgatgccttcgccgtagaattccacgaacttaccgaccacgccgtgcttgcggagcatgtcggtgatggtcaggaccacatcggtggcggtaacgccctccgggatggagccggtgagcttgaagccgaccacgcgcgggacgagcatggagatcggctggccgagcatggcggcctcggcttcaatgccgccgacgccccagccgagcacgcccagaccgttttcggtggtggtgtgcgagtcggtgcccacgcaggagtcgaggtaggcgagcgtgttgccgttggcctcggccttgctcatgaccaccttggccaagtattcgatgttgacctggtggataatgccggttcccggcggcaccacgcggaagttcttgaatgcctgctgaccccagcgcaggaactggtagcgttcaccgttgcgctggtattcgatgtccatgttctgctggaccgcgtcggcgatgccgtacttgtcgatctgcacggagtggtcgatgaccatatcggactggacctgcgggttgatgacctccgggtcgccgccgaggtccttgaccgcgtcacgcatggtggcgaggtccacgatgcagggcacgccggtgaagtcctgcatgatcacgcgggacggcgtgaactggatttcgtggctgggttcggcgttcggatcccagtcgagcagggtcttgacgtgctcgtcggtgatgttggcaccgtcgatgttgcgcaccagattctcgaccagtaccttcagcgagtacggcagatgatcgatgccgtcgagattggcgatgttgtagtaatcgaagtccttgccggctgccttgagggtagccagctggtcgtcgcgtaaggacatgcttcctccgaaatcatgaatcggcttatgatgccgctgattatccgctacacatggtacgggcacgttaccgaggctctggcgtgtcggcttgaagtatgagacaatcgcgccgccgtctcaatgccgacgcgagagcttgcccgtcagtccgcgcacgagcggcgccagccacaggcacagcgcgaagatcagcgcggaaccggccaacgcgatcagcgtggccaccatcgtggcgccggtcggcagaatcagggcgaagaagttcgccacgaacgggacgaacgcgccgattacgcccgccgccgcgaacaccgccaccagcacgccacgccaaccgttgagtggtctggccacgcgggccagcacgaacacgcccatcgcgaacaggatgatggcgctggtggcgcgcagggcggacaggtccgcggcatcgccggtcacgttccagcccatgaccggcggcagcacccaagcggccagcagcaccgacagcgcggtggcgatgccgcccggcagcgcgaacgtgaccacgcgcttgaggaatcccggaatatagcggcgcgtgttcggcgcgagcgccagaatgaacgcgggcatgccgatggtgagagcgccgatatacgtgatatggcgcggcaggtatgggtatgggatttgcgtcagcactacgccgagcgagatcagcgcggagtacacggttttgacgaggaacaggctggccacgcgctccatattggccatgacctgacggccccgcgccacgacgtccggcaggtgcgagaacttcgaatccaccagcaccacctgggccacggccttggtggcgggcgccgcattgcccatggcgatgccgaggtccgcctccttgatggcgagcgcgtcgttgacgccgtcgccggtcatggcaaccacgtggttctgcgtgtgcaacgcctgcacgatggccttcttctggtcaggcagcacgcggccgagcacatcgacgttttcgagcacgcgggccagttcgttcacgtcctcgggcagttcgcgcgcgtccatcgccaccggctcatggtcgcctgtcagtttcactctgcgggcgatggcacccacggtcactggattgtcaccggaaatcacacgacagcgcacaccctgctcacggaaccaagcgagcgtccgctcggcgtcctcgcgaatcttctcagagcacaacaccaacgccaccggctcagcctgcacatccagttgccggccgtccgagacattggctccctcaactgctcccctcagtcgcttttggcgacagctcccctcggagaggggagctgtagaccgcgcaaccagcaacacacggttgccgtcattggcatactcgttaacctgctgcaacaccgacgaatagtcaccctcaagcgcagaaataatcacctccggcgctcccatgtaccaggtctcgccggatttacgcaccgcactccatttgcgcgccgaagagaacgggacacgagactcaaccgcacctgccccatatccttgggccttgagcccggcgagtacggcttggccggtgccgttgggctgctcttcgttgcagcagtcgtagagggcctgcgtggctgcctgttccgcagccgcattggcggaatcgagcatcacgagccggttgaaggcgataccgccatcggtgatcgtgccggttttatcgaggttcagcgcgtccacgcgagccagtgtctccacggattcaagctcctgcaccagcgtattgtgacgggcgagacgcatggcggccaccgcgaagttcagcgaagtcagcagcaccaagccttcgggaatcatgcctactacgccggcgaccgcggaaaccacggcttgccgccattcgccggtggagagtgccgtgccccaaccgccgaccgtatgaatctgcgaaagaatcagcagaatgcacagcggtaccacgaggaaggtcatgaatttcagaatcgtgttgatgcccttgttcaggtcggacacggttttcttgtataccttggcctgcgcggtgagcgtggcggcgtaggaatggctgccgaccgcattgaccttgaccaatgccatgccggagaccgcggtggcgccggaatacacctgctcccccaccttgtggcgcacggtacgcgattcgccggtgagcatggactcgtcaagctccagtccccaggtctggatgatctgcccgtcggccggcacctgttcgccggcacggatccacagcaggtcgtcgagcacgatctcgttgtggggcacctccacgtccctgccgtcacgatgcacgaggaattcggaggccacaaggatggaaagcctgtccagcgtgcgcttggccctgagttcggtgacgatgccgatgcccgtgttgatgatgatgacgaaaccgaacaccgcgtccctccaggaaccggtgatcagcaccagtaccatcgcggcgaagatgatgccgttgaacagcgtgaatacgttggctcgcacgatatcttgaaccgaacgcgaggtggatgttttcaccgcattcgattggccactttcgatacgctgcaccacttctttgggggtaagaccggtcgctccgatctcaggcatttccacggctgttgttgcactcatattctccagcctaccgcgtcttgtttcgcaatccgctaaggctcagggatgattcagggtgctttctcagcttcaagggcctgattcggctcaggaaacggtgactttgatctcgcgttcgtggggttcgtcgcgcgtgatggtgagcacggcgtcagtaatagtcattggcttggtatcggcagtgtcgccagaatcggcactgttggtgttgaggtgaaggatgacggcgtacagcagttcatcttcgggcgcatgctttggatcaatgagagcgactggaataccggcttcacgcgcattggtcaacgtctggttccagctctcccggttggcgtcggtaacgtcgatgccgctgataaccacgattttgaccgcgcgagctacgaaatcggcaacaccctgctgtgcggtgaccgcattcttgtcgacgccagtatgagcatccatactatcggcaccgttttcgctggtagtgccggcgtcagaagattcggtttcaccggatacaccatcagttgcgtttgccgagcttgcggatgtttcgagcgaggcatagtagacattgagtttgtcatcagacagcgcattgatgacgaactcgtctgcggcggtgtcagtcgaccccacaaagccgactgtgacatccgtgggatgtgtggaatcgtgggcgacttccggcatgctgtcttgggtatcgccgaccgccctaccggccggcgtgcaggcggccagggacaacacagccgccatgcaggccagcaatccgagaattcgtcgtgtcatatgctcacctgtcagcgggtaaacagggccaccgtctcaacatggtgggtcatcgggtagatgtcgaaggcacggatgtctttgagctcgtagccttcgccgatgagtgtcgcggtgtcgcgtgcgaggctggtgggatcacaggcgatgtagaccacgctggatgcgccggccgcggcaatctggcggcagaccttggcacgagcaccggcacgcggcggatcaagcactacgacatccggcttggccagatgcgccggcacatggtccagcgtgcgcgagacatcacccgcgcgggcgtccacgtcgttcaggttcatggcacgcaggttgcgctgggcgttcttgacggccacacgcgcgccttcaacgctgagcatgcgggtgcgttcaccggtcattgtggccagcggcagggtgaacaggccggaaccggaatacagatcccagattacggcgtccgccgctgactgcagctgcccgttgaccagattgatcacgtgcgtaccaagggcaatcggcgcttggcgatgcacttgccagaacccgttggcgtcaacctgatagtcgaaggtcgtgccgttgatggtcacctgttcggtgagcagctgggagccggcgcgcagttcgccgtccacaagtacggcgtaattgtcgtctgctgccgcggtatcgacgatctcgccgcgcggttcgggcacggaaagacgaatctgggagccgggttcaaagccgccttcccacacgtgttcgcgcttggcgacgtccagcagcgtacgcgtggcaagcggcatggtgtcgatggccacgcggttgtgtgtgccgcgccggcgcatggatggcatgccgttgtcgtcggcaatcatttcgatgcgggtacgccaattgaggccgccggcttccttgtcgccgggcatgcgctcgatgggaacggccacgtcgatatggccgagtcggctcatctgttcggagacggtgatggccttccacttgagctggccgggcaaagagacgtgcacgagatccgcgccgcccactcccccgcccatcgccaagggaccggcaagtggccatgccggggtggctcggtcttcggacggctcgagaacctcgacgacttcgccggtccagaaccggtcgtcccggtcgtggggctcgtcaagttcgactcgcacgagttcgtcgggcaaggcgaagcggacgaacaccacacgaccgtcgatatgggccacacagcggccttggtcggcgtatcgttcgatacgaacttcagcttgcatcatcgtcctttccggttgcgctcggttcgagttcggcatcaacagcgacttcagtctgtgtcttcttagccgcgaccttatgccggtgcatcggcgtggcgataatgaggtaactcacccaaatcgccaatgcccagaacggaatgcccatgagcaggcgggtcacgccgagtgcagccacatggttggtcagatacagcggcacctgcaccaccagccgcagcaggaacagaccgacccaaaggccggtgacaatcatataggcgcgtttcagggccttgtcgtccatccagtcatggaaccatgccttgaaatgctcggtgggcaggctgcgaatgaattcgacgaccaaacccagtccgggcacgcgcgcgatcagtgacacggcaagcaacgcggcatagccggcattggtaatgaatccgaaaatgtagtaattgcgggcctcatgagtctgccatgcccaaatcaggcagatgcctaccgccaccagaccagagaccgcgcccattaccgactggcgctgaatcagtcgcacaataacctgcaataccgccaacacggccgaaaccgcaatggtgagattcagattgctcgtggccacgaacagtacgacgaacaccacgccgggcagcatggattcgatgacgccgcgagggccgccgatggcatcgatgacggagaagtcctcgccgtcattgccggcgtcggccagcgcggatagaccggtgcgtttgttgtctgccaagtctcttcctatagatcagcgaacttcggagaacatcgggccacgggccaaggtggtcttcacctcggtggtctgatcctggctcaacgggcccttcggcttgttgtccggaatgtccttgaagtgttccttgccgttcgcctcgccggcttcggccgcggccttggcggccttacgctcagcgggggcgaccggcggatgcatcgggatcagatcgcgcggcgccaaaggctcctcgccacgctcgacgacgatgccggcgaagaacttgttcagcgcctcggtctccgggctgtccggatcgatagcagccttgccggagaagatgccacgcagcatccagcgcgggccgtccacaccaacgatgcgcgtgttcacggtcttgccgcccttgacattgaccggcagcttcagttcggtgccgaacacaccgtccacttcagaagcggccttgttggcttcaagcaggtcaccgcgaacgtcatcccacagtcccagggtcttgggtgcggcaaaggcttcgatttccaggctggaggagccgaaggtgatggtggaaccaagcacttgctgggtggcgcggttggccttgatacgcagctggatgccctggaggaagggcaggtagtaggcgcccagatccagataatcgtcataatcgggcacgtcctcatcattgacgtcccacgggcctcgctcttctccgcggccctggtattcgctggccggctcggcgagcacggtctccgcgctctcggcctttgcggcagcgtttgcttctgcggcagccaccttgtcttcatcgacaggctcaacggccggctcggcttccttcttgctcttcttcttgccgaatccgaacagtcccataattcctcgtttcatgtaacggttgcaaccttgctaacactagcactcaggcttagagaaagctgagtcacacgtcgtatgtgatggtaagtggcgcgtggtcggaccaacgcaactcgtatgtgggggccttgtcgatcacaaaaccgcgcgcggtctccgccagctcgggcgtggcgaactggtagtcgatgcgccagccgacattgttgtcgaaagcgcgcccgcgctggctccaccacgtgtacggaccctgaatatcaccggcgagcgaacgcatcacatccacaaactcatattcatccagccacttgtccacgtaggcgcgctcctcgggcaggaagccggcgtgcttttcgttggccttggcgttcttgatgtcgagcggcgtgtgcgcgatgttgaaatcgccgcacaataccgcctgcttgccgccgtgcgcggcctcgtcgcgcaactcgcccatgcgagtgagcatcgtgtccagaaaacggtacttctgttccatcttggtcgaatcatcggtgttgccggcgtgcacgtacacgcaggccacggtgatcgtgtatccctgtggcgtcttgacatcggtctcaatccaacggccggaatccacatcctcgcccaagctcggaagtccatagcgcttatcggtcacctcaagatcggtgaggagcccgactccggcacgacccttgacacggcagacctcgttcagcgaatgcaggtcagagggtgaggcgatcttgccggcggtggcatactcgaaaccgaattcgccgaaaatcgaatcgacatcctcttgcggggcgcgcacttcctgcatacaccagacatccggagcatgtttgccggcccagtcctcgatgcccttgcgctttgccgcgcgaatgccgttgacgttcgatgtggtgatggtgatggtcatgcagccatactattttggcctctctaccagtaccgcactcacgattacattgaggtataaaaaattagctccctcataagagggagctaatttagaatgtcctatcagtccaaaccgagctggagcttgccgccggggatggcgtcgagcaggtctcgggtgtactgcttctgcgggtggtcgaagacctcgtcggtggtggcatgctccacgagcttgccgtgctgcatcaccacaacctcgtcggcgatctgacgaaccacggccagatcgtgggtgatgaacaggtagctcaggcccttttcggcctgcagatcgttgagcaggcgcaacacctggtcctgcaccagcacgtccaaagcggacacggcctcatcgcacacgatgacgtccgggtccagagccatggctcgtgcgatggcgatgcgctggcgctggccaccagagagctcgttcgggtaacggcccatcacggaagccggcatctcgaccatgtccagcagttccttgacacggttggcacgccacttcttgtcgccgatcttgtggatgcgcagcggctcctcaatggaacggaagatggagtacatcgggtcgagcgaaccgtaggggttctggaacaccggctgcacgtggcggcggaagcccagaaggtccttggacttgaacgtggaggtgtcgcgaccttcatagaacactttgccggaggtgggcttcaggaggtgaagcaccatgttcgccacggtggacttgccggaaccggattcgcccacaatggccagtgtggtgccacgcttgacggagaaggacacgtcatcgacggccttgaacatctccttcttgcggggcagcttgaattccttggtcaggtggtcgacggtgatgatgtgctcgctcttttcgagcgtgctttcgccggcgatgtggtgatcgagcagagcgtccgcatcctcaccacgctccttggcggagatgatgcgctgggaggccagcgacggggcagcggccaccagtcgcttggtgtacgggtgctgcgggtgctggagcacttcaagggatgggccggattcgacgacctgacccttgtacatcacgacaatgtgctgggcgcgctcagcggcaaggcccagatcgtgggtgatgaacagcacggcggtgcccaacgagtcggtgagcatgtgcaggtggtcgaggatgcgcttctgcacggtcacgtcgagggcggaggtcggctcgtcggcgatcagcagatcggggcggcaggccaagccgatggcgatgagcgcgcgctggcgcataccaccggagaactcgtgcgggaactgacgggcacgggtagcggcgtcgggcagaccggcctcggacagcagacccgcgatacggtcatccattgtggagccggtgacgtacttcttagccagataccaggcctggtcgtcggccacgccggccttgatgaggtcgtcggccacgcgccaacgggtttcggagcccggaacccattcgttggtgaagcgggagacggccttgtcgaaggcctcgccggacacgccggcttcagtcaaagccttcttggcctcggtcatgagctcgggcagttccttggcgccgaggaaggtctcgtcgtcgttgcccttgacttcgacctcgtcgccggccagagccttggcaagggcggagcgcttttcgtgagccacgtccatgttgttggccttcagtgcttccttgacctgggtgccgatacgccacaccgggttgaggttgctcatcgggtcctgaggcacgagacccatcttggtgccgcgcagcttgtcgaactcgctctgcttggcgccggcgatttcctcgccgtcgagcttgatggagccgttgaccacgtgaccggtgccgggcagcagacccagcacggccatggcggaggtggacttgccggaaccggactcgcccacgatggccacccactggccagggtagacggtgaagttggcatcgcgcaccgcgtgcaccggcttgccggtgtcagtggtgaagtcgatggccagatccttgacctcgagcagcggaccatgctctttctgcatagccagcatcttggcgttggtgttgtcagtcataatgtttctccactcccctcgctcaggccgtacggctcttcggatcgagggcgtccttgacggcgtcgcccatcatgatgaacgcaagcacggtgatggccagtgcggcggacgggtagaacagcaccagcggatcagtctgcaggttggtctgtgcgctggagatatcgccaccccagctcaccgtggtggtcggcaggccgacgccaaggaagcttagggttgcttcggccacgatgtaggaggccagcgaagtggtggcgatgacgatgatcggggccagggagttcggcaggatgtggcggaacagattcctggcaggcgtggagccgagggccgtggaggcggtgttgaattcgaggttcttcgatttcagcacggcgcttcgggcgatacggcatacgccgacccagccgaagagcgtcaacaccagcacgatcttccaaatggacttggaggtcttgaacatctggagcaccacgatggcgccgagcagcataggcagggcgaagaagatgtcggtgatacggctcagcaccgcgtcaatccagccgccgaagaagccggcgacggcaccgatcagggtaccgacgatcacgaccagcagcgtggagagcacgccgacagacagtgaggtacgggtgccgtagaccacgcgggtgtacacgtcgcagccttgcaggtcgaagccgaaggggtgaccggcggtggaggggctcagggagttgcccagatcgcaagcgttcgggtcttgcttggtgaacaggcccggtgcgatggccacgacgatgatgaagatgatcagcagaccagaaatgatgaacagcgggttgcggcgcagggttcgccatgcgtcggcccacatgctggtggccggtgcggattcatcgacggaatcgacgtcctgcagctgggtctcctcgaggggggctacatagcggtcttgaccgggcagggtttccatgaagtattcggttcccggctcgccggtctggttgagctcgttttcagtggtttcgtttgccatgtgactcactcctccctatcacgcgtaacggatacgcggatcgagggccgcgtacagcatgtcgacaacgaggttgcacactacgaagatcagcatgagcaacgtgacgatggacaccaccaggtttgcctcgcccttcagaatggactggtaggtgaggaagccgatgccgtggatgttgaagatctgctcggtgatcatggcaccacccatcagggcgccgatgtcctgaccgaggtaggtgacgaccggaatcagggagttacgcaacacgtggcgcagcatgacctgaccgttcgacatacctttggcacgtgcggtgcgcacgtaatcctcggcgatgttggaggagatttcggagcgagtcaatcgaatgatgtaggccatcgacaccgatccgagcaccatggccggcatgagcaggtcgatgaagcccgggtctgcgcctgccgtcaccggcaatatcgcccactgaataccaaagacatattgcatgacgaagccggtgacgaaggtcggcacggaaatgagcagcagagagacgatcaggatgacggtgtcgtaccacttgcccttcttgaggcccgagacgatgccgaagaccacgccgaagatcgcctcgaacacgaacgccatcaggccgagccggatggtgaccgggaaggcgcgggcgatttcgtcgagaacaggctgaccggcaaaggtatcgccgaagttcagggtcagtgcattcttcaggtagataaagtactgaacgatgaacggctggtcgagatggtattctgcgcggatctgggctgcgacggccttattgacgggcttgtctccgaacatggccttgacggggtcgcccggcagggcgaagacaagggcatagaccagaagtgtcgtaccgagaaccacggggatcatctgcaggatgcgtcgcagaagatacttacccatacggttgctccttatttcctagaccggccagaaagggcatagtacgcccccgccggtcgataaatactccgacattctaccgcatgcccggactgtgatatgtaaatttgcgctaacgcaaggttgagagtaagcaatgccggtggatatgtccatggttgcggtcggatagtggatactttaacttggttcccgctggcgggagcaagcaccctcacacaacaaaaagggcggggatcttgcgatcctcgccctttatttccgaactacctaacggtatccgttcagtgagtcagactcacttcttggacatctcggcgtaggtcgggaggttctgccaatcgaaggcgtagccggacttcacgttgagggaagccacaccggaggcgttggagtagtacagcgggatggccggaaggtcgttgaggaggatctcctcagcctgctggtacagcttgttggcgtcatcagtgctggaagcggcagcggcctgcttgcacaggtcatcgaaggccgggctcttgtagtcaccatcgttggagccgttgccatcagcagcagcggtggagtacagctgccacaggtagttctcggcggacgggtagtcaggctgccagccggtacggaaggcgcccttcatctgacggttggtgacggcgtcacggaattcctggaaggtcgggatcgggttggtggccgcgtcgatgcccaggttcttcttgagctggttcacgacagcatcgtaaatcggcttggcaccaccatcggcgttgtaggagaaggtgagctggccgtcgtacttggagatggcgtcagccttggcccacagttccttggccttggaggcgttgaacttcaggttgtcggcacccttgagggagtcagagtagcccggggtcttcggggaggtgaactcggtggcggcggtggcgttgccgttgagcaccttgtcgatgagctggtcacggttgatggccatggagatggcctgacgacgcagctggccttcctcgtcgttcttgaagtggtcaagggaggacgggatggtgaaggtctggataacggagccggcctcggagtaagcctggaccttcttgtcagtcttgaaggtcttggtgaaggcggccgggacggaatccatcacgtcgaggttgccgccctgaatgtcgcggtaggcggcggagtcgtcggtgtagaccttgaaggtcacaccgtcgttcttgggctgctcgttacccttgtagtcagggttcttgacgagggcgatttccttgttgtggtcccagtggtccagcttgtacgggccattggagacaggcttctcgccgaaggccttcggatccttgtagaaggactcaggcagcggggcaaaggccaggtagccgaccttgatcgggaacacggagtcggactggttcaggtcaacggtgaaggtggtgtcatccacgaccttgaggccggagagctgctcgtcacccttcagaccatcagcctggagctcatcgtagcccttgatggtggagaagaaggaggagcacttctgggcgttcttgacgttggccacgtaggaccaggccttggtgaaggactcggcggtcaccggggtgccgtcggtgaacttccagccggacttgatcttgatggtgtactgggtggcgtcatcgttcggggtgatggactcggccacttcgttggaagccttgccatccttgtcgaaggagaccagacgggagaacagcaggtcacccggcttgccgccaccggtctcgttggtgttgcccgggatcagcgggttctgcggttcggagttgtacgcagtgatgatgttggagccagcggtgtcaccggaggcagcgttactgttggagccgccgcaggcgctcagcagcatggccacggagcaagccatggcagcgaaagcaagagctttcttcttcatatgatttctcctattcattaggttgcgaagcgtttcagcctcgcctcatgcgaacgggcctggattccccgtcaccgtgagacttgcatctcacgatgtctcgaacaatccaaccccgttgctgattacctgtcatttttgcgcacttgggagacaagcagtgtattttttgttacacccatgtaaaattcaggggttcttgccggctaggttcagtctttgctgagtttgttaaccaatgcccacatagtggtcatgcccggggaaaggcctgtccgtaacggttcttgagctgctcgatggagacgtgcgtatagcgttgtgtagttttcaaggaggaatgcccgagcatctcctgcacctccctcagatcggcaccgccgtccagcatgtgcgtggccgccgaatggcgcaacgcatgggggctgatgtccggtacgccggcctctcgggccgctctgtgtacgatgtcacgggctatgcgttggtcgatacggccgcctcgtgcgccgaggaacagggcgttggtagcacgggacttggctgcatccgttgccgtacgggccagtacaggccgcccttgttcaagccaagtctccagcgcacgctgggcgggcagtccgaacggcaccacgcgttgcttgttgcctttgccggtgactttgatggtgcgattggagaagtcgacgtcaacgatatccatcgacaccagttcggcgacacggatgccggtggcatacagtagttcgagaatcgcggcgttgcgctgcgattcggcgacgactcgggcgctgtcgcgcttgtctgcacgggcgggtgcctcgttgcggtttacggtgtcggctgacttatcagctgtcttgccgactgccttgccgctgccactgccggacgcggctgccgctcccccatcgcccttgtactggtttgttgcaacggcctgttcggcgacatccaataactgctcagcttgagattcggtgagcaccgcgggcagcgtgctgggaatcgagggagtcatcagtgtggcggccgggtcggtgttggtcaccccatgctcataggcccacgcgaagaacccgcgcacggccacggttttgcgggccatgctgctgcgggcgtgatcgcgcgattccaccgccatccagctacgcagatcatccagcgtgatctcgttcagatcggtcacgccgcgcagctcgaacaggtgcagacatgccgtgagatccgcgcgatacgctttgagcgtattcgctgacaggccgcggttggacttcagataggagacgaaggagtcgatatcgccgtcgaactgcgtagatgacactctcgttctcctccgaattctttatggccttgggttacggccggggtggcgtgttgcgccgctccggcacgggtttcaatgtggcaatctgttcctgatggatggtcacgttctgggccgggcgcgaaccattggcggcggcgtcacgcaccatctccaacgtgtatccgtcccaggaaaccacgtgacccacatagtcgcggaacttcatacggtggtcgaccgggtcaatgccgtcggtgatgcgcaccaccacgcgggcaccggccggaatctgccttggtaacgtcatacgtcatcatcccccttaaccattcgccgcatcaacttcgatgcgtttcccgaaaaacggtacagactaccttactcctttgagcctttcgaacagcggagccacacggtcttctcacgaaaacaagcgggaacttcatccccctcgcgcggccttcttcgtgacgggcggcgaggggaacctgcgcacgggcctacatggcggtacgcagttacatggcggggcgcagttggatgatggcctgacgtggatggacgaagccggtgatggcttctcctcggcgtgcggagaacagcagggtctgctgccagccggcttcggggacggcgagctcgcgttccgggaatccggcggcagttgtgccggcttgcggcgcagcggtggccgtaccgtcttgtgcagcggtgatgccggcatgtgtcacggcggccttgtaccggcggaaggggtcgccttcggcgaagaatcccatcacatcctgctcgccggcggcaccagcgtgcagttggtcggccatatcggtcagacgtgccgccatgcggcgcagcagcgcttcgacgttcagcgagtcttcctcgaccatcgcgcgcgtgcggtccgggtcggtcagggacacgcgggtcatgtccctccagcagccggcggccagcgcggcggcgatgttgcggtccgggttggcgaccagttcgttgatcagcgcggtggacaccacatgcggcatgtgggagatcatcgccgcggccttgtcatgcgtttcgtcgtccacgacgatgacgcggttgccgacgtccttggtgatcatcgcggcgacgtcgaggaagcggcggtagtccgtggactcgtccacggtgatggcccatagggcaccgtcgtacagatacgggtcggcggcctgccagccggacagttcgttgccggccatcggatgggcgccgacgtagcacttccccagcccggcagccttaacctgatcgcggaccatgcccttgaccgagcccacgtcggtgagcgtggtgttcggatggtcgcccatgagcggggccagggcggcgaggattgcgggcatcgccttgagcggattgcacagcacggccacatccggctcggcatccatgagttcggagagcgtgctcttgcagaaaatgccatcggcttcggcctgggcgtaggggtgcgggcgatggttccacgcgacgacgcgcacgccgcgctcggtcaggcggcgtgcgagcgagccgccgatcaatccgagtccgacgattccgactgtatctaccacagcagttccttccttgcttcctcggtgtactgccagccttccggcgcgcgattggtgatgtggacgccgccctcgggcagcatccaggcgtcgaccggcgggttcgggcgttcgcggcgtgggtagacggccagggtttttgcccagtcgccgtgtccggcgatctcttccagtgcggtgcggaatctcggctcccagggggcggcgtcaagggtggcgatgaagctgtaggttccgtcgtggcctttgatcgggcgcgagatgaagctggtcatgttcagtcccgcatcgcgcaggacgtccagcaggtcggcgagtacgccggggccggtgaccagcgggatgaaggtgatgatggtttcgaagtcgccggcgtcattgctgtgggcgcgggcgttgagttcctggaccacatcacgcggggcgatgacaaggaattcggtgtgcgcgccatcgaaatcctgcacatgttcggcgagggtgtcgagatcgtagagttcgccgcagatgctggggccgagcgccacgcggccgggcttcaggtcgcggcaggcggcggcgttggaggatgcgggttcgggctgcaaatggtgttcggcgatgaaccgggtgcattgggccagaccgtgcgggtgggcgctgacggggttgccggtgcagtcgtagatgctgtggccgcgcacggtgaaggcgttgaaggccacgtccacactgatccgggcgaagccggccgcgttgggggcgtcgatcagcgcgtcgagattcgggaccacatagccttcgacgttgttttcccatgcgatgacgccccagccttggcgcgactgtacggcctgcatgatcgcgggcacgtcgggcagagcgatgaggtcgaagtcgccgagtgtggcgaactggtcggcggccgtcattgccgcctgatgggtgaaggtgccctccgggcccaagtaaaacagtttcatgcgtgccataaagttctatggtagcggccgtaatcccctacgcccgccgatacgcgacgcattcccgggaatgtatcgccatatatagttacgcgcgcgattcagaatgagtgggaatgacgaaccagcgggcgggaagaatgagcaggacgacttggaccagtatcaggccgtacagccagatgtagccggcatgttgggagaagaacggcatgtcgccttggaatccggcgacgatgagcgctttgccggatgtggtggtcagcgccatgccccatgcggtcagtgaggaggcgatgaggtgcagggccagtccgaccgcgcccatgcgcgaacgggcgcaccatgtcgataggccgatcagcagaaacgccagcaccagaccatacggaatattcagttccgcacccatacggtgggcgaacgtgcccacaaaggcggaagccacgcccgccgcaatcgtgatcaacgatttgaccagcgcgttctggcgatacgaccacggacgcaattcagtagtgctcttcacagtcatgcgtttcagtataggtggggatatgacttggtgaggaataaacttagctcccctcagagaggggagctagagagaatggtcggctacagccgcaccaaatcacttaccctgctgggcggcgttctggcggcgctgcttggcgcgccacttgtaccagtcctcacggccgaggatgatcttgcgcacgcggatggactccggggtgacttccacgcactcgtcctcgttggcgaagtccagggactcctcaaggctcatcttgatcggcggggtcagggtttcgagcacgtcagcggtggaggaacgcatgttggtcatgtgcttggccagcgtgatgttcacgtccagctcgtcgggcttgttgttcacacccacgacctggccttcatacaccggggactgcggttcgacgaagaagttgccacgggcctgcagacgctgcatggcgtacggggtggcgatacccttgcgatcggaaaccatggaaccgttctggcgaatggtgatggcgccagcccacggcgcgtagccggcagagatggaggaggagatgccggtgccacgagtggcggaaagcagcgcggtgcggaagccgatcagaccacgggacggcacggtgaactgcagacggacccagccggagccgtggttggtcatgccatccatacggcccttacggtcggccatgagctgggtgacggtacccatgtactcttccggcacgtcgatggtggtgttttccatcggctcgttgatcacgccgtcgatcttcttggtgaccacctgcggacggccgacggtcagctcgtagccttcgcggcgcatctgctcggcaagcacggccagcgccagctcgccacggccctggacttcccaagcgtcgggacggtcggtgggcagcaccttgatggacacgttaccgatgagctcgcggtccagacggtccttgatcatgcgggcggtgagcttgtggtccttgccctcggtgccggccagcggggagtcgttggtgccgaaggtcatggagatggccggatcgtccacatggatgagcggcagcggcttcgggtcgttggggtcgacgatggtctcgccgatcatgatgtcgttaacgccggcaacggccacgatgtcgccggggcctgcggattcgaccgggatacgctcgaggccctgggtgcgcagcagttcggagacgcggaagttctcgagggagccgtccacacgggacaggccgtaggtcttgcccttctcaagggtgccgttgtagatacggaccagaccgagtcggccgaggaagtcggaggagtcgatgttggccacgtgagcctgcagcggggcgccctcctcgtattcgggggccgggatggtggagatgatggtttcgaacagcggctcgaggttgtcgttgtccggcaggccaccgtcggcgggctggttcacggaggcgtagccggccttggcggcgcagtagatgaccggcatttcaagcagctggtcaaggtccaggtcgatgccctcgtgctgcacgtcgtcggccaggccgagcagcaggtcggaggtttcgccgacgacctcttcgatacgggcgtcggggcggtcgaccttgttcacgcacaggatgaccggcagcttggcttcgagggccttgcgcagcacgaagcgggtctgcggcagcgggccttcggaggcgtccacgagcagcacgacgccgtcaaccatggagatgccgcgctcgacctcgccgccgaaatcggcgtggccgggggtgtcgatgatgttgagggtgatgccctccgggtggccgtacttggcggccagcggaccggtgtattccacggccgtgttcttggcgaggatggtgatgcccttctcgcgttccagatcgttggaatccattacacgatccggcacttcctcacgctcggaaaacacgtgcgactgctgaagcatggcattgaccagggtggtcttgccgtgatcgacgtgagccacaatcgccacattacggatatctccacgaaccgccatcgaaacctctcttaatactgattcttttgcgtaatcgttcggtacttgcgttctcgagtacttaagtacttactctgaggtgtttattcatacctacacacaaaccgtcacgatggtactcgcacaccttgactatgtcggaacatagaaaagcacctcacaacggcagaactcccgcgtctcgacgaacccctcgcgggatttctgccgtttttacggccttcaaacggcagaacccccgcgtccctttcgccgggacgcgggggttctgccggtaatcaggcaaatatctgttctcccgtcatcgacttccgtcagtcttcgagatcgaggcctttgcgttcgggcaggcagaggacggcgacgcaggcgatgatgaaggcggcggcgaagatgatgaaggccacggccttgttgccgccggacagggtcaggaaccacggcatgaggagcggcgcgatgatggcggcgatgcggcccaccgctgcggcggcaccggcggccgcgccacgcaggcgggtcgggtagatttccggggtcacggcgtacagcacgccccacgcaccgaggttggaggcggacagcagcatgccgaacacgagcacgagggccacagatccggcctgcgagaacgcgaaggcggccacggcggagacggccaggaagatgctcagcgtcttgcggcggccccagacctccaccagccaggcggctaggaagtaaccgggcagctgggcgatggagatggcgagcgtgtagccgaatgacttggtcagggagccgaactggtcggcgagcagcgacggcatccatgtgaacgcgccgtagtaggagaagttcacgaagaaccacgtggcccagatggcgatggtgcgggccaggtacttggagccgaacagttcgcgcgtcttgatcttcggcagcggcttgcccttgggagaggttaccggggctactcccccggcttcctcgaagtagcgcacggccttttcggcttcgtcttcgcgacccttggcttcgaggaatcgcacggattctgggatgtgcacgcgggtgacgattgcgtagagcagtggcagcgcgccgatggccagcgcccagcgccagccccagtcgccggtgttcgggatcacgaagtagccgatcatggcggcgacgatccagccgacggcccagaacgattccagcagcacagtcatgcggccgcgctgtttggtcggcgaaaactcggagaccagcgtggaggcgaccggcagttccgcgcccaagcccagtccgatgatcagtcgggcgccgagcagcatgccgagtgaccaagatagggccatggcaccgttggcgatgccgaagataatcagtgtggcggtgaacacggttttgcggcccacgcggtcggcgatgaagccgcccactgccgcgccgatggccatgccgacgaagccgatggacagcacccatgacttttcggtcggggtgaggttgaagtgcgggtcggcggcgatggcggcgactacgaaggagacgaggccgacgtccatggcgtcgaatgcccagccgatgccggaggcgacgaggagtttgcggtgcgccttgttgaagggcagccggtcgaggcgctcgttgcgggtgagctgcgcgggttgcgctgaagtggtggtgctcacgtcgtttcctttctggtaagtggcgtcagatttaatggcgggtcaggtcggtgtaggactcttcgatggccaagctgatgcgttcgacttgttcgcgggtcagcggcttgcggaaggtcatgcgtaatgccgatttggcgatggacggttcgaggcccatcgccagcaacgtggcaggaatctcgtggcgcccgatggcgcaggccgagccggatgaggcagcgatgccgcgcgcgtccaggtcgacgagcagcgcttccccggtgacgccggggaagatgaaggaggcgtgaccgggcagacggcgttcggggtcgccggtcaggtcggcgcgaggcgcgacccggcgaaccgcgtcgatgagcatgtctcgggacgcgaccaactcacggtactgcgcctgcatgcgcgcattcgattcgttgagtccgatggcgagcgccacggcaccggccacgttctgcgtgccagagcgcaggccgcgttcctgcccgcctccggacagcaccggttcgatgggtgtgcggccgcgtaccagcagcgctcccagacctttgggggtgccgaatttgtgtccggatacggacagggcgtccacatcccagtcacgaaaacgaatcggaatctgcccggcggcctgtacggcgtctacatggatgggcacgccgtgcgcgtgggcgatgcggaccagttcctccacgggttccacggtgccgacctcgttgttggccagcatggtggagaccatcgtggtacgttcactggcctcgccgtcgagctcgcgttcaagtgcgtcgagatcgagatgtgcttgcgcatccacgggaatgcgcacgacttcgaaaccgaaccattcgtgcagccatgccgccgattgggccacggccgggtgctcgatagcggaaatgataatgcgcgggcgacaatttgccggctgtttgccatcggcttcggcgaatccgcagaccggccgcaagcccagtttgcgcatgcgcgccatggcgatgcctttgatggccagattgtccgattcggtgccgcctgaggtgaagatcacgtcatccggccgggcgcccaatgccgcggcaaatgatgcgcgagccgcgtccagcgcgcgggccgcggttttgccgggctggtgcacgctggccggattggcgtaggcctcagtcaggaacggggtcatggcctcgatgactgccgggctcactgattcggtggcggcggcgtccaggtacagttcgccgggttcaccggatgcgttgggggtatcggccatgactagttccaatccaatccgaggtcgatgctgcgcacagagtgggtgagcgcgcccacggagatcacgtccacgccggtgacggccacggctggcactcgctccaggctcatgttgccgctggcttccacgatggccttaccgtcgatgagctccacgccgcgacgggtgtcgtcgagcgagaaattgtccagcatgatggtgtccgctccgccggcgagcacggcgggaatctggtcaaggcggtcgacttccacttcgatatgcgtggcgtggcccacctgttcgcgcacgtggcggatcgcgccggccaggtcgatgccgcgcgcggcgagcgccgccagatggttgtccttcatcatgaccgcgtcggacagtccgtaacgatggttgtggccgccgccgcagaccacggcgtatttctcgaacgggcgcaggccgggcgtggttttgcgcgtatcgacgatgcgggtgcgctcgtagcggcgcggccgggtgacgggtccgtcataatcatcgccgtagatggcgttcaccgcgtccacgaaggcggcggtcatggtggcgatgccgctcatgcgctgagtgaagttgagggcgatgcgctcggcggtgagcaggtcgcgtaccgggcctttcacggtggcgagtatctggccgcgctggaatcgctcgccgtccttgatggcggcggtgacggtgacggccgggttctgtgcggcgaaggctgcggcgaacacgtcgatgccgctcatcacgccgttttcgcgcgcggtgaggtgggccgagccggtttcgtccgcggggatggtggtctcgcaggtgatgtcgccgtagggcgcgtcttcggcgagcgccgcttcgacggcgacgcggatgatgtgtgatgtgagcatgggtcagtccttgatgtaggcgacggagtgggcccagttgtcgactggctcgctgtggtcggtgcgggcgtgggcgcctctcgactcggtgcgggcgagcgcggcggtggcggccacatagcctacggtgagcatgttgcggttctccaaagcctcaacgctgcttgcagcaccatcggcgtttacatcagcctgggcgtttgcggcggcgaggccttggccgagttcggcgatggcggttttcagtccggcctcgtcgcgcagcacgccgacgccatgccacatggtgttctggatgcgggtacgattccacaccttgtcggcggcggtatcgtcagcagcagccgtagcggcaggggcggccagcgcgatcggcgcatggtcgaacacggcaccggtggcggagttcaggaacggttcgggtgcccagaccgcgtcgtcaccgtccgcgacggcggccagaccggcgcggcgtccgtagacgagcccctcgagcagcgagttggaggcaagacggttggagcccatgacaccggtacgagcgcattcgccggccgcatacaggccgggaatggaggtccgggcgttcagatcggtgcgaatgcctcccatgtagtagtgcgcggcgggcgccaccggaatcggctccttgctccagtcgaagccaagcgaacgcgtataggcgtcgatggtcgggaatcggtgggccaagaagctggccaggtcggggttctcgcgggccatcggcgagacgtcgagcatcacgggcttgccgccttgcgcctgcatcacgcggaagttctcgcgggccacgacgtcacgcggcgcgagttcggcgcgcggatcgatgtccttcatatacctgtggccatgctcatccagcagcaccgcaccttcgccgcgcacggcttcggagacgaggaagtgctcgcccacggccatggcggtgggatggaactggtagaactccagatcggcgacctgggcaccggcacgccatgcgacggcgaggccgtccgcggtggcgaccggcggattggtggtgtacgggtacatacggcctgctccaccggcggccaagatcacccggtcggcggccagatccttgtcctgcccgtcgatcagcaggtggacgccggcgatgtggccgccccgcacgatgagatctttgaggaaggcgttctcgatgatgtggatgcgcgggttcttgcgcaccatggcggagacgtccagttcaaacactttgccggtggcgtctcccccggcatgcaccacgcgggcgcgcgaatgagccgcttccaggccgcgcagcatgtgtccatgcgcgtcgcggtcgaagtggacgccggccgcggcgaactcgcggacgcgctccgcaccctcacgggtgaggatgtccacggccttcgggtcgcacaggccgtggcccgcggccatggtgtcggcggcatgcagcttcgggtcgtcgtcggagaagatggctgcagcgatgccgccctgcgcatgataggtgtttgattccaccagttcggccttggttaccaaggtcacgtcgtgtccggtgccggccacggccagtgccgcggacagtccggcgacgccggcgcccacgacgacgatttcagtgttgctcattgtgttgctttcctctgtttttgcgtcatctgctcccttcagtccgctacgcggacagctcccctcatgtacgaggagcgccagggacgaatcacgggtgaacgcgcagcatgcgctccagtgccaccttggcttcgcgggcggtgtcttcgtccacggtgatgcgattgaccacgttgccggcttcgaggttctccaaagcccaagccaggtaggccgggtggatgcggtacatcgtggagcaggggcagaccacggggtccaagcagaacacggtcttgtccgggtactgcgcggccagacggttcaccaggttgatttcggtgcccacagcaatggcggatccggcgggcgcgttggcgatctccttgacgatgtacgcggtggagccagtaccgtcggcggcatcgaccacctgcatcgagcactcggggtgcacgatcaccttgacgcccgggtatgccttgcgggcacgttcgacctgttcgacggtgaaacgctggtgcacggagcagaagcccttccacagaatcatcttggcgcgggcgtaatcggccggatcggcggcgccgccctgtgccttgaacggatcccacagcggcatctcgctcagcggaatgcccatcgcgcgggcggtattgcggcccagatgctggtccgggaagaacagcacgcgcttgccgcgggcgaacgcccattccagcacggcgtgcgcattggaagaggtgcatacgatgccgccgttgcgtccgcagaacgccttcagcgcggcggatgagttcatgtaggtgaccggaatgatctgctgcaagccatcggagtccggctgggtgccgcagatctcgccgagctggtcccagcattcctggacctggtcgatgttggccatatcggccatcgagcagccggcggacaggttgggcagggtcacgctctgttcgggcgtggagaggatgtcggcggtttcggccatgaagtgcacgccgcagaacacgatgtggtcggcgtccgggcgttcggtggcgttcttggccagctggaaggagtcgcccacgaaatcggcgtgcttgatgatctcgtcacgctggtagaagtggcccagaatcaacagtttggagccgagacgctgcttggcgtcggagatgcgctgctgcagttcctcgtcggaggccttgcggtattcgtccggcaacacctgctggcgcggcgcgttggcgggcagacggtcgagcatcgaggcaccgggaccgtagctgggtgtggtggtgtcgaagtgccatgggtcctgggtcagtcctgcatcgcaggtgctttgcgcgcccagcttggcgatgatctcgtcaacggacggcgcagtgaatagtgcggtcatagtggttcctttcctatatacgtctgtgataccggcccgaagcgggtcggcgggaaaaatcagatgcgcgcggatgggatcagcgcgtcgagagcgtcttcacgctcgccttgtctggacagttccacgatgtcgtcaccatcggattcgtggggcgtaccgttctcgacaggtcgtttggggatgtagcggtagacggtggccggtcgttggcggccttcgcgcatcttctccccggtgtcttcaaggtcgcccgaggcaagcattttgcggcggaagttcgccaagtcgaggggttcgccgccaatcgcctcatagacgccgtgcagttggcgcagggtgaacgtggggccgagcagtcgggtggccacgtcggagtattcgattttggagcgcaggcggagcagcgcgtagtcgatgatctggcgatggtcgaacgccagctcgggcagttcgtcttcggggaaccatcgtacgttgtcaccgtcctcgaagcccgcggcctcggtctggccgacgagcgcccagtacacgacggataccatgggcaatccgccatgggaccgggtcgggcctccaaaggtgtacagctgttcgaggtatcgcgggtgcaggtctgtggtcgattcgagggccgcgtaggcagactgttccaacgaccggtcggagcgcaggtcaccgccgggcaacgcccagcagcccaggaacggctgacggacgcgcttgaccaggggcaaccagagacgggaatgggccgagttcgcggcgttgccggaatcggcggcactgttgccggtatcgccttccgggccgagtgccagaatcaccactgacacgccgacctgtggcggtgcgctgcggcgctcggacacattgccgaatcccatgccatgcctctttccataccggttgttctccctgcattgagagcatagcactacttatagtcacaatgaccataaatcacatatcggatggtctagcgcacgaatattggtcaggcagcgggccccaatcgctacgaaatcacgtccgcatcttccgatttcgactgtgtcatttcggcgacggacgggaggaatggcgctagggagggtagttcgtcgagactcttcagacccatttggtcgaggaagaattcggaggtgaccaagagggccgcgcgggattcggggtccacgccgtcttccttgataaggccgcgtaccgtgagcgagcgaatcactccatcggagttgacaccgcggatcgcggccacttgggctcgggtgacgggttggcgataggccacgatggcaagcgcctccagtgcggcctgactgagtctcgcagtctggccgtcggtgacgaatgatgagacgaccggctcgaacgcggcgcgactggcgaactgccagccacgagcggtgcggcgcagttcgaagccgcgcgggcggatgtcacgggattcatcgccctcatagtcatcgtgcagggctcgcaatgcctcttcgactgtgttgcgatccaatgccaaaatacgggccagctcggtggcggtctgcggctggtcggcgaccatcagaatcgcttccagacaggcgggcagcccgccgggaaaatcgtctaccgcgaaatccacgtattcggggtgcgtctcctccactcccctcaccgcggcctttgcggattcagccgtcgattcggcatccgccatgtgttcggttgtattcgttgcgtcaatctgttcagtcaccaatcgccgtccttacgcaaaatcaccttcggaaatgttcacgtcgctcatcgtttcggctacgccgggtacccacctcaggtgcagttcggcaaacggaccatcttgctgatactgcagcacaccttgtttgaagaacacgagcacggccatgaaccgagccaccacctcaatacgagaagtgcagtcccgggtcaattcgctgaacgatatcgactggtcgcccttggattccaatgccgcgatcagccggtcgcgcaccaccagcgattgggcccgcagatcgaccaacggcacgtgcagctgatggatcgacacttcggaggcgggcgcgttggcgatgacctgggcggtcagtcgggcgagttcgagcggagtcagcgtccataccagctcaggcagcatggcggcaacgccctcgtccatggccgccgggtgcgggaatcggccggagttggcggcgatacgcgcccggaagtcacctgcggcctgcttgtaggcgcggtattggaggagtcgggcgaacagcaaatcgcgttcgcgcagcacttcgaggctctgctcgtcgtgctggctatcttcgccgccgggcagaatcgccacgcttttggcctcgaccagaatagaggcgatatcgagaaaggcgctggcctcatccatgttttttgtgaaatcgagcccgcgcacgtatgtcaggaattcctcggtgatcgaggagagggaaacttcggtcagctcgagtctgttgttggcgatcatgccgagcaaggcatcaaacggaccggaatagacttcgaggttgacccggaagccggaagtggcggattcctccgtgctgatttcggcttccgcggagctcccctcagcctcgctacgcgagccagcttccctcagagaggggagccgagaaagggaagtctcattcatcgtttatcgaaacaatcgttacgccacgatgccgcgagcaatgagctcacgtgccacctcacggtattcctttgatgtcttgtgctcaggggcatagaccaccacgggcgcggcggcaaccgtggaatcgggcagtttgatggagcgggagatgaacgtgtggaacaccttttcgctgaacgcctcgtaaacgcgctggcagacctcttcgcagtgcagtgtcttggtgtacatggtgatgagcacgccatccacttccaatgcgggattgatgcgggactgcactttttcgatggactgcataagcagggccacaccgcgcaaggcgaagaattcggcggccacgggaatgatcacgccatcagctgcggcaagcgcgttcacggtgagcaggccgagcgatggctggcagtcgacgatgatgagatcgtattccgacttgagcttgcgcagcacgctgttcaggatctgctctcggcccacttcggtgaccagctggacctcggcggcggacaaatcgatgttcgccggaatcacatcgatgttctcgaatgcggtgtgctgcaccacatcatgtgggtccacggaaatatcgaacagcgcggtgtaaatcgtgttctccacggtattcgcgttgacgcccagtcccacagtggcggcaccctgcggatcgaaatcgacgataagcacgcggcggccatactgggccaacgcaccggcaatattgatggagctggtggtcttacctacgccacccttctggttgcacatggcaatgacacgcgccggaccgtgctgttgcagcggttcgggtgcggggaaggtttcgtattcacgtccaagcaaatcggtaggcatactgtctaccttatcaacatccgggttcgctgggggtgcaacgacatacgttcctgtcataggcagcgttccttgacggaatgcgctgtctttatcgcgggtatctcgccagtcgtccatcgttgccctcgccccctttgtcgggaatacctgctcgcccatcctaatgtactcgccgggctcgcctcggaacaccgttttgccgctggtattccagtgttccgaggtttatggatctcgtctcgtactatgtcgatgcgcttactcggtgcgcagtgcggtggccgggtcttgcttggctgccttacgcgagggaatcaggccgccgatcagcgtgagcaccacgcttaggatcaccagcaccacgccaccggtcaccggcagggcggcattgacgtccgcattgccgatgaagtggtgtagcacggcgttgatcggaatattgagcagcacggtcaagcccacgcccaacaggccggagcataggccgatgatgccggtctccgcattgaacacctgggatacgttgtgcttcgaggcacccattgcgcgtaggatgccgatttccttggtgcgctccagcaccgaaatgtaggtgatgatgccgatcatgatcgaggagacgatcagcgagacggacacgaacgcgataagcacgtaggaaatcacgttgacgatggtggtcaccgaactcatcatgagcccaacgtaatccgtgtaggtgatcttgtctttcttcgagacggtgttgttgtagtcggtgatcgcgtcggcgatgtggtccttgtcttcgaagctgtcggcgtagatgttgatcgagctgggcgcgtcacgactcaccacaccgaatgcggcgaggttgtcgtcgtaggtgccggtcgacacgtactggtcgtagatcgcgacaagcacgtcgttcgaagccgtggcgatatacgcgtcgaaactgtcggcgagctgctgttcgctcatcgcggccatggcggcggcctgatcgccggcacccgccgcgccagcgacacctgcagcaccagcaccagcggcgtccgatgcgcccgtgccggactgctgcccggcgctcatcatcgacttggccatgttcgccttctgcgtcacgcccagcgaagccacgtaggtgcgcgcgtcggccaccttggtggcatcgtccgagggcgagaacgtcatgccgttgagcacgttcgtgttcggattggccttctgatcggtaacgatggcgctggaggccgcacggtcgatcaaatcattggtcagagcgcgcgcgtaccccacaccagcggccaacggcgtggccgaagcatccttcttcgccttgacgacgcccaccaccttgagtttggtggccgtttcgaggcgctgttcgatttcgtccttgtcgttgccgatgaaacggtagtggccgtcatcgcccttgacgtactggtcggatgccggaatcatgtacagcgtctgatcgagggccttagcatagtcgatcttgtcttgtggagtgctgaccttgtcgccggcgttgagcttggacatcatctcgtggtaatcggaggcgggcagcaggccgagctcgtacagcgtggtcagcggcacgctgttgttgtcgtcaagcaccagcaccacttcatccttggacttcggccatgaaccgttgaccacctgatagttgtcggtgataaccttgcctacgagcttgctgtcgtccgctcccggcatgatctcgttgaacgagtcgggcgcggcgttctcatcggttttgccggtcagcatcgacatctgctgcgaggtgatcgacgaggtgccggacatgccggacgagcttgtggacgccatctgcgaggccatcgaggcagagtcgctggatccgatcgtcacgccgtccgcattgaccagcgtgccgtcggggtcgtggtcgaacacggagaatttcacgtcatatgtgtactggatgccggtggaacccacatactggtgaatctcgctcttggaattatccaggtatttcttgaagcgggtcaggttgttttcggtaatcgaactggtcaggctggacgcctgcttgacgctgcggtcgtccgggtagatgccgtcggttttgtgcgtcttgccgccgtatccgtcatcgccgcccatctgtccgcccatcatgctgctcaggtcgaaggtctgggagtcgacggtgatcgggtaggcggtcatcgtgtcacgctggatgtcactgatgtatgtgttcacgccagtcgacaccgatagaatcagcgcgatgccgatgatgccgatcgagccggcgaacgaggtcagcagggtgcgcgccttcttggttttcagattgttgaagctcaacgccagcgacgtggcgaacgacatcgacgcgcggcccatcgtcttgtacacggccggctgttcggccgtctcgtccacgacgaacgggtcggagtcggagcggatcacgccgtcgcgcaggttgacgatgcgcgtggcatattgttccgcaagttcggggttgtgggtgaccatgaccacgaggcggtccttggccacgtccttgagcaggttcatgatctgcacggacgtgtccgaatcgagcgcgccggtcggctcgtcggccaggacgatgtccgggtcgttgaccagtgcgcgggcgatcgccacgcgctgcatctggccgccggacagctggtttggcttcttgttgatgtgttcgccgagtccgaccttctccagcgccttgcgcgcacgttcgcgacggtcggccttgccgatgccggaaatcgtcagcgcgagttcgacattcgacagaatcgtctggtgagggatcagattgtagctctggaacacgaagccgatggtgtggttgcggtacgaatcccaatcgcgatccttgtattggcgcgtcgagatgccgttgatcaccaaatcgccgtcgtcataccggtcgaggccgccgatgatgttgagcaaggtggtcttgccggaacccgagggacccagaatcgcgacgaattcgctgtcgcgtaggttcaggctgactttgtcaagcgcctgctgaacgaaatcaccggttttatagcgcttcgagatcgatttgatctgcagcatgaatacctcttcctggctgacggttcgctgttatgtactgtattgtcacgccttgaatttccggccgactttggtgctcccccgccgcgattacgctatgggcggacgcgtcgcaaaatggtgtgtctcaccgcgctctgggatgtgaggtcagatacgtttcgatcagggtttcagggcttacgtgcgtgtagatctgcgtggtggtcacgctggcgtgcccgagcagttcctgcacggtgcgcacgtccgcgccgccttggatcaggtgcgtggcaaaggaatggcgcaaggtgtgcggatggagtggtttggtgatgccggcccgctccccggttgctttgacgatttcccataccgattgccgcgagatgcgcttgccgcgtttgttgagaaacagtgcgcgcctctcgggaatcttggcgctggagcgctgttccaactcgccacgccccgcattgaggtatgcggtgatggcccggcatgcgtaactgcccaatggcacaagccgctgcttggagcccttgcccatgagtcgcgcgatgtgctcgtccaggtcgatgtcgtccagattcgcaccggtggcttccgagacgcggcagccggtggcgtacatgaattcgagcagggccttgtcccgtaataccaccggatcggttgagccgccgactgccgccgcgtcgagcagacgggttacctcgtccacggtgagtacgtcgggcagggtgctggcgcctttgggcgccttgactgcggccgaaacatccgccgtcaccgcgtgctgaccgagcgcgaaacggtggaattcgtggatcgaggccagtcttcgggctttggagcgggcggactcccccgcctggtcaagggcggcgatgtagtcttcgacgtcttgtttggttatggcgtccggttcgtggatgccgcgggtttcgagccaatcaatgtatttggcgatgtcggattcgtaggcggtgacggtggccgtggcgagccctcgctccacgccgatgtggacgaggaactgctcggtgagtctggtgaatccgttggtcatagtgcccatggtacaaagaaaccccgctcggaagcggggtttctagtgtgaagtcacgacttcaagcaatcaggcctcaaccggagcgttgacgtcctcaggcagggcggccttggcggcgtccacgatggtcttgaaggtgtccgggtcggagacggcgatctcagccagagcgcgacgatccagctcgatgccggcgagacgcaggccctggatgaagcggttgtaggtgatgccctcagcgcggacggcagcattgatgcgctggatccacagcttgcggaagtcgcccttgcgagccttgcggtcacggaagttgtagttaaaggagtgcagcagctgttccttggccttgcggtacaggcgggagcgctggccacggtagccggaagccctctcgagaacaacgcgacgcttcttgtgggcgttcactgcgcgcttgacacgtgccataatctattcctcagctttctaaagtcttgttatttccgggtaagccctatgctcacttctgcagaagctggtgcagcttcttggcctggccgccgcgcagcacatcgtcggcggacagttcacggcgcttgcgagcggacttgtgctcgaggttgtggcgcatggcggaaccgacatgcttcaccttgccggtgccggtgatcttggcgcgcttggaagcggcggaattagttttcatcttcggcattgctgccctccttgctggtttgcttcttgtcggaagtcttctgagaaatcgcggactgcgcgtcggccgcggcctgagcctgagactcctgcttggccgcgagacgagccgcctggcgagcctgacgctcggcgcgggactcggcgccacgacgacgctgctcggactgggtgtgcaccttcttgcccttcggcgcaagggtcatgatgatgttgcggccctcctgcttcggcttggactcgacggtgccgtattcctcgacatcgtcggccagacgctgcagcagttccacgccaccaatcgggcgggagatctcacgaccgcgcaacatgatggtgaccttgaccttgtcgcctccgttaaggaagcgggtcacatggcccttcttcacgtcgaaatcgtggtcgtcaatcttcaggcggaaacgaatctccttgatttccgcggtgctctggttgcggcgagcttcacgagccttgatcttctcgttgtacttgaacttgccgtaatcaatgagcttggcgaccggaggcttcgcgttcggggccacctcgacgagatcgaggtttgcctccttggccaggttcagcgcgacggaagtcgcgatgacgcccacctgctcgcccttcgggccgatcaggcgtacctgcgggacgcgaatctcgtcgttaatacgtggttcgtcgctgatgatgactccaatcctctacttcaattccgtggcgagggcctttgctggagtcctgttcaatgctttgggttcatggcaagccaaagcccgcgccaatatgcgctcagcttctgcagacgcatatcagttctttgcgtcattcctgattacgcgttgtatatcgcaatcgctaggctgtttgccttgaacccgaggccttgaaaggcttccaggtggggttgccccgctttcttgatttctcaagccaaatagaaagtctaccatacgcccggacattcgcggtccgtgtgtcgaacctactgcacggcgcgcagcagaccgccgaagccttcgtctttgagaatctgccgatatgggccggcctcatcggcgatgatttgatcgatggcatgcatgccgagtacttcgaccggcgccttgtcgtcggtgagaatagtcgacgctgagtccggttcgttcaccttccggaatcgagaggcgacctcttccatataccattcgagatcttcgctgccggtgcgctcgtaggtggtctcacgcaggttgagcgccttggaggcctgctgcatggagttctcttcggagccggaacccggcttcttggcgaacagttcacggttcgtggtgttcggcacgtcggccgtcagtgtgttcccattgccgaacacgctggcgatggtatcgctcaacgcctcgttgatcgaaccttggccgtccgagatcatgttcatgttcaccaccatcacgccgccggggttcaggtgctctctgaccatggtgaagaactcggtggagctcatctggaagggaatggtgatgtcctgatacgcatcgaccatgatcacgtcgtacttgtcatgcgaggcggcgagccaggctcggccgtcatacgtggtcacggggatgtcggcgggctcatcgaagtattcgccggccagatcggtgatcttctggtcaatctccacgccggtgatgttcattttcggataatactgcttcagctggcgggcgtaggtgccggtgcccatgccgaggatcagcgcggaattggcattgtcggcgagcgccggcgcagccagggccgtgtcgtagtacatacctgtcagtcctttgtctttcatcgtgacggactgcacgccgaacagcacgttggtggacaggatcgtgcggtcggagaggttcttgacctgcaggtagttgtagatggactcgccctcataggccaggttggtttcccagaacgcgaagccggtcaggggcgagacgcaggacgtggccacgaagatcacggcgctgaccacgcaggcgatgcgcttggccttgatcgagatgaagtagatcagcggacatgccggagaagaattcggtgatgtagaggaatatctttgatttgagaatcggccgttcgcttgcctcggtgatctgtgccatcgctccgctcccctgcctgtgcgcctatcgactactgttctgatgcgtagcctatcagcattttcccggccgatgggtggataccggctacagtaggcatcatgactcaggtatgcgtgatttttggtgcgggcgaatactatgcgggcacgcccgtggtgccggccggcgcgtatgtgattgcggccgatggcgggctcgaccatacgcgccagttgggtatcgtgcccgatgtggtggtgggcgacttcgattcgctggagggccggccgccccgcaccgatgtgcgcaccatcgcgctgcccgcgctgaaggacgatccggacatgctctccgcgctgaaggtcggttggtcggcgggttgccgcgaattccatgtctatggcggtttgggcggccgcattgaccatacgatttccggcattcaactgatggcattattggcccggcatggggcaagcgggtatctgtatggtgatgggctcatcgtcacggccatcaccgatggtaggctttcgttccccgcgcatccggtgcccgaggacggccgcatggtgtctgcgttctcccactccgatgtttcgcttggcgtgaacgagccggggctgaaatatgagcttaaagacggcacgctgaccaatacggtggtgcagggggtaagcaacgagttccgcgacggcgtggacgcggccatcagcgtggagcacggcacactgatcgtcaccttccccatcgaggtggcgttgcctcaggtgagtcgattccacgaatttggcggcgatatcggcgagctggacaccgcagtgtccaagctgctggttcgctgacttgcatgccgcgcgcttgctcatgatgattcgagacattcctccaaaggagaggaaaaatcacatgtcggttgcgggcaatccgaattgtgagcgctcacagaaaatacggcatttttgcccaaaacgcacgctgaaacgttgccatgtgtacagagtcggcattacagtagcaactgttggtaaacaatggcccggtgtgccaaagcgcgccaaggccaccctacaagggagaattacatgacagttaagattggtatcaacggcttcggtcgcattggtcgtctcgccttccgtcgcatcttcgagctgcaggctcgcggcggccaggctggtgacattgaagttgccgccatcaacgatctgaccaccccggctaccctggcttacctgctgaagtacgacagcacccacggcaccttccgtcatgacgatggcactccggttgacgtcaaggccaccgaagactccatcatcgtcgacggcaaggaatacaaggtctacgccgagaaggacgccaacaacattccgtgggtcaagaacgacggtgttgagtacgtgctcgagtgcaccggcttctacacctccgccgagaagtcccaggctcacatcaacgctggcgccaagaaggtcctgatctccgccccggccaaggatgacaccaccccgaccgttgtgttcggcgtgaaccacgacatcctcaaggcttccgacgtgatcgtctccgccggttcctgcaccaccaactccatggccgccatggtcaagctgctggacgagaagttcggcatcaaggccggcttcatgaccaccatccacgcctacaccggcacccagatgctgctcgatggcccgcgtggcaccaagaccggccgcaacctgcgcgccgccgccatcaacaccatcgcccactccaccggcgctgccaaggccatcggcaaggtcgttccgtccgtgaacggcaagctgcagggccacgcccagcgcgtccaggttccggacggctccgtcaccgagctgaccaccgttctgaacaccgagaccaccgccgacgagatcaacgaagccttcaaggctgccttctccgacaccgattactacggctacaacgatgagggcatcgtctcctccgacatcctcggcgacacccatggtggcgtgttcgacccgacccagaccgacgtcaacaccattgacggcgtgaccctggctcgcaccgtgtccttctacgacaacgagtacggcttcacctccaacatgatccgtaccctgctgtacttcgctgagatctccgagtgaaccactgcggtctaggccgctacggttcgtttgagaactaagctgtgagacccccgccttgtgcgggggtttttcgtagtagaacggtaatcatggcaaagaaaaacaagcatgataagggcgcgggttccactccggcgacagtccaactggagaaggcgggcgtggaattccacgtatacgaatacgagcactccaacgaccatatggatgacggctacggcgtagaggcggccaccaagctcggcttcgacgagcatcaggtgttcaagacgttgatggcggacaccggttcggagcgtgtggtgggcgtggtaccggtcagcggacatatggatttgaaggccctggctgcggctgtaggtgccaagaaggcctctatggccgatcccaaggtggcgatgcgcgaatccggctatgtggtaggtggcatctcgccgttgggccagaagacacgtcataagactgtgttggatgaaagcgccatgcaattcgaccagattctggtctccggcggcaagcggggcctgtccgtaggcgtgaacccgcaggacctgctcaaggtcttgaacgccgttgccgcaccaatcggcacgtggtgaccgttcttggcttccctcggtgaggggagccaaggatgactacttcttcctgcgcaactccgccggcagcacgaagtgcatgttttccttgatggtttcgacggacttcataccggtgaagcccaagttttgcagagcgtcaatcacaccggacaccagttcgtccggcacggaggcacctgaggagatacccacggattccagaccctcgaaccacgccggatcaagctcgctggcatcatccacgcgatacgctttgccgcgcttccccaagccctcctgcgccacctccatcagtcgcacggaattcgaggagttggccgatccgacaatcaccacgcaatcggactgctgggccaccagtttgaccgcagcctgacgattcgacgtggcatagcagatatccgaactcggcggctcttgaatccaagggaatttggccttcagcgcggcaatggtatcggcggtctcgtccacgctcaacgtggtctgcgagagcagcaccagcttggtgtcgggcgcaaaatccagcgaatcgacatccgattcatgctcgatcaagtgcacgtgttcggggctctcccccactacaccgaccgcttcatcgtgacctttatgcccgatatagacgatttcatacccctcgcgcacgaaacgcagcacctcacggtgcaccttacccaccagagggcaggtggcatccaccacatgcatgccacgacgttcggcttccgccttcactaccggagatacgccatgggcggaaaacaccaccggaatacccgcttgggcagcagcatccggaatctccgccaattcctggacgaacaccgcgccttgcccggccaagtcctcgaccacatgcttgttgtgcacgatctgccggcgcacatataccgggggcagcccatcctcgcgcgtccgctttccggaagcctccgcggctttgagaatggtctgtacggtaagaatcgcacggtccacacccgcgcagaagcctcgcggatcagcgagcacaacgcttttggtcatcggaacctcctgaacgtcaatagtgttttccagtgtaaggcagggattacaggaatctgccgtcacaacttttccgcgtctcccacaaatcaccggtttccaaggaatccacgtgcttctcgcatgatggtgtgagactcgtcactccacgtattgctaccgtgtttatacgaattgtttattatatgccgcatatcgccaatccccgcctcgatagaggagacgcgctagactggggccagcgatagcaggagctaccggcccaccaacctcactacgggagtgattccatgacgagtaaaacaccacgcaccggaaatcagtattcgattcactatggcgattattccgccgtcatctgcgaactcggcgctaagattcgccgattcgattatcaaggcaaggaaattttctgcccgttcggcgtcaacgacctgacccccacctgtaacggttatgtgctggccccgtggccaaaccgcatcgaaaacggcgaatacgatttcaatggcaagcattactgcgcgccggttaacgaatatcatcccgcaccgcgcaacaatgcgaaccacggatacgcctaccactacatgtggaagcttgaatcgttgaccgatagcgccgtgacgctttcgctgcgcttccccaacctggacggatacccgttcgatgtgaccgtgaccgtcacatacgaactcggcgacaacggcatgaccgcgaccgtcaatgcccgcaatgatggcgacgagccggcaccgtgggctctcggcctgcatccgtggctggccaacggcaagcagggcgcaactgccgccgaacgcgatgccgactccgccgcctgccacctgcagattaaggccgccagtcatgtgacggtgaacgaggcgctgattcccaccggcaccgaaccggttaccggcatctacgacctgaacgatggcccgacgctcgaaggccgcgcctttgatgatgcctgggttgacgtggagcgtgccgccgatggtgcgaccaccaccacattcacccgcccggacggtatcgaagtgaaaatcattggcgatgagacgattaatgcttggcagtgctacaccgccactggcgcaccgttcgccgagcatccgtatggcatcgccgtcgagccgatgaccgccccggccaatgccttccgcactggtgaccacttggtgacgctcgcccccaacggcgactacaccactgtggtccgctacgaagcagtccagaagtagttctgttacgctggctcccctccagaggggagccaatttttttatccttatgtgccgccgcgtcttgggacttatgcgatacgattgtgagcgataacaatttgttccacaaaggagtgtgcactatggctttgaagcctcgcactggtaaccaatatgtcatctcgtccggcgaatggagtgccgtcgtcaccgaactgggcgccagcctgcgcgagctgaagtggcgcggcgaagacctcatcgttccctttgacccgaacaaggtcattccctgctgcaacggctgggtgctggcaccgtacccaaaccgtgtgaccaacggtcagtactccttcgacggtgaagactatcagatgccgatcgacgaatttgaccgtcaatcctccctgcacggctatgcctaccgttatatgtgggagcttgaggacctgcaggaatcgcatgtgacgctctcctggcgttcccccgacatcgccggctacccgtttgatatcaccatcaccgccacttatgcacttgacgagaacggtctcacggaaaccttcaccgtgcacaacaacgacagcgtgaaggcaccgtgggcatttggcatccacccgtggctggccaacggcaagcacgccaccggtcaggccattaccgccgacaacgagctctgccgtcttgagctgcactgcgatactcacgtgaccgtagacgaacacctgctgcccaccggtgaagagccggtttccggcatcttcgacctgcgcgataaccccacgctggagggacgtggcttcgacgatgcctggaccgatatcaccaaccgcggtgaagacggcagcacttccgccgtgttcacccgccccgacggcatcaaggtcacgctgactggcgacaagaccatcaactcctggcaggtgtgcaccggcaacgaaatcggcgagaaggctcgtcaggccggcgtggccgtcgaaccgatgaccgcctacgccgacgccttccgcaccggcaaggatctggttgtgctcgagccgggcgatgactacaccaccgtggtcaccttccacgccgaacaaatctgaaaaaccgaatagccaagcctgacgctcatcgccacatggacacccgtgttgcatcacgtcgtgctcatgtggcataattccgaaggcttatttttttactgcagcaaaggagtccatcatgggcatgcgcggacgtaagcgcaagaatcgtcgtaagaaggccgccaaccacggcaagcgtcctaacgcctgattcttcgcgtttcttatggaacgctcaaggcccgtctgatgatacatcagacgggccttgttgtatatgtcgttacttatcttcgccgcagcagtgatcaagcgtggccttgagccgggccatcagacattcgggtgccacatccgggcgcaagtaggcacgcaacgcggcaatcaacgcctgttcacgctcgtcgcagcaggtacgggggtcaaaacagtcgccctccgtaacgatatgcacgtccgcctggaccgacgcagaggccgagccggtatccactgaacgatgatgcaccgccgtgatatgcacttcggtctggctgaccatgccatcggcccccgtacgggttatggagatatggcgagtacgctctaccggctgatcgttcatcagatctcctttcccgaaagcttgcttgactgttgtggcgtgcgggcgccagtcgcatgactatgtctcactgcggcttgcgtgtcgccattgctgccaacagtttgttcactactttcattatggccggaatcggcgattcgaccaacgttttcgcccaacttcgcggatggtgaaccagccgacgaaccagtcacgtacccgcgctctttcgcatacgaagcgagctcacgcttgagttgcgtgcgggcgcgattcaggcggctcatcaccgtgccgattttcacgccctgctcatcggccacctgctggtaggacttgccgtcgatggcggcgtcgatgaacacctgccggcgttccggcgagagtttggcgagcgcggccatgatttcctcgggcgcgaaggcgtccaaatattcctcttcagcggacttgagcccgtccgacgtatgttcggcggcatcgtaaatgtcccaatcgtcgtattcgccggtggagtcgttggcacgctgcgggcgccgcttggccttggcatactggttgaagtaggcattgcgctcaatggtggtcatccacgcctcgaagttggagcccggctggaatgagtcgaaggccttgaacccgcgttcgaaggtgtcctggaccagatcctgcgcgtcatcgggattgttggtcagcctcatcgcctgccggtacagtgcattgacggcgggcatggcgagctgttcaaatctggcgcgcttggctgccatggactcgcccgatccggctgactgcccggattgcatagttgcttcgcttgtcgtcacgtttcaccattctaatcaaatcatgtgcccatatcgtggtcgatgacgtgtgagccacaacacgctgcaccccacctgtagaatggcgtatcggctagataatagggagaaacaattatggctttgactttggcttcggccgctgacctgctcaaggaataccatctgctgcgtgaaatcatccaaggggatgtctggaccgacgacccggcccgtatcgcttcggcggatgagccgttcgccggcatcacctacgacacccgcaaggtcacgccgggtgccctgctgtgctgcaagggccaattcaaggccgagtatctgaacggcatcgacgaagccggcctggccgcatacgtggccgaaaccgagtactcagccgcaaccgccacccccggcctgatcgtcaacgacgcacgtaaggcgatgagcctgctgtccgccgcgttctacggatatccgcagaacgagctcacggtcatcggcgtcaccggcaccaagggcaagacgaccacctcgtacttcacgcaggcgcttatcaacgccgtctccggcggcaaggccgcattgttctcctcggtcgataattgccttgacggccacacctacgtcgaatccgatctgaccacacccgaatcgatggacgccttccgcatgatgcgcgaggcggccgataacggtatgaagtatctggtgatggaggtctcctcccaggcgtacaaggtggaccgcgtctatggcctgactttcgatgtggccgcgttcctcaacatctcccccgaccacatcagcccgatcgaacaccccacgttcgaggattacctgtattgcaagcgccagatcatcgtcaacgcgaagtcgctggtactcggcgcggacagtctgcacgccgatctgttgcgggaggacgcggaggcagccggcatcggcgtgaccaccttcgccctgcatgacgcggataatgccggcaccagtgcggacgtcgtcgcctggcccgccgacccggcgcacgcctccttccacatcgccgacggagatcaggcccttggcgactaccatctgtccatcgatggcgacttcaactacctcaatgcggcggcagccatcgccatcgcccatgcggttggcgtatcgctcgatgacgccgacgcactgcacgccatcgaatccgtacgtatcgccggccgtatggaacagttccgcgacccgcagtcaaacacgctcgccatcgtcgattatgcgcacaactacgcatccgtcaccgcgctgcttgacttcgtctacgagcgttggggcgaggaaaacccgcgtatcacgctggtgaccggatcggccggcaacaaggcctacgatcgtcgtaaggaaatcgtcgaggctgccgagaaccgtatcgcgaacttcattttcaccgccgaagatacggacaccgagccgatcatcgacatctgcatggaaatgcaaggctacatcacgaacaaggatgtggtctccacggtgatttccgaccgtctgacggccatcaccaacgccatttacgatgcccgtgcgcacgccgaccgattcaacatcctgctgatcatcggcaagggcaacgagcgttggatcaaggaccatcgcaagcatgtgccgttcgacggcgacgatcacgtcgtcgaacgcatgtttggcttgtgacgggattccggccaatcaaatcctgatcggatcccgattagcccacatcagatcacgcgcaatacgaccaaaccagaaacacgacatacggatacaaacgaaaaaggatagctgaatcgtaatgatcacgttggagaaagttgacggagccacactggaagccgaagccgagaaggccggcatcacgttgcctatcgaacagaccaaggtttggtctggttttcaggcggatatcgacggacgcacaccatggggcaattatctgatcaagcgtgatggtgaattggtcgccgtgatctcctttatcgattttgagacgcacggttatcattatctgcgctcgatgcatgggccggcgtgggtcgccaagcccaccgaggctgaggagcgcgaggtcgtcgacgccatcgtggacaccgtcaagaaggccgacaagagcatcgcgttcctgcgtatcgacacctggttcgccgatggtacggagaaggtgctgtccacagtgccgtacgaccagaccgtggtcatcgacatcaccggtggcgatgatgagattctggctcggatgaagcgtcgtggacgccgtgacgtgcgcaagtctctacgtgaatgcccggccgaggttgccgatgagacggataaggccctgaccgatttctccgaatattacgatgtgatggtcgaaaccggccagcgcgatggattcacgcctgctccgatgagcgactactccgatatgatcggcgcgttgggtgccgatcattgccgtgtgttcgccgcacgtattgaagaccgtgtggtggcatggtcgattgtcaccgtgaacggcacgcatgcggtgcgctactatgccggcatgcgcaacgaggttatgcgtctgcatgtgaccgacaagctgctgtattccgaatgctgcatcctgggctcgcagggtattacggaatacgatctgatgggcatcggctccgatttcgcgccgtcgctcaaggggcttaacgagttcaagtgcaagttcaccgaggaaatcaccccggtggcccccgcccgcgacgtacccatcaagaaggtcttctacaagacgctgcagactgtgcagggcgtgcgcaaggcattacgctaataccaccccgctcccgctggtgggagctgtcgagcgaagcgaaactgagggtggtctttcgagatggaccaccctctgtcacctgtggcgccagttcctaccagcaggaaccattcatttatcgttcgagtttttggctcaccacggctgttacgccgtcggctcgcatggttacgccgtagagcgcgtcggcaatcgacatggtgcgttgctggtgagtaataatgatgagctgcgcatgggcgcgtagctcattgaacgcattaatcaaacgggtcaggttcacgtcgtccaacgcggcctcgacctcgtccatcacatagaacgggctggggcgggcggtgaaaatcgcgaacagcaacgccagcgcggtcagtgaacgttcgccgccggacaggaggctcagctgtttgacacgcttgccggccgggctggcctcgaccagtacgccggtggtgagcatgtcttccgggttttccaggcgcagtcgcccggtgccgcctgggaacagcgtggcgaacatctgctcgaatgcctcggcggtatcgtcgaacgcggatttgaatacctggaccatcgtggaatcgagatccttgatgagctgcatcaaatcgtcacgtgatttgaccacatcgttgcgctgatcattgagatacttgttccgctcctcaagcgcttcgaattcctcggtggccaaagggttgatcttgccgagtgcggccagatcgcggcgagccttatcgagacgcttcttctgctcctgacggttatacggcacggtcttaaagcggtcggaatcgccgttggtgccggtctctcccccggtttctccctcttcggtctcagcctcagcttccgtctcatccaacggcacagggttgccctcatcatccagcacgggcaccggctgttcggggccgtaatcactaaccaattcctccaaagtgagaccgagttcgtcggacactttttgcatgagctgcccggattcggcggccaaccgttcgcggtttacatccaaggcatgttcgcgcccggtcagatcggtgaccttgggctcgatctggttgcgctgcgcgcgcagggccttgagttcctcgtcatggctggaggcggcggcctgcagctcgtctcgtttggcggccacgtcatgcagcgtatgctctaccatggcggccactgctcgcgcgtcatcggccacgccttgcaggtgtgcggcctgctcgcgtctgcgatcgttcaacgcctcgatgcgggcgcggcgttcggcggtttctttggcgttgtcccgcagcagcccggcctgtcggctcagtgactcccctttgcggcttgcttcggtccacgcgatttttgcggcgacctcatgctcgcgagtcaggttcagttcgcgctccagcgtgcgttcgcgttcatcgagttcgtcgaaatcggcatgttccgctgtggattgctgggccgatgccaaagcgcgattgaggtcgtcaagcttgagctgatgctcgttgcaattctcttgggtctcggtgattttcctatccagctgctcgagctgacgggtgaacgatgcgacgcgatctgtggcggatttcagagatttctccgcctgctgggctttgagccgggcttcggtgcgtttggcggattcctggtcgacgagtcgagccgcttcatcgcgcttggttttggcctcggccacttgctcagccattccgccgtcttgggcggtcaactgtttgacctgtgccaatgctttgtctcggcgggcggccagagacaggtccgattgagagattgaagagccgccgaccgccgccacgccgtgtgtgaaggtctcgccgttcttggtgacggcccgcatggcttcgccgaatgccacaatctgttgggcttcgtcggcggtgccggccgcggctacatcagccagcaggagacgcacggtgcgcacgaccgcttcggcctgtgccgggttctcggcatccgggttcgcggtgacgagtgctgccagcgcgttgcccgattgcggggcggcccccgcgttctcggcgctactctcctccgactccgtgcccggctctgtggcgggatcgccggcaatgctcgcggtcagcaccacggctttgccgagcttatcttcccgagcgcgttcgagggcgtgcaacatgttgcctgccgcgggtaccacgatggcgctggcatactggtcgagcgcgtgggccacggcttcttcccagccttcggccacatggatgaagtcggtgagtcggccaagcgaggccacgtccgtatcgcgctccaacgatccggaggcattgcggctgtctagcgtgtcggcaagcgcatcggccttggatttgagcgagatgatcttggactgtatctcgcgctgcttatcggcgcgttcattcagtcgttcgcggcattcggcgagcgttgcacgtgcggcgtccaatgcggcaccgtcatcgtcggcaatggagtccgcttcgctgcgcaatgcgtccagctgttgctgggcatcgtcgcgctgggaagtcagcgagtcgcgttgggaggcgtaatccttggcgcggctggtcgccagttgtacggcggattcctcgcgggcgatgagttcgcgcagtcgggcgatttgcgcatcgcgttcctgtgcggttttgcgcagttccgtcaaggtctggcggactgaggcaagctttttctcgtcgtcggcgcgttcctcggtggccttgtcgagtgcgatgcgcgcatcggccacggccttggtttgtgccgcggcctgagattccagttcctcggctcgtttgacgagcatgccgggatcctcaccgaagttggtgacgatctggccggtgagtgaccggctgcgctcttcggccaactgggcgagcgcgttcagtcgttcgcgggtctgcgagaattcatgccagtattggttggccttggcgatggccggactggattcggagctcaacgcctcgacctgttcgatgcgtactttgacttgggcgagttcacgttgggcgacggccagctggttgcgcacagcgccaagttcttgacgtaccgtgtcgcgacggctcatcgagcgttgagcgtcttcggcgtacaggcgggcttgggcgtcgcgtacggatatctgaatcgcgtcggcgcgccgggagatgcgtgcctggcgtccgagggggccgagctgacggtgaatctcccccagcaaatcgtcgagtcggctcaggttcgtttcggtattggccagcttgcgcaacgcgcgttccttgcgcttgcggtgcttcaggatgccggcggcctcttcgatgaacgcacggtggccggacgggtcggccttcagaatcgcatccaatcgtccctggcctacgatcacgtgcatctgctggccaagaccagtatcggagaggagttcctgaatgtcgagcaggcggcattgcgagccgttgatcgcgtattcggagcctccgttgcggaagatggtgcgggagatggtgacttccgtgtaatcgatatcgagcgtgtgatcggaattatcgatggtcaggctcacctgtgcacggcctaatggcgggcgggaggacgtgcctgcgaaaatcacgtcctccatcgaagtgccgcgcaggtttttggcgccctgctcacccattacccagatcagggcgtcgacgatgttcgacttgcccgaaccgttggggccgaccaccgccgtgatgccgggctcgaagcgcagcgtggtgacggaggcgaaggatttgaatccgcggagggtgagttccttgagatacatggcgtgagactgttttccgtatgccgggtgtccgggtatccgatatgccttggatgcgggttaccgggcgtcggcggaatcgtcggtgtcggcgctggctgtgtcagtgctgtcggtgtcggcactggccgtgccggtgccggcgtcaccggcctgttccttaccgaggccgaggacgtcgaacacgtcgaagtcgtccgggcttaccgaatcctcgaggttgtcggcggcctcatcctcggccttgtctgccggctgatccgaatcgtccgggtcaaccgccggctgatgaacggccatagcctgcctcatcgtggggctggcgtgttcctcaagcatcaggcgtgcgtcgccggcggtgacgaagctgccgcagataagcacgccgtggccgtagcccacgcccagctcgtcctcggcatcgaccatattgacggcggtctgaatcgcgtcaggcaggttcgcttccttgatcacacggtcacggccgaacacgtccacggcaatcttctcaagctcgtcggccggcatcacgcgctcgcgccacgagttctcggtgaccaccacggagctcaggatcggctccagaacacccagatattcctcgacctgcttgtcgcgcatcatggcgaccacaccgaccagctgcttgaagtcgtagctttcctcgatggccttgcgcagggcttcggcggcattcacgttgtgtccgccatccagaatgatggtcggtgaggtgcggatctgttcgatgcgtccgggaatcttgaccgagctcaacgcctcggccaccaagtcgccgtccagcggaccgttgaccggaatcaccacttcggaggcggcgagcgcggcaagcgcgttgtgggcctgatgctcgccgaacttggcgatcggcacgccctcgtaagtgccgttgggcgtggtcagggtggcgacttggccgccgactgcggccatacggtcggacgcggtcatttcgtagccgtcgcgcacgagcatggcgtggttgcgttcggcggcttcggcgagaatcggcatgacggcttcctcatgcggctgcgggccgatgatggcggtgcagttcggcttgatgatgccggccttctcggtggcgatctgttcgacggtgtcgcccagccactgcatgtggtccatgtccaccgggccgatgatggccgcatccgcgttgagcacgttggtggcgtcccacaggcctcccatgccgacctcgacgatggccacgtccacgggcgtgtcggcgaacttccagatggccatggcggtgagcacctcgaagaagctcatcttcggcttgccttgctcctccatcttggcgtccaccagggccacgagatccttggtctgatcccagatgtcgatgaaatcgtcgtcggacagctgctggccgtcgatggcgatacgctcgttgatcttctccagatgcggcgacgtgtacaggccggtgcgcataccgtaggcacggcagatggcctcggccatgcgtgcggtggagcctttgccgttggtgccggtgatatgaatcacgcggaacgactgctccgggtggcccaggatgtcgagcatcaggttcatccggtcgagatccagattggtggtgttatgctccggcgggcggctcatgatgtccagttcgacgtcccgcatgctctcattgttccgattcggatgctcgaatgacatatcctcttctaacctctgctcgtgttgctgttgcgccgttcggagtgcgtatgccacttacgtgttcgcgccattctcgtcatgtctacgcatgcccgcatatattccgcttccgcatgcgcaggaagctccccttgcacaggtttgctctgcatgattcgggattcttgccttcacgcgtggagccgcactccctcaattccctctatcctagccgccggggtggtttatcgtgcgcgcacagtgaaaccgtctcatatgtcgccgccgcgcgggcagtctctacctgcagccacgcacagtgaagccgtctcatatagttgcaatgcggctcttgccgtcggcatctcattcttagtcggctgcaatccaaaacttgtatgtccggcgacgctgatgctattcagcgtcggtacagtgccagcttctggcggtacaccgacgctatgatgctcttgcgagtcggtggctggccaaaacctggattaatcccgactccatcgcctctcagtgtcgtctcctcgccaaggcatgccattctgccgtcgttgagaaatttcaacgtcgtcaatcgaccatgtcttgccccggaaacgactctcacaaacgtcctctacatcatcttttgaactcgcagaggctcattcactgttatgactgctctcaccgtcggcagccgtccaagccctggatctatgccgccaataaattgcagcaaatcgtcggccccgatacaaccattggactcacgccgacgctagattccacactcagacagaagccagccaatatctgaaccagcaccgacggcgtacaaagcataagcaccgttaaccgtcaattcgccgccctctaccagctacatccgccttcgccgatgatatcttgttcgaatccccaaagcacgttgttcgaatgacattactgatggtggataagttttgtgtgttatccactattccgaattagcggcctaataccttgaaattatcgggagtatctcgctccaagacagccaagctccgaggctagaaccacaatggctgaaattcatacttacgctgcttcgttccggctacgctcgacgtcatgaagacacacaaagcagtggcctcgctcatatcagccgcgcagaatgagctgagatgcgtctattcaagaaatgaagcggaacagaccgctctacgccgccgtgcccagagtggtgagttgttgaaagtgtatgacggcattcccagtctttatgcaaatactgcatactgggatggtttgacgccgccggagcgaacgttgcatatagcccgcgctcttgcgcaagagcatcctcagtgggtttttggcggcttggtggcagtaagtgcctatggattcgaacatcaatggcatttgcatgatgactgcataaccatcgtgacttccgatcatggatctcgtcaatgccatcagcgcttacgacatgtctatatgcccgatatgaacaatccgaagacacattacgaggcctccggcctatccctgatatcaccggctagaaccttggtcgaggccgctatagaccttgattttcggtttgcgttaccgatctttgactcggcccttgccaagggaataaccaaggaagagatagccgccgactgcgttcaatggagaatcgattatgcccgagtattccgcctgctgcgctatgcaaacgaaaggagcgagaatggtggagaatccctcgcgcgaggcaccatcatcgaagatcgcttcctcacgccgcgtattcaggtaacggtgaccgacccacagacgaataccgagtaccgcgttgatttcgtatggaagctcgatgacgggcgcgtgatagtggccgaatacgacggcacacaaaaatacgtggacccagccatgaccgataaccgcagcattcaggaggtggtggccaaggaacgcgcacgcgacgagggactgaaacgagccggtgccaccgaaatcgtccatttcacatacgccgacgtcatcgaacgtactccgctgcgggtaaaactgatcaaagccggggtgcctcaggtggagacctccgcatagcagtgagtcccgcgacgcgataaaccttcatcgcatgggttcacatggattcagcccacagaatatgtcaatatcaatcggcaagctccagcccaagcccatgcccctctccttccctaccgagaacaataaacgggcccgcattccagcccgccgcactcgccatatgggcatgtccggaagaccgtccaaattccgtacttggttttaccgtcagccgtcaatcgtggcacatcgcataaagccgactaatatgaggtgggaatcgatgattcgacaacaactacatacaggagagtggcaatgggtgaagtgatcaccgccaaggacaaagaatatgaggccgaggagcgcgctacggcgccgggcgcgaaccagtcgatgagcgaccgtgtgaacaaccgctcgctgcgcccgcagtcggctgcattcaaggagtttatgaagtccggctgggccgacgatgatccggagatcaagcctctcgaatcctccaagttcacgccagcccgccttgaggcgctgggcaaggccttcccgggcgagcgtctggtcattccggccggccagccgaaggtgcgcaacaatgattgcgattacatgttccgcccggacaccacgttcgcctactacaccggtctgggttccgattacgaggccggcgccgtgctggtcctgaacccggtcgaccccgattcccccgaagccgccgccggcaagacgcacactccggaactgttcgtggcacctcgcgccgacaactccaccgaggacttcttcatgtccgcccactacggcgaatactgggttggcccgcgtgctggcctcaaggagatgcaggcgatgaccggcatcgagacccacgacatcgcccagctggccgacgccctgtccaaggacgtgggtgccgaggccggcgccgtgcgtgtgcgcgtggtcagcgagaccgatcccgaaatcacctcgatggtcgagtccatccgcgaggccaacggtttcgccgatccggacaagaactccgcatccgacgacaagctgcacgagttcgccgccgaggcacgcatggtcaaagacggctacgaaatcaacgagatgcgcaaggccgtggacgccaccaagcacggcttcgaccgtctgctctccgcactgccggccgcgctcgacaagccgcgctccgagcgtatcctcgaaggcgcgttcaacgccgtgtcccgtgaactgggcaacgccgtcggttacgactccatcgtggcctccggcccccacgccccgattctgcactggatgcgcaacaccggtgtggtgaagaccggcgacatgctgctggtggatgccggcgttgaggtcgattccctgtacacggccgacatcacccgcaccttcccgaccaacggcaagttcaccgacttccagaagcgtctgtaccaggccgtgctggactcgcagcaggccggtttcgaagccgccaagccgggtgccacctactccgacatccaccacgcctgcatgcgtgtgattgccgaacgtctgcacgattggggtctgctgccggtgagcgtcgaggagtcgctgtctccgcaaggccagcagcaccgccgttggctcgcctgcggtgtggcccaccacttgggtcttgatgtgcacgattgcgcgcaggcccgctatgagtcctatcagggcgcgaagatcacgcccggcatgatcttcaccatcgagcccggcctgtacttccgcgaggatgatctgctgattccgccggaataccgcggcatcggcatccgtatcgaggacgacgtgctcatgaccgagaacggccccgaatggatttccgccggcatcccgaagcagatcgacgacgtcgaagcctggatggccgagcaggctgcccaagcgaagtaacctaagctccctctgatgagggagcttcttttctactaaggaggcaatgtgtccactccggaatttgtgttggaattgcgtaagaagatcggccatgatctgttgtggctcaatggcgtgaccggttgtgtactgaacgaacatggtcaactgctgttgggccgtcgttcggacacgggcgaatgggcgatggtctacggcatcaacgagccgggcgaacagccggcggacacggtggtgcgcgaaatcaaggaggagacgggcatcgatgccatcgtcaccgatttggtggccgtcacctcgtcaaacaaggtactgacctacgccaatggcgacaacaccatgtacatggatcattcgttcctgtgcgccctgaagcccggcggcaatgccgagccgttcgtaggcgacgaggaaagcctgagcgtcggctggttcgatctggatgacctgcccactcccctggcggccagcacgagcgagcggctggagctgttccatacttacatcgagaacaaaaaacacggcgacgcccacgccctgttccagttcgatgggcagcagtactagcggatataaagttagctccctctgacgagggagctccaatgctatgcgattacgcctcttgggctaggagctcgtggaggtgggcgcggtgttgctgctgttcgcgcgggtcgggcacgggcagggaggccagcagcttcttggtgtacgggttctccgggtgctgcataatctggtcggcatcgccgtgctccacgatctggcccttatgcatcaccatgatgcggtcggcaagcatatcgaccaccgccaaatcatgggtgatgaacaggcacgcgaagccgatttccgcctgcagtcgcttgaacagctccaacaccttggcctgcaccgacacgtccaatgcagaagtcggctcatcggcgatcagcagcgacggcttcaacgccaaaccacgcgccaaagacgccctctggcgctggccgccggacagctcatgcgggaaacggttcatgtaggcgcgcggcagctggaccatctccagcagatcgcccacatagttcttggcatcggccacggaaccgtacttgtggtgcacgagcagcggctcggccacattctccgcgatggtcatcagcgggttgaacgaggagcccggatcctggaacacgaaaccaatgtccgcgcgcttgggcttgaagtcacgctccttgacgccgttcatctcgatgccgagcacgttcagggagccgccggacaccttctgcaggccggcgatggcacggccggtggtggacttgccggaaccggactcgcccaccaggcccagcacttcggagcggtggatggtgaagttcgcgccgtccacggccttgaagtcgggctgcatgagatggcccgggtacgtgatggtcaggttcttggcctcgacggcgatcggctgttcgcgccaatcggccttgcgctcgatcggtttgccctcgcggtcgcgcacgaccagcttctgaccgatgcgcggcacggcacccagcagtcgcttggtgtagtcgtccttcggatggtagaagatctgctccacgtcgccctgctcgaccacgtggccgcggtacatgacgaccacctggtcggcgatgtccgcgatcacgcccatgttgtgggtgatgatgagcacggaggcgtcgaactcgtcacgggcgaggcgcagcaggtcgagaatttcggcttgcacggtcacgtcgagggcagtggtgggctcgtcggccagaatcaggccggggttcagcaccaacgccatggcgatgacgatgcgctgcttctggccgccggagaactggtgcgggtagtagtccacgcgggtttcggcatccgggatgccgaccttcttcaggatgttgatggccttggcgcgcagttccttcttgtccttcatgccgtgggcgcgcaggccctcttcaatctgccagccgatggtgtacaccgggttcagcaccgaattgggctcctggaacaccatcgcggcctcggaaccacgcacttcgcgcagctgttcgccgctcagggagagcacgtccagcgaatcggagccatcgcgcttggacaggtagacggcaccggaggtggtggccgtctccggcagcagcttgatgatggagcgcgcggtcacggacttgccggaaccggattcgccgaccacgccgaccacggtcttgcgcggaatggtgaagttcacgtcctcaacggccttgatggagccggcgtcggtcatgaaggagacggacaggtccttgatatcggcgagattcttgttgttttcgctcatctctcactccttgccttccggcttgccctcgccggtccattcggaggcgacgatggtcgggtcatggtcggtgacggtggccggcgggtcgacgttcgcgtcgagttcggcaatcacctcgttgcgtgcggtcggcttctcgtttgggtcgacggacgtgtcttcgatcgatccgaccacttcgccggcggacttgcgggcgcgcagacgcgggtcggccagatcgttgagcgattcgcccacgagcgtgatgccgagcacgatgagcacgatggcgatgcccgggaacacggcagtccaccagatgccggcggtcacgtcggaaaccgagcggttcaggtcgtagccccattcggcggcggcggtcggctcgatgccgaagccgaggaagcccaggccggcgagggtcaggatggcttcggacgagttcagcgtcaggatcaccggcaacgtgcgggtggagttcttgaacaggtgcttggtcatgatgcgccaggtggaggcgccgaccacgcgcgcggactcgacatacgcggattccttgatgcggatcacttcggcgcgaattgtgcggaaatactgcgggatgtacaccacggtgatggagatgccggaagccagaatgccgctccacaggccggactggccgtgggagatcatgatggccatcagaatggcgagcagcagcgaggggaaggagtagacggcgtcggcgatcatcaccagaatgcggtccacccagccaccgtagtagccggagaccaggccgagcagcacgccggcgaagatggagagcagcacggccacgacgatggcgatgacggcggtgcgtgcgccccacaccacacgggagaacacgtcgaatccggcggcggtggtgccccagatgtgttcggcggagggtgcggcctgcgccgggaaggacgtgccgtcggcggccttgatctgggcgtggccgtagggggcgatcagcggggcgaagagggccacgagcaggaagaacgcggtgatcgcgagaccggtgatcagcatgcccttctgccagccgaccgccacgcgcagttccttgatgatcgggatcttggtccagaacggcgtcttggtgctgacgttgagcttggtaaggcggtcgtcaccggggacggtgatcttgtcttgggatgcggtggtcatctcagtacctcactctcgggtcgataagcgcggcgatgacgtcgacgaggaagttgacgacggccacgatgatggcgataaggatcacgatgccctgcacggccacgaagtcacgggccttcaggtactgggacagcatgaagcccaggcccttccattcgaaggtggtttcggtcaggaccgcaccggcgagcatcagggcgatctgcatgcccatgacggtgatgatcgggatcagggccggtcgccaggcgtgcttgttgagcaggcgcttttcggagacgccgcgcgagcgggcagcctcgacgtagccggaattgtaggtggagatgacgttggtgcgtaccagacggatgaacacgccggcggtcaggaggcctagggcgacggccggcagcacggcgtggcgcagcacgtcgacgagcacgttcatgtcgccgagctggatggcgtcgatgatgtagaagccagtcggcgataccagacgggtgaactgcatttcggagttcaggtcggagcggccggaggctggaaggatgttgagccagacagcgaagatgagcttcagcacgaggccgaggaagaacaccggggtggcgtagcacaggatggcgaaggtgcggatgccggcgtcggcggcacggtcgcgtttgcgggcggcgagtcggcctaggccgatgccgacaatcagcgccacaatcagggcgaggaaggccagttcgaatgtggcggcgccgtagtgcgtaagaatgctgatcaccggctggttatcggtcagcgtcgtgccgaggtcgccgtgcagcaggccgccaagatagtcgacgtattgcacaatcagcgggcggtcatagccggccgcgtggatgcgctgctggagttcggcgggtgtcaggcggccgcccaaggcggcggaaatcgggtcgccggtggcgcgcatcacgaagaacacgatggtgaccagaatgaaaacggtgggaataatgagaaggaacctcgtcagcacgaagcggaagaaactacctgacagtcggttcttcttcgtcttggctttcgccggagtggtgctggaggtcgctatggcgctgtctgacacgcgatgctccttggtgttggtaatcgatatataaagcaataaaggctcccctctccgaggggagctggcggcgaagccgactgaggggagtcatacgagttaggctcccctcagtctgccgtcggtagacagctcccccctcaaagaggggagctcatgctggatcagcccttggtgacggaggcatagcggaagcggaaggaagcgtcgagggtgacacccttcacggaggtgccggtgacggcgacctgggcaccctgcagcagcgggatggtggagaggtcttcggtctcgagcttctgaatctgcttgaggatgtctccacgagcggactcgtccttctcgccggcctgcttgacgatcaggtcgttgacttccttgttggagtagccgttgttcacgaagttaccatcgcggaagaacggggacaggtagttgtccgggtcggagtagtccgggaaccatccaagctggtagaccgggtacacaccgtcggaatcgtcggtaaccacacgatccttgttgtactgggtccattcggtggactgcatgtcgaccttgaacaggccgcctgcctcaagctgggacttcagggcagcgtactcgtcggcggagacggagccgtagtggtcgttgttgtactggagcttgaggtcgaccggggtggtgacgccggcgtcggcgaggaccttcttggccttctcggtgctcggcttgccgttgccgtcgccgtaggcggacttcagcgtgtcatcgtgaccggccaggccgtccgggatgaaggagtacatcggggtgtaggtgcccttgtagaccttggtggagagctcttcgcggtcgatgaggttggcgacggcctggcgcacggccttggccttgttggcgtcggcgtcgggctgggattcgccgtagggctgaatcttgaagttgaaggcgatgaagcgctcctcaccgcccgggcccttgacgaccttgaccttggagtccttggagaggtcctcgatgtcggtcgggctcagggagcggttggccacgtcgatctggccctgctggacggccatcttcaggttggaggcgtcggcgaagtacttgacctgcacggcggagttcttggccggggtcaggcccttgtaggagtcgttcttggcgtaggcggcggactcgttgatcttgaaggcggtcagcgtgtacgggccggcaaaggccttcttggagacgatggtgtcggcgtcggtgagcttgtcggcgtcgaaggtatcctcatcgacgatcgggccggcggggctggacatgacctgcttcagagtcacgtcaaaaggcacggaatccttgaacaccacggtggtgtcgtccttggcggtcacggattcgacgttggcgagcagggagctcgggccgttcgggtcgttgatcttcttgatgcgatcgtaggagaacttgacgtcggaagcggtcaggtcgttgccgttggcaaacttcaggccgtccttgagcttgacggtgaattcggtgccgtcatcgttccaggtaccgtcatcggcggcgatgtccgggctcagttcggaggtgttgtagtcctgggcgtacaggaacgggaacacctgaatctgcacggcgtatgaaccgttgtcgtaggagccggcggggtccaggctggtgatcttatcggtggtgccgatggtgatggcgttgccggaatcggcgcctgcggcggtgtcatccttcacgccgccgcaggcggtcagggatgcgatggcggccacggagacggcggcggccagaatcttcttggaattcaacaggaatcctctctcataacttgtttccacgtcatcactgcgggcgtggattaccgcctgactatggtgcggatgtgttacctctgcgtttccatagtcatcgacttatgtttcgcttgtggcgaccaaggccggttttatgcggtatcgagcagtattacggattcttgtattacgacgtgaataacggtcacatggtgagacaaatatactatcatctcaccatgtgaccatgttcgtagacgaatgccttccattcgtcaaccggtcggcctactgctacttgagcttgcggcccgcgcaccacacctgttcgaccgtccagtcggccgggtccgcaaggttgaaatcggcggcgaagccgggggcgatgaggccgatcggcaccccggtgaccgggttcggccggtcgaagccgaacgccttggccggcgtcagagtggccgcctcgaccgcgtccaccgggctgaagcccagttcgcacaccgcacggcgcacggcgacctccagcagcagagtggagccggcgatggcgccgttggagaccaggcgcgcatgcccgccgaccacgttcacgtccagcgcgcccaacttgtaggcgccgtccgggcagtcggtggcggccatcgcgtcggtcacgaaggccgtgcggtgaggcgcgaaccggaaggagaggctcaccatcggatcctgcacgtggaatccgtcgttgatgagctcgatggtgacgcgcgggtcctccaccgcggccggaatcggaccgggttcgcggtgatgcaggccgttcatcgcgttgaacatgtgggtcatgatgcccgcgcccgcgtcgaagccggctttggcggtctcgtagtcggcgtcgcagtggcccacggccggcaccacgccggcagcggcgaactggcggatggcggagatgccgtggggcagttcgggggcgatggtgatctggcggatgcagccaagcttgccggaggcggggtcggcaccggaggcctcaagcatcttatcgacgatgtcaggcaccggatccttgagacattccgggtcatgtgcgcctttgcgcgccagggccaggaacgggccttccagatggcagcctaggatgtcggggcggccggactccatcttggcgcggacggtgcggatgttgcggcagatcacgtccacggggttggtgatcagcgagagcacctggcgcgtggtgccgtgcacggcgtggccggcccgcgccacgtcgatgccgtccggcccgtcatcgaagctcttctcccatgcgccgtgcgcgtggatgtccacgtagccgggggtcagaatacggccttcggcgtcgatgaccgcgttgcgatcggccgggtcgagccccaccgtgcggcagtagtgctcgaaggtctcctcccccgtgccggccgccacgatgacgccggcggcatcggagacgacccaatatccgcgccgttcgccgcgcgcatccaccttgcgcgcgttacgaatcgccaccggagccggcttgccctccagtgccgcggtcacgcgcgagactatctcgttcctatcagacatgttgttctccttaccgctcatgcgctcccgctggcgggagccagcacacgataactcagatgccctgccaggccggcttgtgggtgtaggcataacggtagtagtccttgtggcgcaggcgggacgcggcctcctcgtccacgataatcgtggcgtgcgggtgcatctgcagcgcggaagccgggcagaacgctgacacgccgccttccaccgtctcctcgatggcttcggccttgccggcaccgaacgccagcagcacgaggtgacgggccttcatgatcgtgccaataccctgcgtgatgcagtgggtgggcacttggttgatgtcgttgtcgaagaagcgcgcgttgtcgatgcgggtctgttcggccaaggtcttgacgcgagtgccggaggccaacgaggaaccgggctcgttgaagccgacgtggccgtcggtgccgatgccgaggatctgcacgtcgatgccgccagcggcttcgatggcacgatcataggccgggccggccagcgcgactttgtcgccgtcttcgagcggagtgccgttgagtacgtcgccgggcacatggaccttggccgggtccaggccaagcggttcgaccacggtgcgatggatggtcgcatgataggactcgggatgggtcagcggcagcccgatgtattcgtcaagcgcgaaaccacgcacgcccgaaacgtcaatggcctcgtccttgacgatcttggcgagcgcctgataggcggccagcgggctggagccagtggccaggcccagcacagcgtccggctttgctttgatcaggtccgccacgcaacggccgtagatctcgccggcctcggcttcgttcttgacaatgatgatttccggcatcggtttcctccagttccgtgcggcccgcccgatgcgagtcgctgtaccgccgcccgtcttgcggataatggcaacatccttgtcacgtccgggtgccgcgcggcgttccaaccaccgttcggcgtagcgccgattggtgattcgctatttgttaatgatactaacaattttggaccttatgaacactcacggtgtttcctgacgcttcacacaggtacactggaatttattagtgaagtttcataacagtttcaacgacgaaattgcgcttcaccgtctaagctgtgtatggaacaacaatcgccgtccactcgctcaccatcaggcaggaggaaacatgtcatatctcggtctcaacacaacgaccgacgaccatgcggccaaggcttcccccgccgatgtgcgccgcaagaaccgccaacttatcttcaggttgttgttccccaccaaccagtattcgcgcgccgagctcggccgacgcaccggattgagccgcgtggccgtttccgatgtggtcggtcggatgctggaggaaggattgctgcgcgagaccggtcaggcacccagcggcggcaaaggcaaacgaggcacactgctgagcatcgatatcgatcgactgcgcatcatcagcatcgacctgacgcaggagcacctgctgcacggcgcagtcaccaatctgctcggccagccgctgcgtcacgccgaagtcaccctgaacaccggctcattcgtttccgtggatgtgatcatcgagctcattgagaagatgctgggcatgtccgatggcgaggtcatcggcatcggagtcgcctcccccggcgtggtggataacggcgtggtccgctcctccacgatgcgcggctggaacaatctcgacctgtccacgccaatcgccgaacatttcggacttgaagtaaacgtcagcaacgacgccaccgcagccatgctcaccgaacgtttctttggccaaggcgggccgaatatgcttttcgtgcgcatcgaaagaggcatcggttcggcgattctgctctcggacacgccggtaatcggcgaactgcacgcggctggcgagctcggccatatttccatcgatcttgacgggccgccgtgcccttgcggcaagcacggttgcttggagacgatgatttccggaaccgcattgaagaagcaactcagcgcagcagacgtggagcagcatcagaatatccttgctcgggcgggccgctatcttggccaagccctggccatgcctgtgggccttttggatatggcagacgtatgcgtctatggccagccgaacatcatcaacgcgacgttcatcggcgcggcccagcaatatctggatgccgccacatcctcgtccttccacaaacacacggtgattcggcgctgcgaatgcggacctgacatcaccgtacagggcgaggccatcgccgtggtcttccaacacttggccaaataaaagccggtcaccccggcaacgaaacgcgcaagaccaagcgcggcacagcacgacataaagcgatataggactgcgtgggagatggggcctcggagacaaatctgaggcctcatctcccatgccccggcactatgccaggctacgccgccatggcggcaccgatggctccgactggttggccgacaggtgccagacgcagccgggccggcaggtccagcgtttcgaggaatcggcattgcgattcgcgccggcgcagctcagccgtgatcacctcgaccaatggttcgccggttttggccatgccaccgcccaagatgatgagtcgcggatcaacggactgagccaggatttgtatggtgtcgccgatggcgcgcactaccatgtccagcacatcgacggccttggcctcccgctttttcgcgcgacgaatcaggtcgggcatcggcgggtcggcgttgggccacagacgccccacggatgcgcccgagcagactgtttccaagcatccgtattgcccgcaagggcacttgaggcgatgaggttcgactgggatatggccgatttcgccggccgcgccgctatagccatgcatcagcacgccgttttcgacaatgcccgcagccagtccggtgccgaagttcaggaacgcaatggtaccggccatgccatctgcaccgcccaacacggtggccgcgccgacggcggcggcgttgacgtcgttttccacatgggccggcacgcccgaacgctgcgagatcaacggccccatatccagcgagaccacgtcgagattcacgatattgcccacatgcccgctggccgaatccaccgtgcccggggtaccgacaccgatggccctcacctcgtcaaaacgctcacccgccgcctgatgcgctacagcgacgatgtcttcgatcacggcatcgttgccatgtctggcgggaatacgggcggaacccaataccgtgcccattgcgtcaaccagcacagcttcgatttttgttccgcccacgtcaacaccgattttgagattgttcatagtgttttcggacatcagtcctcccctgttcttcatcgaacgtttcgcttgatatcagtgtacatctgactattgacaactatcttaacaaattcacccaagacgacactcacatgcacgacacgccgaatgacatattgattgcgtcaatcaattaacagcgttaatatcttaatcaagttcagattcaaagacgagcggaacaactcgcagcggtgcagacaaggaggacttaagaccgatggcaacaaacaccacccacgccacttcccaggccagtgtctccgaatccaaccgctcccgcatcgtcaagcacctgtatcacaacggcatcagttcccgcgcgcaaatcgccaaggcactggaactcacccccgcggccatcaccaaaatcaccgcacgccttatcgaggccggcatgattgaagagaccggcgatctggaaggctccaagaaccgccgttccatcggactcaagctcaacaccacgcacttccgcatcatcggcatcaaattcgcccgctcgctggtgcagatcggcgtgttcgacctgtgcggcaacaccctgagctttgaaaacctgcccacggtgtgcgacaacaccatcaacgactccatcgtcaccatccaccagcgcgtcgaacaactgctcgacaacgacccatccatcgtggccatcggcatggcagtgcccggcccctatctgcgtaacgtaggccgcaccgccgtggtgtccaacatgcagggctggcgcaaaatcaacttcatcgacgaattcgccaccgctttccgcgtgccagtgttcatcgaacaggacgcccgcgccggcgccctcgcacattatctcttcgacccgtcggtgcacgccgacgacaacctcgcctattatctggtcggcgaaggcgtgggcctcggcgtcatcgacaacggtcgcctcatcaacggcttcctcggtgccgccaccgaaatcggacacatctccattgacgtcaacggccgcccctgcgattgcggcaacatcggctgccttgaacgctactgctccacccccgccattcacgatacgctcatcgccgatggcaccgtggttcccggcgcggccgatatgacccacaccgaagccgcccgcgccctgttcgccaaagccggcgacggcgacgaagcggcaatcgccattgtccgcgaagtcgcccgatacgtcggctacggatgcgtcaccatcttcaatggatacaatcccgagcacatcatcatcggcgacatcgtgtccgaagccggcccgatactgctcgatgaggtgcgcgccacggtggccgaacgggccatccccgaaatcaatgcctccacttccatcagcctatccaccttgtccgccgacgcggcggtctccggtgccgcagcagtggcagtgacccaattcctcgaacacccctcggtgttcttcgacgtctcctaaaccaagcgccgacatcacaagattttccatacgaaacacccgataaaggaaacaaaggaaaggaaaccaaccatgactaccccgatcgttctgagcctcggtgaactgctgtgggacatgctgccgagcggcaagcgagccggcggcgcccccgtcaacttcgcctaccacgcgatgaagaacggcaccgaaggctgggccatcagcgcggtcggcgaggatgaactcggcgacgaactgattgccaaggccgacgaggccggcatcaacaccgtcatccagcgcaacgcctggccgacctccaccgtcgaagtcgcgctgaagaacggtatcccggagtacaccatcgtcaagggcgtggcttgggaccacatcctgtacacccgccagctcatcgacgtggtctccaaggccgacgccgtctgcttcggcaccctggccctgcgctcccccgaatcgcacgccaccatcacggagctgctcaagcacaccaagccgggcgcgatgaagttcttcgacatcaacctgcgcggcgaccactactccaaggaacttatcgaggaactcctcaaggcggccaccgtcttcaagatcaacgacgaggaactcctgctgctgcgcgacatgttcgacattcgcggcacctccggcgaagacgcctcccgctggttcctcgaggaattcgacctcgactacgtgattctgaccgccggctccgcctactccaccatcatctcccgcaagggcgaggtctccacgctggacactccgcacgtcgaggtgaacgacaccgtgggtgcaggtgactccttctccggcaccttcaccgcacgcatcctgctgggcgacacgctcgccgaagcccaccgcaaggccgtcaacaccgccgcctacgtctgcacccaggccggtgcctggccgcagtacccggccgagatgcccgactacctggctgaaatcggcaagtaatccaaaaccacctattttcccgatggctttgccgtcctataccggcaaagccatcctgttttaaaaaggagttaccatgtccattcgtgacaccgtcaccggcgtccagcatgtcggcattccgaccacggatctcgaaggcaccatcgcctactacgagcgtctcggcttcgaatgcctcggcatctatcccaacggtgaggaccgctgcaccttcctgcgcctgaacaacctgaccctcgaggtgtggaccatggatcccaccccgatggaaaacggtgccatcaaccacttcgcgctggattccacggatatcgaggcgtccttcgctgaagcgcagaagctcggcctgaacttcgcggaaggctccatccagcacatcgacaccttctggagcaacggcatccgttacttcaacgtactgggcccgaaccacgaggtcatcgaattctgccaaatcatgtaacaccctgatggaacccggcaacaggactatcactattcactagtcatcatccattgatcgatcgatctgtcatacgtccatttatagagaaaaagggaatacatatcatggacaagaccgcatccaagaacgtggcgtgggtggaaagccctgacggctaccttgatcgcacgccagtattgcaattttcaatgacttcggtgctgttcgccttctaggccatcgccgcaagcctcaatgacattcttatcacccagttcaaggccgtattcgacctgagcgacatgaagaccgcgttcgtgcagtccgcattctatgccggctacttcatcgtggccatccccgcctcgctgttcatcaagaagaccagctacaaaatcggcatcatgaccggcctggcgttcttcgcgctcggctgcttcatcttcttcgtggaccgtatctccgccagctacccgctctcgaaggtccgcgagactcgcgtgctgaccgtctacatgattatcggctgcgtgattcttctcggcaccgccttcatcctgccccgccatcgagctgttggtcgtcggcctgtacttcctgactgaattcaagcgcgacacgtacaccccgccccagctcaaggccatggacgagaagaacgaggcctgattccgccccctttgttcgtcattcgtgtgacttcacgaatcgactgaccgcaaccggtgagattctccgaacaggaaatctcaccggttttttcatatggtgtactcacggccacgctcttcacatcctttcgcgtgtcttcaactaaagcggtttagaataatgctgttcccttgatatgtatatccctcaaacaaagaagttgaatttatgacgaccaccgcgataccgaagtcagtctcggatttcttgcagcgcatcacggacctatgtggcaccgaacacgctgattgggccgagaacttcaacgcctgctttgccgataccctgaccaccacggtcaaacggcatgacgacggcaccacatttctgctcaccggcgatatcccggccatgtggctgcgtgattcgaccgcgcaattacgcccttacctagcccttgccgccaaagacgacgacattgcgaacttgatcgccggtctggttcgccagcagttccgctacattaccatcgacccgtatgcgaacgccttcaacgaggaaccgaacggtgcctcctgggacaaggacgatcagtccgacttctccagcccttggctttgggagcgcaagtacgaggtggattcgctgtgctaccccatccagttggcttggatgctgtatgcgaacaccggcaacaccggtcatttcgatgccgaattcattgccggcgtcaagaagattcttgacgtattcgagaccgagcagcatcatgaacgctccccgtatttcttcatccgcgacacggacatccccaccgaatcgctgagcaataacggcaaggggtcgccggtggcgtacaccggcatgacctggtccggcttccgccccagcgacgacgcctgcacctaccactatctggtgccctcgaacatgttcgccgccgtggtgatgggctatctggaacgcatcttcggcggtgagattctgaatgatgccgatatcgccgcccgtgccggcgagttgcgccgcaccatcaccgaaggcattgaagcccacgccaaaacgacgaaccgcaatggagagacgatctacgcattcgagaccgacggcctgggccacgtcaatatcatggacgacagcaatgtgccctccttgatggcggccccttacttgggatactgcgcaccggacgatccgacatatctggcaacccgacgtacgctgctcagcgacgaaaacccgtactactacgagggcgagtatctcaagggcatcggctcaccgcacaccccgccgcgctatgtgtggcccatcgccctgtctatcgaggcgatgaccagtgacaacaaggacttcaaggcgcatatcctcgaccgtcttgtagccaccgacgccggtacacatctcatgcacgaaggcatcgacgtgaacgatccgaccaagtacacgcgcgaatggttcagctggtcgaatatgatgttctgcgaactggtcatggactatttcgacattcgcgtgaaacactaagacgtgcccgctgaatgctcattgtgcacccaccgcatgttctcgttaaggaaaggaacaatcattatgaccaataacccacgttatacgctcggcaccgaagccaaccgcattttcatggcttccgaaacctacgagctgctgaagttcggcaaaggcttcccagcaccgaacggcggttccggctggctgaacgccgacggcaccctcgacccctcccacggcgtcgaaacgtggatcaccagccgtatggcccatgtgtattcgattggtgccatgctcggatacctgggtgcgggcgagctggccgacgcggcgctcaagggattgaccggcattctgcatgacgacgagcacggcggctggtatccgcaggtgttcgcggacggcacccatgcgccgggcaaggtctgctatgcgcatgccttcgtgattctcgccgcgtcctccgccctgctggccgggcgtccgggtgccaaggaactgcttgacgaggcacttgccacgtatgacaagcatttctggaatgacgaaatcggtttggccgtcgatacctggaacaccgaattcaccgagctcgacccgtatcgcggtctcaacgccaacatgcacaccaccgaggcattcctagccgtggcggatgccacaggagacaacgcctatcgagtacgcgccggacgcatcatcgatcatgtgatcggctgggcgaagcacaacgagtggcgcatccccgaacatttcaagtccgattggtcgctggacctcggatgcaacgtcgacaagaaggatgatcagttcaagccgtacggcgccacgccgggtcacggcatcgaatgggcccgcctgatcacgcagtgggcgttgagctcctttgccaaccttgacggagcacagccgtacgtcgacgccgccgaacacctgttcgcgcgtgccgtggccgacgcatggaacgccgacggcaccgtgggactcgcctacacgaccgactggaacggcaagcccgtggtcaccgatcgcatgcattggacgctggccgaatcgttgaacacttccgccacgctgtacgcggccaccggcgaggagatgtacgccaactggtatgccacgttcgcccagtatgtcgacgaacatgtcatcgaccacgagagcggctcctggttccaccagctcgacaagaacaaccacgtgatcggcacggtctggccgggcaagtccgacctgtaccacgccttccagtccacactgattccgttcctcgacccggccgtgtccatcgccaccgcggtcaagaacgcggcctgaccggcaatatcttagccttcttatctcctccttcaacgacgttggccccccgcttgataacgagggccaacgtcgtatggattggaagtgctgactcagaatcggtggtttctatattccacaggagttacagggtttggccgtgctgtccctgaccaccagtttcggggtgaggattcgacggttgccgctcacctgttcgccggcgagcactttgagcagcagtttcgccactttggcaccgtattcactggcgtcacgatgcgctgaggtaatcgacgggtacgctgcctcacaaataaagctgtcttcaaagctgacaatagcgggcaacccgttcggataacccgcagattgcccctcccctgttttcagttgcccggtggtatatgcttcggccatggcatgcagactggccgcggcaagaatttccgtctcgtagatgaatgcagtaggaggcttcggcgaacgcaacatctccagcgtaagcatcgcggcctgctcggcatcgaaattcgtgaactcgatgttgatggattccagtttgcgccgttttgcgaacgaccgaaacgccgacacacgcccctgcgaataatcgagattggaatcgccggacagataggcgatacggcggtgccccagtgacgacagatgttcaagcacggtgcccatggtgcgcgaatcatcgatggacagcgacggtacataattgttcggatcagggccaccggccagaaccgcacgcacacccagttccttcagcagtttcgggcgtggatcgtcggctcgcagatcaaccagaatcaccccgtccacacgcttgcgtgacgcccagtccctgtagacgctcatctcctcgttcagcgaacggcaagggcgatacagcaagccgtatcccttagggctgagcgaggtatgcacaccggccatgaagtgcaacatgaaggtttcgtccgtgagtccctgtgcggagcgtgcgggggcaaagcctatggtcatggttttcgacgagcccaacgcttgcgcggcatagaccggcgtccacccaagtttggccgcagcctccttgactcgtcgtttggtttccgcggaaacaccaggccgatcgttgatggcaaaggacaccgcggtttgcgaaatgcccaactcatccgcgatgtcttttaagctcacacgctgcgtgcctgtggacgatggtgatgcctcgcgagcaaatcccatgaataatcctccttgcagccacgctgcgaataccacgctacaacagattatttcccactttgggccgcatgtaatcagctgtgttctaatacctatgatatcaacaactaaaacgttttagtctatgggtctcagcatatgttcggatataaaaagcgggatatagggggtgtctacagggacaaccaccccatatcccgcttaaggcacgggtatcaacgcacccgcatacgcagcgaaactattccatcttgctacgagcacgaagcaccaccgtgcccgctccgagcaacaccactgcggcagtcacaatcgcaataatcgaagagcccgtcttactcagcgaagagtccgatgcgccattcttatcattgttcttgttgttgttctggccaggcttgttgtcgccgggcttattcggcttgtccggctggccgggcttgttcggggtcgccgcgaccttggtgaattcgatggcgacaccctcaccgatggacttgtcgcccagtgcggccttcaccgtgtacttgcccaccttcgtggacacgacgttcagtgaagccacgccagcggcatcagtcttgacagtggcgttgccgtcaacggccgtgacaccctcgggcagcgtaaacgccacctcggcgttggtcagcggattgccgaacgaatccttgaccgttgcctgaatcgtacgtgtagccttgccgtcggccacggccgagccgtcaacggcggtcagcgtggactccttggcatccggctgagtcgggtcagagaccgtgcacttggccagttcgtcggcggtctgaatcttcaccggttcggtcttgttgccgttgtaatcctcgacctgcacccacagttcatggccagaggggatggacttggtgtaagagctcggcgtagtgcgaccacggatgatgccggtgattggcggagtgctctgcgagtaggtgtaattggcacccagctgcttctcctgcttttcaccgttctcgtcagtccacttctcggtcatgtagaggtagcgccagtcttgagtctccggacggaccagagtgactctatcgccattccatgtcaccgagcaagccggatacggctcaatggtggcatcggcaaatacacctgttgccgtggcggtagtgccgcctgcgttatcgacggtcaccacatagcgggaaccgtcaaccggcgcattcggaatcgtcgcttcgctcttatcggcagagaccttgacggtctgggagtacggctgcgcggcgtaacgccacgaaccattgtcagacttgacggtcacggtcttctcgccggatacctgcggattggtccaggagaccttgacgttaccatccttgccgggttcgactttcacgccagacacggccgctgcttcgttcagcggcgcttcggcggccagcgagcgcgaaccgtccgcacccacggcgtacagcttcagcgtgccggtcttggcaggcaggtgcttgacgtacagggtgtcgtcgtaacggccaccgaggaaggtgttgtccaagtagagcaggtagttcttggcagtagagtaatcggcgagatcccacttgacggtcagttcgtcggagtccgcgtaggcgcgttccacttggaagttcgtcggagcagccggcgtgtaggcagcaccgtcggtgacggtaatcttgccgatgttcacctggtaattgtcgattgggttcgccccggccttgacgatcaggcccagggtggcgatcttcttacccgcgtactgagagaggtctacagttgcggtcttccagccgttgcttgccccaccgtctgccatgtccaccggcactatagtcttggtgtcgtcggcgaaaatgaggccgagttgcagcttggaatcgtcgctgttgagcttgttgtaggtcagttcgaccttggagccggcagcgacgctcaagtcggtcttgtagagacggacggtgttgtcgctggacagcttgccgctcaacaccagcgaatcgccgccttcgtagccgccgaccttggtgtagttaaagcgtggtgccgcttcatatttcttgccatagtcgaagtcggcttgcagcgggtcggaatcggcatcaatccaccactgccatgtcggcagaatgtcttggaggttgatattgccccactgctggttgctggtctgttcgccgttgtctcgccattcgagaccatgaccggtgttgaacgatgtggagaagaccggaccgccgatgacggagcgctcggcgatctgcgaagcgaaacccttccagctatcgctgctcgtaccatcatcaatatacggatcagatatatccgtcgtgcccttctcaccggtggacgaaccagtccacagacggcgttcgcggtcgaatacctggttctgatacttcgggtagaccttcttgtcgtcacccaactcgtgggagacgaaatcggtgccaagtgccgcaaggctcacatagggcttgccgtcagcgtcaaggttgacattcatataattcgcgttgctggcgatgctaccaaatttcttctgtccggcctcgatacccgcgaataccgcgtacttcggatcaatgccaaggctcttggcgtgatcagctgaatcttgtagcatgttgccgctgaaccagtagttcaggaagatcgaatcagagattttacccttgttcggatcctgcacccacggcgaattggcatcgttgaacatgttttgatagctgacgccgccattcgggtatgtggcggagtcgtaccactggatataaatgccctgatcgatgatctgcttcatgaagtcttggtaggccggcacatcagcagaattcacactggattcctggttaacgaagtaaccatcaaaaccatagtacttggcaatctccaccagcttgtcagccaccggataggtgccgtcggcacgcttgccttgaagcaggtccttataggtctgttctcctcggtcgttgccagaatagaagatcgtcgcaatcgacttcgcgccattcttgtgcgcgacattggtatatgcggcattcggcagattcaacgtaccgaactcaaaccatttctgagtccagtcagactgggccttctcgtcgtagaggctctttggcacgttcgcagtcggctgaccatgccaggtaccgtaataatccgtgtactgccagtagttgaacaggtactgcgagaacacgttgttgtcgtggaacgactcgaagaacgcgttgccgtagtcgccagcaaggttgaacatctccgtatcggccggcaggttcgggtctttctgcgtcgcggcgttggcggcgatgcgggtctgcaacggtacacgggagcgcaggtattccgagtccttatccgcgtccgggttccagttcagaatatccagaccggtatagccatgctgatatggctggttggctcccgcagactgctccggatggctggtatcggcatactggcctccccacggcatggtgtcggtggcgcttgccggtgcggccaatgccgccagcgtggccatcgacagcaccgctgccaagccagaccgcagccatttcctgtgtcgagtccgggcagaagcacgcccagcgtgatcacctgatgacaatctcatccataatctcctttgatttcctccgactcacgccggaaatcaaccgtctatgcggcttgagtagacgggggctcaaaccggtaggacggtttgagcccacgggatacggcgatatctcaccaacgccatatcccacattctctttttctctcacccaccgaccatatcggccgcaatgagtaggtcatgagacttacggaacatacccctctccgacttgtctcatgcacatcgtcagcgatgtatcacgatgcttacgctggtatcgcagtcgtctgtatgtcgggtatcatcgttattcaaagcggctgtcagggcaaacgtcacacgcacattgtcatcagcttcgtccatcagccgttcaaagggtaccgagaacgataccgcgtggctttcgcccgcctcaagcgtcaggacaacggaatcgaccagcactgccaagcgtgggatgcgacgaccgccactgacgtgtgcgaagaggttcaccgaaccggccgtcttatggtcgccggcatgtgccgtcacctgcaccaacacctcattcgcgcgggattcggcatcggcatgcatcccactaaacgtcactccagccaaagaaccggctccgtagccaaactcgcgcaataccggttccgccgcatccttgtatacgtgggcggcactttgccggtcgttgtatcgaaccggaatggctgcgggatgcgcaggcagcgttacgggaaggcggcccggcaaaccggcaccgtcaatcagcacatcagccacggcctgcggaccatactggccagcatatccgacccaaatcgtcacggcggattgacctattacatgagtcagcacatgcgccctgccgcacaccaccaccgaaacaaccggagcggtggtcaatgccacgacttcgtccagcatttcatcctggtgccaaggcagacggatgtcggacaaatccacgccttcaccgcaggtggcaccgtattcggctacggcctttgccgcaccattgtcgtcgaattcactgtcatagctgcgttcgctggtgctgccgcatacgaataccacggctgccgcactcgcccaccgatcggccgacacatcgctcggcttggccgccaagcaaacccggtctttcccaaggcgtgccaccaattgccggtagatgcttgactgctcatcggcgggcagaggggcggtgtaatcgcccaggaagcagccgaaatcgtcggcgaatgggccggcgacaatcacagggccggcttgggcatcggtcagcacaccccgaatgctgtcgagcgtaacggcagagcggccatcattaatcagcgttatcgcctcgcgggccatgcgcttggcctgctcacgcccatccgcagtggcctgcgcgatggcatcggcatctggcatggcaattgcggcggtatcggcaccatcttcgggcaagagaccgaacatggctttgagctccagcacacgacgcaatgccgtatcgacggcggccgccacctgttcgtcatccacatattcttcgaggcgcgcgaatccttcatcccacagggagacatccacaccggcaagcagtgcggcgcgtccggcagcgggaatggagccggccatatcttcaagccggtccacggccagaccatcggccatcacgatgccatcaaaaccgagctggtcacgcagataatcctcgagcaaccacgggttggcacaacaaggcacggaatcgatatcgttgtaggcagccataaagcccaaggcaccggcacgcacgccagcggccaccggcggcagatgaatctcgtgaagatcgtgcgggcccaatacggcggactgcccgttgcggccacccacagcctcgccttgcgccgccaaatgcttgagcaccacggccactcccccgcggccgaccttgctgcgatgctcaccctgcataccggtaacgatggcctcgcacatgcgggaggccatcagcgggtcctcgccgaagcattcctcgcaacggccccaacgcgggtcgcgggcgatgtccaaaccggataccaatgcaatatgaataccgctggctgccagttccgcggcgactgcggcttccgcttcctgcactccttgcgaatcgaatgtggcacccaatcccagattggtgggcagcaccgcgccgcccagcgcctgatgcccgtgaggagcctcttcgctgagcaatacgccgatgccatgtgcaccgcgctccaacacggtttgctgcaccacggcaaccgcctcaggccgttcctcagggcgtatgccattgccccaatgctggcccgaccacgggtcagctcgcagcaggccgtacaaagcgccaagcccgccccaccggtcgatctcttgcttgagctcgtctgaggccacaagccgtcctgcggcattgcgttctacggacttccaaccgaacagacgctggttcagctgaccaaccttctgcgtgaagctcatcgaatcaatgagtcggtccactgcggcgtgattgatgctcatcgggtgcgccccctctcgtatataacttctcgttcttcccgctcttcggcgagtacagggtcttatgttgtgcactgcgcaccgcaattgtgcgcacggcaattgaaaatatccggttgcggaacaaggagtagatgattccacaaccggatatcggtttagtcagccgtttcgaacgatgggtccgaaaccgcagtgtagtagcgggcggcgtaggggtgctcgtcggcgtgcaattcaaggatgccgcgacgcgcgagttccgcctgatcggccgccacctgcgaggtgatgatggtcgggcgctggcctgccacctgcagcttcatccacaggtcgcacaccgaacctcccgggccgagcgcactgcggttcaccgggtttccggcctcgtccacatcaaccaccacggcgacggtcttcggctgagccggcaatgcggaacggtactgtgcggcgagctccccgaacgtacggccaatcggcttcagctggccttgctcgtcgaacaagcccagagagtgctcaaagaacgggaagtcttccatgctggcgggcacatcgtgcgagcaccaccacgtcacaccccacaggttccggcaatccatggcacgttcaacggtcttgcggcagaattccggcgtgtagtcggtttccagcacattctccggcgcaccgacttcctgaagccacaccggacgctcggaatccttgccgaacgccttggccagctcagccaagtacagtgcgtacgacgaacattcctcactggtagcgccgtatccttgcgcgataccgttaaacacccaggagtgaatcacggtcatatcgcccttggtggcagactgcaccggcgtgaacgggtgcccgtcaatgaaccaagtgccatcgttgacgctgtacagtgcgttatgcccttcgccggcaacggccggaagcagtgcattcagccatgcatcgatctgctggctcgtggcgctcatcttcgtaggatgcggcctgtcagacagctgattgacctcgttgcccaaggtaaggcccttgaacgcgggttccttggacagctcatcggtcatggtcttgaccagttcacgctcggccgcaacggcgtccgcatcggtgaacatgttgcccgcatgccaggtgaccagccatgaaggcaggaagtcgaagctggacagatgcccttggaacacgtccacataggcatccaaaccgtgctcgccggcgatgtgcaccatgcggcgcacatccgccacgcccttcttgttgatccaagtgcgattaggttgcagatacggccagatcgggaagatgcgcacatggtccatacccagttcgctgatctgcttgagatcgttgtcgatgccgtcccagtccgggtcgagccatgcgtggaaccagccatgcgacggcgtgtagttgactccgaatttcattggagtatctccttttttccagtccgctcagcccttgagtccgccctgttccaagccacggaagaagtagcgctggaagcagcagaagaagacgatgatcgggataagcgagacgagcgcgccggcggcaatcagtcgcggatcttggatgaacatgcccttgagtcggttcatgccgagggtcaaggtgtacttgctttcatcggagatcgcgatcaacggccacaggaagtcgttccaggcaccgacgaatgcgaagatgccgacaacggtcatcgtgcctttgacctgcggtacacagatgtggaagaaccgctgccataggttggcaccgtccaccatggccgcctcttcgagttccattggaatggatctgaaggcgttggtcatgagcaggatgttgatggcaccgcacaggccaggcagtgcgactgccagcagcgtgttctgcaggtggatggagcgaatgatcaggaactgggagatcatcacgccttcgatcgggatgaccatggtgcccatgaacatggtgaacaccagtccgcggccacgccacttcaggcgtcccagtgcgtagccggccatcgtggagaaaaccacgttgccgaagatggagatcaggcagaccaccagcgtgttgagcatgtagtggaataccgggacctgcttgaacacggaaatgtaattctccagcgtcggggtcttcggcatcaggtagggaggcacggcgtagacgttgtcgcccttgcccttgaacgacagggacagttcccagacgaacgggccgacgagcagcaggaacatcagaatcagaatcagatactggacgactttgccgacagtgaccttatgcgtgttggtattcatcagtcctcacctcgcttttgtaagatctgctgcacgatgagcatgacgccgacgatgacgagcacgacgatggagatggcgctcgcgtaaccagtgcgggcctggataccggtgccttcgcgcttgataagcatcgacatcgtcatatccatgccgccggggcctgcggagccgttggtcaacacgtagatctcgttgaagactcggaatgcggcgatggtggacagcatcatgatgagcatcatcgtggagcgcacgccgggcattgtcacgtagatgaactggcggacagggccagcgccgtcgagggaggcggcttcgtaaagggattcatcgatgttggcgagggcggtcaggtagatgaccatgtagtagccgaggcccagccagattgtcacgaacatcgagctgaagagcacgccccatcgatcggtgaggaatggaatcggcttggagatgatcttcaatgccttgagcacggagttgaccagaccggcggaatccagcaggttggtccagatcatgcccaccacaacggcggacataaccaccggcatgtagaaggcggtgcggaagaagcccatgattcgggagttacccttgaccagataggccagaatcaacgggaggatcaccatgaacggcactacgcagatcacgtagatcgtggagttgagcagtgcggtgaggaagtactcgtcgtggaacagtttgatgaagttttcgaatccgacgaatttgcccggacggagcagcgtggaatcggtgaaggcaagcctgaaagtgttgagtgccgcgaggacgatgaaaacaaacacaatcacgaatgcgggcagaacaaacaagtaaggggcaatgatggtgccgaacttgcgatcctgcttcttgccgtgacgcgtattcatcggttcaggccggtcggaggccgtgcgggcctccgacctgtcagcggcgagtgccgcgttgctcactgtgcgagcttctcgtttgcgaactcgacggacttgtcaagggcttccttggcggtctgcttgccctgcatggcgagggcgatctgctgctggaagttcttgtagccgttgttgtcggtaaactcggccggacgagaaccgtagccgtccttgacctggtcgagcgtgatcttcagagccttgccctcaagggtgctctcgtcaatgctcttgtagtagtcgtcatccagaccacccttagcggacgggaacacggaggccttcttgtcgaactcgatctggttcttctcgttggtcacaaagcgggcgaagtcgatggcgacgtcggggtgcttcgagttggcgctgatgccgagcatctcgtaggccacggaagcggacttgccgtcgttgctgatacgcgggccgactgcgaggttcttgtagaggtccggagcgttctgcttaaagccgtcagcggagtaggcggagccggccatggagaccaagttgccgcgctggaagagatcggcggcctggctccaagaggagtcgagggcctccggcgggatgccgcccttcttgtacagctcaacgaagcggctgatctgcttgacaccggcctcatcattgaaggtgtacttgctgtggtcatcattcatgaaggacttgacgcctgcggtcatcagatcttcggcgttgtaacccatcgtggtgcccaggtagacatccttgcagttctgcacgatggtgtcgccggcggcgaagtattcatcccatgtggtcggaatcttgttcggatcaaggccgcacttctgcatgagctcggtgttccagtaggtcgggccatcgttgacataccatggcaggccgtaggcacccttctcgacgccattgccctgcatggtcacggacttccatgcgccttcgtagtagtccttttccgcatccggagcctgcttggagacatcgagcagcgcgccagccttggccagaccgtacaggatggagttgccgccgtcgacgatgtccggcagttcgccggccgcagcctggctggacagcttgtcttcgtaaccatcggacggggcgtcaagccacttgacggtgacatccgggtggtccttctcataggccttgatcagcgcctcgaaatacggggtgtacttgtcgttcttgaggttccaggtctggaaggagatctccttcttgccgccgtcatcccccgcagttccgctaccacaggcagccaccgatacgagcatcgcaccggcaccggcgatggcgaggatcttcttcatagaaaacatacgttttcctttccttttggttcctttttcgccccgccctgctgtggacggagaaaacctaatcgttgtgttccggtacagtcacccgtcgcggtgattgacgtggtatcacaacctttattcagttctcatcgctgagactaaaccgttttagtttccagccagttatgaacctgttaactaaatcggtttagtaagaatataacacaatcgaaacatgcacgcaacgaattcatccgcgcgtgtcgcattgatatttgcccaacgaaatcgtcccctcttctcatacaacaatgggccgcgcccaaccgtatggcagagccggtctactccggttccgttacggttgggcgcgacccaaaatatcgagcctaggcccaatatcccttatcggcgaatacgcagcgtggtgagctggaacggcgccaacgagacgaccgcaccgtcggcaggcatcggctcgtcgccggcgagcgcgcgcggcaattcggcgtccagttccggctcctccatgagattcacctcctgcacgctggccttagcatcggcgagagcggcgtcaaggcgtagtgcggccgcggcattgccgccggcggcctcgtacaggcgcacaatcagatcgtcggaaccgtcatcggcgagcttgacccagtccaatacgatggtgccggtgacgtcggtgagcgagaccagcggggccaagtcaggcaactcccctattacagggctgttgagtcgcgccgcctcgtccagcactgcgttcatatcggcgtcagcgaccagagaccatgcgaaggagtgcgcgccttggtcggtgcgtgggtcagggtacagcggtgcggacagcagcgacaaccgcaccatggtgccgcggccggtgccatgtgccgtatcggcgtggatggggctgacgtcggagccgtaggtggaggcgttgaccacagcggcggcatagtcggcgtcggcgatacgcacgaagcgatgcgtgcagctttcgaatttggcatcatcgctgcgcgtgttcttattgatcgggcgttcgaccaggccgtattggcattcatattgcgcgttcaccgcttgcacggtgaccggcatatccactttgaggaactgttcgacggcatgccagtccacatcggcggtgaagtccagtgtggcggagcccggccttaaggcaatgcccgtacgaatttcaacgcccttcgcgcgagtgacagcatgcacgacggccccaccgttggcggtttcatccacgcttgtaatcgatgcctcgctgagcgcgttggcggtgaggaatgcatcgcgttgaatatcccaggcgtcccagtggaagggttcgtctttgagcatttcgtagcggcccagtcgggtgccggctggcaccagttcacgattggttcgctgatcgacgattgacgaaacggtgccgtcggcttcaatgcgcacgtgcagttggccgttgtcgagcacaatcgcatcgccgtcatgggtaacggtgacccgagccatggatgcggttcccgcttcggctcggctcgaagccgggcgtaccacccacgcctcacaggcttggcgggaatatggggcgattacggcgtcggttatggttgcgtcatcgggttccacggctgcgatcgcgcgcccggcttcaagggcgatctcgttcagccgagcgacgtcacgcgcgtattcgacccgcgcctgacggtgtacccatgcgatggccgaaccgggcagaatgtcgtggaactggttcaggagcagcgttttccaaatacggtccagctcttcgcgcggatagacatagtccgggttcttgatgcgggccgcggcgcacaggtattcagcgacgcgcagcatcgactcctcctggcggcagccacgcttcatgtcctgctgggcggtgagggtggcacggtgcagttcaaggtacagttcgcccttgaacaccggggtctctccttgcgcatcgtcgacgatatccttgcgcacgcgatcgaacagctgatcaggagtaccgaaatcgattttcggcgcaccggcgagatcatggtcgcgccggatgcgtgcggtcatctcacgggtggggccgccgccgccatcgccgaaaccgtagagcaggattgcgttgcgggaaagatccttgtccaggaaattgcgctgcgaatacatgagctcgcgcatactcatcgacgagcagtaggtgtcagagggcgggaaatgcgtgaggatacgagtgccgtcgatgccctcccacatgaaggagtggtgcgggaacttggtggtatcgttccacgagatcttctgcgtgaggaaccagtcgaatcctgcacggcgggcgatctgcggccaggagccggtgtagccgaaactgtccggtagccagatgccacgcggcgtgacgccgagatgctccttgaaatatcggcggccgaacgtgatctgccgcaccaatgattcgccggaaggaatcatgttgtcagattccacccacatgccgccgaccgggatgaaccggccttcttcgatgcgccgcttcattcgtgcgaacaggtcgggatgttcttcttccagccatgcgtactgttgggcggaactcatcgcatacgtgaagtccgggtcttcgtccatcaaagccagcacgttggatacggtacgggccactttgcggcgtgtctcgcgcaccggccatagccatgcggagtcgatatgcgcgtggccgatggcaatgtggttgattgcgctggatgcagccggttcggcgagcacgccggcgagcgccgcacgggctgccggcacggtttccaagtcgcgttcatcgtagatgttcaaggagcgttgcagcgctttggcgagctgccagtagcgcgggtcgtcgtctttgagttcgcgaatcagggaagatacggtttccaagtccatgtcataggcaaacacgtcttcgttgaagatggtgatatccatgcgactcagtgtgtatgggaagtcacaggcgccggtggcctcttcgccgagttcggtgggtgagaacggggtggggccttcgacgaatgggttggcggcggcttcgatatagacggtgaagtcgccatgctcatcgagttctacagtgctgctgccgtccgcgtagacgagtggaatccagtggttgcgtgggttcgcggatttgatggcggtgccgtcggcacgatagacaagtccctcggattggaatccggggccgcggtgatcgagccagccgaggtctaccatgagttcgacttttcgtcctttgaccgccgccatgtcgatgtggccgttcacctcgaaccatgtggtgccccatgtggtgccccagacgccgggaacgcggaaaggttcgaagggcacttggccgttgcgcactttggctagaaattcgctggagggcaccggttcgccgggattgtggaacgaacgcaaggtgcatgcggcgagcgtggtgtggatatgcggtttgacgcgctgctgcatgacgcggtcgcagcgctccaactgctgattgggcagaagaaacatggagagttcagctcctttgctgtgtctggtggtaggggtgggagtgatggtaattggagaaaccgcaatacgacatacttctgccccctcatggcgcgaggaggcagaagcgtcaggcgaaaattcagcgcgtgatgcgcagggtggcgagctggaacgggccgaagtgcagtgtggcgccttcggcgtcctgtgtgccgtcttgcagcgcgaccggcaggtcggcggccagattgtcgccttccaacacgttggtctcatgcaccgaagcgcctgcgagcgccgggcagacgtgcagcgtggcatcggccctgccaccggccgcctcataggcgcgcgcaatcaggtctccggagccatcgtcggccagctttatccagtccaacactacggtgccgtttgctgactcgatcgaggcgagcggcgctaagtcgggcatgtcatgaagcgtcggtgcgttgagtgcgcaagcggcgtcaagcgcacggcccaccgtggcgttggccaccacggaccagtcgaactcatgcgcaccgatatcggtgcgcgggtcggggaaggccggcgcggagagcagcgacagtcggaacatggtgcccgagtcacgaccttcggcggcgttctcggcgatcggcgtggcatcggacccgtacaccgatccgttgatgacggccgccgcgtaaccggcgtcgccgatgatggcgaagcggttcgtgctgctctcatacttggcttcgtcggatgcggtgtttttgacgattgggcggcggaccagaccatactggcagtcgtatgttgcttggtcggccacgatacccagcggcagatcgactttgaggaagcgttcacgttcgtgccagtcaatgtcggcgtggaaatcgagcgtgtgtgaaccggggcgcagcgtgatggtggtggtgatgacggtgtcatcgtcggcggtacgcacgcggactcgtgccgcaccgttttcggtatcgaccgattcgattgatcctgtcatggcattcgccatgagcagggattcgcgttcgatctcccaggcatcccaaacggcgggttcgtccttcaacagttcgtattggcccaatcgggtgccggccggaaccagttcacggccatgctcctcgtcaagcagcgacgagattgtaccgtcggcctcgatggtgacggacagtacgccgttggccagcagtacacggccgttgtccaatgtctgggtcagtacggaaagcgcgttggtcggttcgttgatgcggctggcacgccaagccgcgccgtcattacggaactggctgatgcgggcttcggcgagcaggtcggcctgcgggttggccttgcgcagcacggcgcacatgtcttgggcgatttcggcgagacgcttcagatcgcggcgatagtcctcgcgggcttcgcggtgcacccatgcgatggacgaccccggcagcacgtcatggaactggttgagcatcagggtcttccagatacggtccagctcttcgcgcggataggcgtagttcgggtcggccaacgtggcggccgcgcccaggtattcgaccgtgcgcagcagcgattcctcttggcggcagccgcgtttcatgccctgttgcgaggtcaaagtgccgcgatgcagttcgaggtacagctcgcccttccagacgggcatttccgggccggcgttctctgcaagctgccgatgcgccttgtcgaagaagtcgttcggctcttcgacgctcaccttggagacgccttcgaggttctcgtagcggtgcaggtgctccatcatgttgcgcgtggggccgccaccgccatcaccgaaaccgaagagcagaagcgagcgatcggcgagatccttgtcctggaagttcttctcggcgtagtcgagttcctgaaccttgcaccaagcagcataggtatccgccggcgggaaatgggtgaagatgcgcgagccgtcgatgccttcccacatgaacgagtggtgcgggaacttggtggtgtcgttccacgagatcttctgcgtgaggaaccattcgtacccggcacggcgggcgatctgcggccatgcgccggtgtagccgaagctgtccggcagccatacgcccttgggctccacaccgagatgttccttgaagtatttgcggccatatgcaatctggcgaatcagtgattcaccggcgggcagcatgccatcggcttccacccacatgccaccgaccgggatgaaccggccttcttcaatgcgccgcttcatgcgcttgaagatgtccggatgatcctcttccagccaggcgtactgctgggcggagctcatcgcgtatttgaagtcggggtcggcgtccatcagcgccaatgcgttggatacggtgcgggccaccttgcggcgggtctcgcgcaccggccacagccatgcggagtcgatatgtgcgtggccgatggcgctgacgttcatggccgaggcgttggccggcttggccagtacgccggcgagtgctgcgcgcgcggcttccacggattcggggttgcgctcgtcgtaggcgttcagcgagcgctgcagcgctttggcgagttgccagtaacgcggcgactgtttgtcggcgaattccatcagggagctcaccacgtcgagatccacggagtagttctcgaaacgggcatcgaattcggtcagatcggcggacttgaatacgtacggctcgtccggcttgccggtggcatggtcgcccagttcggtctcaatgaacggaggcacgccgagcagcagcgggttgctggcggcttcgaggtacagggtgaagctgccgtcttcggcgaccggcacttgcgcgttgccctcggcatctatgaacggcacccaatagttgagcgggtgtacggctttgatggcggtgccgtcggcgcggtagacgaggccctcgatatggccgccgcaggagtgcgggtaccagccgaggtcgaggatgagctccagcggcttgcctttcgggtagccggccggcacggtaccggtcaggcggaaccagactgtgccccatgtggtgccccattcactgccgagcgtaaacggcttgaaatcaatgtcacctcgattgagcttcgcgaagaactcgtcagtgggcatcggctctccgggaatgtcaaaggactccaccgcgagctgtgcgatcgatgggtggatatgagggtccacgcgctggcgcactatgcgcttgcaccgctccagttgctgttcaggtttcaggaacatctgctgttcactccccttatctctgccgcttgtgcggccacatcattgtgctgcccgttcatgggaaacatatcgacatgcgccctcgcccgcaggagactaaagcgctttagtaacatattggagggaacgggatatgatgtcaaattactatcgcaattcagcgtgttccgtcaggcatgtcatgctcggtgtcgatgacgatggtcaccggcccgtcattgaccagtccgacccgcatatgcgcgccgaaacgaccttccttcaccggcactcccccggagcgcaacgcctcgttgaacttgatccacatgagatcggcatgctcgggcttgccggccttgatgaagctcgggcgattgcccttgtgcacgtcggcgaacaacgtgaactgcgagatggagagaatctcgccgccgatgtcctgaatcgaacggttcatcttgccctgcgcatcctcgaacaccctgagattcagaatcttatgggccaaccaggcgatctgcttgtcgccgtcctcatcggtgacgcccaccagaatcatgaatcccgggccaatctgctgcggctcgaacgtgggatccagcgtgcccaattcattgaccacgtccacggacgcttcggatactcgttgcaatacgactttcatggttccctacagtacaacgtgtgcagtcaccagccggtaacgtacacgaccgactggtgaccggtaatatctgcactgcagttcatcgtttaccgcttcattcgacgacgagaccgatagtcatcacgaacaccaccaagaaagtccggcgcgctgaggtcatcaaggtcagcacctccgcgcacggcggtcgcggcacaggcaacggcctcaaacgaggctttgattccctgtccatcggcatgaaaatcagtggcgcatcgcggtgagataccaaaatcaccagccgtctgttcggcgtcgatgttcgcgcccagaaacacaaactcccaatgatagcgttcacgctcataggtaatcatctgcttgatctgatgcaacgaatatcgacgactcgcgttctcatacccgtcagtaatgatgacaaacagcacatgttgagcacggtacgctgccgcagtatgtcgttgcgtcacgatcatgcggtcaatggccagcccaatcgcatccaacaacgcagtgctaccgcgcacccagtaatcccggctcgtcaaatcgttcacttcgcggatgtcgaggtgattatgcaaggtttcgattcgatgatcgaacagtagggtcgttaccctgcactcgccggcaattgttcgctgcttggacagcatgctgttgaagccaccgatggtgtctgattccagacctcccatcgatccgcttctgtcgacgacgaacaccagttccgtacggccgttattgccattgtcgttcttgcccatgatgaatcctttcgctcattcgccagccggattgtcggcgatatcaatgagcttcgcatcatgggaccagtcctaggtcgcttggcaagcgacaatatgccgcgtatcggcagcaggtcaggagacgagcgtaccgctccgcatcattgcccaagcaacggctgatcgtatcggaacaacatctcgttaatagtgaatacatcaaacatctcatggacgatgaagaattccacgatcacatcgaatttcacgctgtgcgacagcgcatacccggcgcacgccaatatatcttgcgtctcgtcaatattcagccgtaaggcaatggccagtgccaaaaccgttttcttgctgggcatatagccatcgccacagcgaattttagagaacagtttacgattgatattcgctcgtttatatacctccacgtcggaatatcctttggcgtcgataagcctcaagagaatgatgttaaaaggttcatccagattggagagcaccgcatcatccacatgcccggcggatttcggcgatggagctgccgacggcgccgagtagacaggcgtttcacccatatcgcccaggaaatccggcatgtccaagacgccggaaggtacggccctatccgccttcggcttattatccgaaaaccgttggagagcaagcagctcatacgttctgcttcctagcgtatcttcatgctccgctacataataatcatcaatatatgcgcgaagacgtttgtcaatactgctgcttatttcgaaagcggttttgtcgaatacgcataggtatacgtcgagatcgtgtccggagtcggctgcgtcgcccaggaatcggcgaatctcatcgagggccacatgaagggcctcggctttcggatatccatagataccgctggaaatcaaggggaaggcgatgctggcacacccctgccgtgccgcgagttccatcgaattgcgatagcacgaacgcagcagacgttcttcatcatgcttgccgtctcgccatatcgggcctgcggtatgaatcacatagcgtgatggcaaattgaatcccggagtgataaccgcctcaccggtatgaatgggagcaaaccgatcgcaggcagcagccatgcgcgagactcccgcagcgcggaatatcgcgccgcacactcccccacccatggcgagctgcgtgtttgccgcattgactatggcgtccaccttcatcttcgtaatatcctgtcggaccaattccagcggcatatatcctccctgattacggcgtagcataatagcctctacacatcgtgcaatcggcagccctgaactaagtctaaatcgtttcttccccgcaagttcgtccaactgacatatccgacacgagagaatagcgggaaaacaaggaatcaacggagcaataacagaaagccgctcagccttactttcgtaaagccaagcggcttgtttccgccgaagcgaattggtggaggcgcggggaattgaaccccggtccgatgaccgagcccacagtcttctacgtgcgtagtctgctggccaagttggcgatttttctgcccccatcgatgtcgcagacaactgatggcgagcatatccgcagttaaagtcccgatgcagccctgaggctcaactgcatcagcaagtcttctaaacgacgctcagcatcctcccaaagacgaggaggagtgaacggagcggctgctcactggttaatcctgactaaaaatcaggcagcgagagcgaactcagtgcggttagatttagcacttattcttttgccggggtcatccacgagcggacccggcgttctcggcacgcttccctgcagcgaacaggtcaccgtcgaaaccgatcgcccccaatcttgagttatcaagcttccggcttttcggccggacttttcagcatacaccctatggcgctactcgcgcaaatcgccggcagcgaacatcgccccggcattgacgggaccaacgttgtcagaaggaccaacggagcgaacgccgccccggaaccaacggaaccaacggaaccaacggaaccaactgaatcgccgtcacttgatgatgggcttctgggatgcggaaacatcaatctgatgtttgccggcaaagccagccgtgccagcggtgatgttcttgtcgatttcctcgacttccgccagcttcagcttcagttgcgaggagtctccccaaatgattacgcggtcaccgtcgttaagcgtggtggtcaccgaatcctgcgtctcagcggtgaccttggtaatggacttacgcatcgattccggcaatgcgcccagaatcgccagcgcctccttcaccgaacggttcttgagactggcgtctatatccttgacctcgatcaccgggatgccatccacgttggcgttcttcaccgagttcaacacgcgcgcctgggaatccaccgcggtcagggtatcgcctcttttcagcatggccgcaggccgttgcgccttgacttccacgctcatcgacttggggaactgtttggagaccttggcctcgctgacgccgggaatggacttgagttgctctgtgacctcatgggcggagaccaggaacaacgactttccagcctgcttatcggcgatggcatggatggtctgcgcgctcacccattcgttggcaccggatacgccgatctcgctggtttccagacgaaacaccgacgagaagagcagcagccacgttagccccgtcactacagccacactcacgaccgcaatcaacacgcgtaacgcgacgacgcgtacgttcgcacgcttgcgttctttggcgcgttcggtgaaattcaccactttcgggcgtgatacgactcctagggagccggtggtctggtgcagcgtttcggcaacgtaatcctcgctgcgcaaccgtcgtgcatcgacgaaggcaccggcctggcccttggctaccgtcacatcgtcgatgatctccggctcgtcgatctcatgcccggaagacacggaccggggagcgcgagacttcgacgagtgacccgtgtttccgcgtgaaccgatggtgcgcggcttgcggggacttccggacgaacgacgtgagccgttgtcattgcccccggatctgaccgtgcgcccggacatcactcgcagctttcccgatgggcctcaagtgcggtgagcagcacctgatccatgtcggtgatgtcgcccgcgcccacggtgaagatcacgtcgccgtggtgggcgcgcatggccatcatcttggcggccaggcacatatcctcgaccggctgaatccacgtgcctgcggaagcatccttgagtcccgcagccgcgtccacgatggtggaggggctgatgtccgggaaatcggcctgcttttcacgggccgggaagatgccggtgataatgacgtcatcggctttggccaaggattcggcgaactggtgcgcgaagaacttggtgcgggagaacaggtgtggctggaagatcacacgaatggtcgaatcggggtaccggcgtcgggccgcatccagcagggccgcgatttcggtgggatgatgggcgtaatcgtccactacagtgacctgcttgaccgtgccgcgcacctggaagcggcgtgccgcaccgaggaatgtgccggccgccttggccgcgtctgcggggctcacgcccagcagcacggcagcgctgatggcggcggccgcattgcgcgcattgtgcacgccaggaaccttcagggcaacgctctgagacaccggctcccccgccgtcaccgcggccggcagatgcagggtgagctgttcgacgccgctgccagcggtctcgctttccgaagcgatccagacatacgcggcaccgcccaaatcgggcagggattcacgcgcggtagtgccgtaggcaacggtatgggatttcacgtcggcgggcagggcctccagcacggcaagtccgtcggggtcgtcgatactgatgatcacgtgaccggtggcccggccggcgtgggcaacgaacgcggcacggtagtgggcttcgtcgccgtaatggtcgagatgatcggcttcacagttggtgataatggcgatggtcggatggtatttggcgaagctgccgtccgattcgtcggcttcggccaccaggatgtcgcctttgcccgcgtgtccgccgtccagcgtggtgccgtccgggccttggataaagccgccgatggcgtagcttggatcggcaccggcgttcaccagaatgtgggacagcatggagctggtggtggttttgccgtgcgctccggccacggtgacggctcgtttgccgttcatgagcagggcgaggatgtcactgcgatgcacaatgcgcttgcccgccgcgtgtgctgcgacgatttccggattgtccggtttgatggcgctggagtagaccacggtctcggcctgggcgacattttcggctcgctgcccgaattcaacggtgatgcccagcgtttcaagtcggtcggttttggcgctgtgtgcgcgatcggagccgtccaccgcgactccttcggcgtgcagcatttcggccagaacgctcataccggcaccgccgataccgatgaaatgggtggcgccgagatccgcagggcgggccgcagcatcgaatgaggcatacgtagggtcaagcactatgggctgatcttgagacaattcaaaactcctttagggattccagcaccctatattatgaccgtatctcgtgctgcggaacggaattggtcagtatcgcgcacggaatgatatctgaatactacttggatggttcggctaattgcagaacgtgccgggccatgatttcggcagcgtttctgatgccgtattcccatgccttgcggccgaattcggcaagtcgttcgtgatcggcgagcagatcgggcacatgctcatgcacccactgcggggtcaggtccttgtctgcgaccagaaggccgccgccggcgttcaccactggctcggcgttgaaacgctgctcgccgttgccgatgggcagcggcacgtaaatggccggcaggcccagtgcagccagctcggataccgatccggctccggcacggcaaatcaccaagtcggcacaggcaaaggccagatcgattcgttccagatattcggcggtatggtagtcaccttgtccggccgattcggggccgatgccggtaagcacgtccgcgccggccgaggccgtgaccagttcgcgtacttcgctgattttgcctcgcccggtcaagtggatgatttgtgcgtgggccaacaggtctgcggcggaggaggcgatggcgcggttcaggctttgcgctcccagcgatccgccagtgaccagcaccagcggacggttcggatcgacgccaagctgcgcggccgattcacggcgtacggcggcacggtcgtcaccgatgcgtttggtcagggaggcgatggccgggcgcaacggcagaccgacgcgctcgacgtcggctccggcacgcggtttgagaccggtgccctcgtacacggtaccgatgaaatcggcccaacgagcgcccagtttattggccatgccggcacgcgcattctgctcatggatggcaatcggaatgcccatcttgtgtgcggtggcgtagacgggggcggaagcatacccgccgaatccggccacgacatccgcatgccgcgtttcaagaatggagcgcaccttggcggtttctcgcttccattttgccgggaagcgcagcatgtacaggttagggcgacgcgggaacggcactttttcgatggtgtcgagctcgtagccggcctccggcaccaaatccttctccaaacccaccgcagtgccgatgacggtgacctgtgccgtgggttcgatgtcgcgaatcgccccggcgaccgcgagcagcggattgacatgtccggcggtaccgccgccagcaagaacgatatgtggtgtgccttgattcatgattaccgagtctacttacgcgctctgacgcgactgttttatctgcggttgagagcgcataagtcccacaaccagtccggccgccgtcaagcacataatcatggatgagccacctgcggagacgaacggcataggcacgcccaataccgggaacacacccacgaccacgccgatgttgaccatggcctggcccacgatccaaatggcgacgcacatcagcaccatggcaacataacgatcggtgacctgcaatgcgatgacgatcatgcaccaggcgagaatcgcgaagaacagcaatacgatggcgcaaccgacgaatccggtctcctcgccgatgatcgcgaaaatgaaatcgttatgggcggccggcaggtagttccatttctcccgcgaattgccgatgcccaatcccagaaaacctccggaggcgatggcgtacttggcgtgaatggactggtagcatacgctctgcgcgtcagcggccgagcaatcgccatatgtggccagaatacgacgcaagcggttcgggctggaaaccgccaatgcaccgaccataaccaccgcgcccaatacgccgactcccatccatttgccggggaacccgacgatcagaaaggccacgcctccgatgaagaccagaatcatggccgtgccgaggtccctgccgcccatcaccagcgccacgcctatcgcatacaacaccaacggcgcggcatatgctttgattcccttcttgtggtacatcttgctgcaggcatgcaacgacgagggcagccatatgcacatcgcgaacttcatgaattcagccggctggatagtggtgaagccgaggttcagccaacctttgttgccatagacgtcgatacccaaaggagtaaaggtcagcgcctgcaacaggcaggcacccaccacaaagagcacgccggtccgtttccagaacgtcaccggcatcatcaatgccacgaagcccagcaccaagccgatcaggcaaaacgcgccctggttcagaagctgaaggaacggcgacttgcccagtgcggccatggtgaccgtggagctggagaacaccatgatcaggccgaagcatgtcagccccaccacggccatgcggaagccgtggtagcaccatagcgggttgagcaagcttcgccaacccgtgtagtcagtgatttcgagtgcgggcttgtcagggactctgtatgccttacgcttatgggtatcagtggaggccatgcacctcgctccacgtcttggctgcggcggcgaatcgattgcctcgatccgcgtaggacttgaactggtccatggaggcgcaggccggagccataagcacgatgtcgccggcggcggtatacgtgccgcaggcttcgacggcacgatccatgacggtatcgttgtcttcgggatcgatgatagtcaccgggatgtccggagcttggctggcaaacgcttcgatcatcggctgctggtctttgccgatgatgacggccgctttgatggtgtgtgcctggtccttgaccaggtcctcgaatcgactgcccttggccagacctccggcaatccagatcacagacttggccgggaagctggacagcgaggcgcgtgccgcatggccgttggtggctttggaatcgtccacaaaacgaacagagccgccctcgactgcggcctcagccacggtttcgatgcgatggccgcccggcttgaacgaggtaagcgccttcaacgcggtatcgcgatcagcgccaagtcccagcaccaacgccaatgccgtcaatgcatcggccaccagatgcgggtacagtgagccgtccggctctgccagatgcgtgaaatcggtgatggcggccagtctgaccgactctcctactgcgccgccggccacgccgctcctgtccacgatccagccatcttcaatgccgatctggccggcttgaggggcctcgagcgtgaatcccaccttgcggcatccttcggcagtctgagcctcggccgccagttcgctgactttggcgtcctgcgcattgtagacgatggcgcgtttggcgttgtggaacaccttggatttgtcggcggcgtaattctcgcgcccgccatgccagtcgaggtgatcgtcggcgatattggtgatcgccgcgcagtcaagtgccagcgaatcggtgaagtgcaattggaaggagctcagttccacgcacagtacgtcgtgctgcggattggtggcgcaacgagacaggctcatgctcatgtctccggaggcgatattgccggcggtcggcgcgtcgagtccgcaggcggtgagcatttccgaggtcatctcggtggtggaggttttgccgttggtgccggtgatgccgatccatggagccggagtaccggtgcgctcgttattcacacgcagctgccatgcgaattccacctcgctcatcacggggatgccacggcgttgggcttccagcacgaacggggtgcgggggttgaacaccggggacgacatgacgtagtccacgtggtcccagtccacgtcatcaaaggagtggagatcggcctcgggcttcctctcgtcgacgccaatcacgtgggtgccgcgttccctcaatacctccgccaacgaggtgccggacacccccagtccggcgatcaccactgtcttatccgctacttgcattgttcctcctgatataggaattccgtgggtgagcataatccacccagatttccgctagctgaacagcaggccggagcgggtgacccagtcgccgtagaaaatcgtcagggcgagcagcacgaagatgagttcgatcatccagaaccgcaccaccaccttggtttcggtccaaccctccagttcgaaatgatggtgaatcggcgccattttgaatacacgtttgtgggtcatcttgaagtacccgacctggatgacgtcgctcatggcttccatgacgtacagtccgcccagaaccaccgccaggaattcggtgtgcgtggcgatggacagggctgcgaacagaccacccaaggccagggaaccggtatcacccatgaaaatcgatgcggggttcgagttgtaccacaggaagccgaagcaggcgacggccgcgcatacggcgatgacggtcagatcgagaggatcggacacggcataggaatatccgccatggctgccgcccttgatgtggtagctttcccagaatgcgatgatgccaaaaccagtgaaggcgatcatcgacgaacctgccgccagaccgtcaagtccatccgtcaaattcactgcgttggtccatgcggtcatcaggaagttcacccagatgacgaacaggatgatggctacggcacggccggcgaagtcgaagttgaagaacggctgttcgatgaagctgatgcctgcctgcgcactggggaatcccgatttggtgggaatcagcagcgcaagtaccgcgtagatggtggcgaagatgaactggccgatgaacttgccgcccaccgataggccttcgttctgcttcttacgcaccttggcgaagtcgtcgataaagcccagcagacccatcgacagcatggcgaacagtacgagcgccgcggaccaggagggcacgtcgcccgaacgcaggtatcggtacagtgcggaggatgcccaaccgagcagaatcgcgaagttgatgaccacgccgcccaacgtgggggtgccgcgcttgaccagatgcgactgcggcccatcctggcggatgtactggccatagtgcagcttgtggaccagccgaatcagcagcggggtgccgactaaggtgacgatgagcgacaccagcattccaatgatcagagcaatcacgtgcagcttctctttcttgtcggtttcttggggtggttatcaggtcagttctttgcccagcgttcagccaaagcgctcaggcctgacgcgtgcgatcccttgagcagtaccacagcgtcgggatggttgcgagccaagtcgatgaccagctgttcggccgcatcgatgtcgtgtacgcaatccaccgacgcggattggctctgacgggcaccgtccgccagagcctgtgccagtgcatcgagatgttggtcttgggcggaaccgaccgcgatgatcgcgtcgatgcccaattcgtccgcatacgtgccgatcgaggtgtgcaatgccgtttcatcggcgccgagttccagcatggcacccagcagcgccacgcggaacggctccttgccgtcatttgagttccaggccttcaacccgttcaggccggctttcatggagtcgggattggcgttgaaggaatcatcgatcagcgtgaaggaagtcccctcgcgattcaccgtggacaatgccatgcgatgagggctgatggtgtgctgcgcggccagaatccgtgccaccgtttcgggtgccataccgtaacgcatcgccacggttgcggcggccaacgcgttcatcacattgtgacgtccaggaatgcccagatgcaccggcgtatggttgccgtccgcatcgaccaacgtgaattcagcatgatcggaccggtcggcagtgacatcaatggcccgcacctcgggctcctgcgacgatcccaagccgaaccacagcacgtcgccgttggccaggccggccatgggaaccacgtgttcgtcatcggcgttcagtaccgcggtgcctccgggaagcaatccctgcacgatctcgcttttcgcctgtgcgatgcgttcgcgggagccgaattctccaaggtgagcgacgccgaccttcaatacgattgccgtgttcggcggtgcgatacgggtcagtcgcgcgatttcgccgatatggctggcacccatctcagccacgaagaaccgggtgtgctcatcgacccgcaacgcagtgagcggcaggccgatctcattgttgaacgatcccaccggagccacggtcggacctacggtggcaagcagggaggagagcagatccttggtggtggtcttgcccaccgaaccggtcaatccgatgatgtcgaagtcgccgtccagctcgcggcggcgaacgatgttgtatcgggcgagttcgccaagggcgtcgaccgtgtctttcactacgatctgcggaaggccatcggacttcacctcatggtcgacgatggccaccgtggctccctgtccagcggttttcgccacaaagtcatgcccatcgacacgctcgcctcggatggccacaaacaccgatccggggccggcctgccgcgagtcgctgaccgtattggtggctcgagactcggaaccggcgtctccgatcaatcgaccatcgacggccttggcgatctcctccacgctcatcggaaccatggtgtttcaaactcctttacgattacgcttcgtcccgtatccacggacttaattgagattattggccacatgcagggcactgcgtatgttgtttttcctcacgccggcggccagcaccatggcgatggccaaggacatgtgcccgagtcggacgcggtcatacattgccggtgaatccgcagccatttcatccgattcgggtgtcgacgaggtcatggacatgtcatgttccgcaacgaatgcgtagcgtgtcttcaattcgttcaagcttgcgcttgcgttgacatcctccgtgcccagtacatccacgttcaccgattccaacgcatgctcggccaacgtgcggtcatccatggcgatgatcacggccgccacaccgtcttcggcgcacacggacagcgcgcgctgcatatcgaggatgcccagaggatagttcaggttcatggtacgtgtcatcgacgtggacccggatgcggtgattaccgccaccggattgcccagcatgtgcaggaattcggagagctgggacacgcctgcgtcgacggcctgctcatccgcaccggtcaccgcgaacaccgccatggcattggacggtccgccggccagaccgctggccagatcgccgagtacgcgatcgtcgaaatcgccgtagagcaacggtatatcggcattggcgatctgccctttggacgcgcgtggcagcaacgccgcataggcaccggcctgtgcggcatgcagtacatcgggttcctgctcatgcgtgcagatgaacagcgagccgggaatcacggtgtccacggcatcgctgagtgaggtaatggtgacattggtggcgaagggtggatcgacttcaaaaccgtaccgttcgaccagcattcccagggtcacccgctgggcgatggattcgctcactgcactcatgggctatcgcctttctcccctgatccttaccacgtgactggaatagcatttttgcgtggactggagacaggcacctcgtatttctgcataaggaactcacaaatctgtgcggaaacagggccggccgtcagcccgccgaacacaccattcggatccttcatcaccacggtgaccgcatagcgcgggttgtccgcgggaatcaccacggaataatcggagataatggacgagagcgtaccatccgagccctgcacctctgcggtaccggacttggcggccatgcggtaaccatcgaccttgacgaacttgttgtagccttccgccactgattccatcgcattcatcatgtccgatgcgaccttttcatccaccacgcgggtggcttcgcccttcttggtctcagtggtcttgccattggcatcggtggttgatttgatgatcgactgctgctgcttgacacccttgttcgcgatggtggccaccacgttgttgagctgcagggcgttgacggtgtagccctgaccaaacaggatggtgttgcgcgtacgcagatcccacgccgaagggttggtgagcagaccgctcgattcaccgggcaggttcagtccggtcggttgtccgatgccgaatttggtcaggtactcgtagcgttgctcatccggatagttctccccggccataatcatgccgacgttcgatgagttctgcagaatgccggcgagcgtccagcgctcagtgccatggtcgaatgagtccttgtaggtctggccctcctgtgtgatgtggtccgggaccgacaattgatcgctcatcttatgcagtcccatctgcagatagccggacatggagataaccttgcccaccgaaccaggctcgaaggtttcggacacggcccgagacgggctcatcttcgccgcatcggtaccagcctgtacttcatcgctatcggccagtgcgagaatctccccgctctggacatcctgcaccacggcgatcgcccacgctgcaccatacttggattcggcctccttcaagacctttttgacataccattgcacatcacggtcaatggtcagggtgacatcgtcgccatttttggccgccaccgattcggtcatggtgccgggaatctcttcgccgccattaccacgctggtaggtttcatggccatcggttccggtaagcgtcttgttctcgacctgctcgatgccggcgacgccatcgccgttgtcgttcacgccgccaagcagcgcgcccatgagatcgccatccgcatacagtcgttcactgctcagctcaccccagacaataccgcccaggtgcaacgactcgatgctgcgcttgacctgcggagtcacatctttcttcagaatcacatactgcccggtaccggacagatcagcgcccagttccatggcgttcatatccaggactttggccagcagtcggcccacggccgccgctccggtagcgcccacgggtttgccgtcaatttcgtggcagtaatcacgggtgttgtcattgcaagtaatcggctcgaactcctgtgcagcctccggattggcgacgatagtataacgctccacgctttgagcgagcacggagccgttggcgtcgaggatacgcccacgcttggcgctcaacgtcacggtcagggtgcggttagccgtggccgcttgtgcggtttgacggccgccgatgagctgggtggaggccagctgaatcacgcatgccgacgccaccaacgccaatgcggcgccgatggcgatgcatttgaacgcgaaggtcttgaccttggcgaactctacgatgcgacgaatggtgttcactgggttccgcctttgttggactggtatccgcttaagtcgatggacactgatccctgctgcgggaccatgcccatgtcgctggccttgtcgggcaggttcgcgaccaattgatcgagtttggcctgatcgtcttcgatatcttgggtaagtctgttgatgttggtttcgatctgtgccgcctcaaacgagttctgcaccatctgggtacgcagcatcagcgcgccgaacaaggtgccgacgaggaagatcactgcgatggccacgtgcaccagcggtgcgcttcttgttctggtccattcgatgacccgtccgacgacattgccctgctcgtttccacgcgggttggagaccacccgcagctcaggtcgggaggaggactgatgcttggtgtgcggtcggttcgaggctggagccgcgttcgatcgaatgctacgtgcagttgccatatgctgttatcccctccttgtacgaattcgtgccgtgtttttggctctgcccggagacgcggagccttgtatcttgacgtcattcaggccctgcgcggtttgcgtaaagcgtttcctccatcgtgacggaatctcacggctgacttccaccgcccgcaaccgcaccgaagccgatctcgggttggctgcgatttcatgttcgtcggccttgatggcacctcgcgtgagatccgtgaaaaacggttgggcatccggcggtatgacaggcaggccagccggaacatccactcgcagcccttgtgccatgaacgatttgacggttttgtcttcgagcgaatgataggactccaccaccagtcgtcccccgacatgcagtcggttcgcggcctgcggcaatgtggaggcgagcttgtccaattcgccgttgacttcaatgcgcaacgcctggaagacgcgtttggcgggattgcccgccgggcggtgggcttgcggcaccacttcatcgaccagacggttgagctgtgcggtggtggtaaacggctccttgtctcgacgcgccacgatggcgcgggcgatctgacgcgagaaacgctcttcaccgtattccttgaatatgcggaccagttccgccgcatcataggtggcaagaatccgttcggccgtcaacggctggctgacgtccatgcgcatatccagcggcgcatcatgcgaataggagaagccacgatcggtttcgtcgatctgcaggctggataatcccagatccatgaatacggcgtccacgcgttcgatgtcttggtccgccaacacctgatcgagctgatcgaaggcggcatgcaccggaatgaatcgatcggcgagcccctcccgttccatacgttcggtggccagccccagcgcttcactgtcacggtcaatgccgatgagccgagcctgaggcgcggccttgaggaaggcgatggaatggccggcaaggcccagggtgcaatccactgcgatggcgttctcatgttccagggcaggtgccatcaggttcacgcaatcgtcaagcaataccggcagatgaatattcgccacatcaaccatcagaattccacctccggcaacacatcgtcagcaatatcggaatatccctcttccttctcggcgaggtaggactcccacgtgtccttattccacagttcggcacgggtgccaacgccgatcaccacgacgtcggaacccagattggcgtaatcgcgcagcatctgcggcaccagcacgcggccctgcttgtccggctgctggtcgacggcaccggaaaggaacacacgcaggtattcgcgggcggctttgtttcccaccgacacacgctgaatctgcgaggcgatacgtcgaaattcgtcgaacggcagcaggtacacgcaccgttcctggcctcgggccatgaccaggccctgccccagctgggagcggaatttggccggaagcgccatacggcccttggcatcgatcttcggcgtatatgtgccgagaagcaatggcggcagaccagccatgagatcggccatagtggtggagccttgtgcgttggcatcagcgtcgcgaatcgtctgatcggcaaccatggctccacctccttcatcgttacgtgggatacacttcggccaactggctcaccactctaccccacgattccccatttctccccactcatgcacgatttgctcacccttttagggcaattaccgatggattgcgcgtgtcggccacgactgtcgcatgaatggacgctccgcacatccaatccacgtcgcgcaccccaccgaccgagcagcatggtgaattcacgctgaattcacctattccgggttgtccgcatcactgacgtagggggtgtgcggtaaatttgaatgccttaagtttttctgccccacggaaatggaacgaagagaacagcatgtcgagttacgcctcccagctgcatgaggagcagcaggccgtcgatcgcgcctatggacgattggatgatctgcgagccgaaatgtggcaacgcctggacaccgtacgcgccgccggctcccacggatcccccacgcaacgcagcgaacgagactcctttgccacaatgtacgaaaaccgcctcacgcaattgcgcagcgttgaggatcggctggtgtttggccgcctcgatgccaagaacggcgaccgtcattacatcggccgcatcggcctgtcgagcccggaccatgagccgattctgaccgactggcgtgccgaagccgcacgtcctttctatgaggcgaccccttccaatcacggcgacatcgtgatgcgcaggcatatcaccttgagtttccgcgaagtcgtgggcgttgaggatgaggtgcttgacgtgcattcagaccaggtcggccaggcgtcttccgccggcacattgaccggcgagggtgcgctgctggcttcgttgagctcacgccgcaccggcaagatgaccgatatcgtggccaccattcaggccgagcaggaccgcatcatccgctccgacatgaatcgcgccgtggtggtgcagggcggccccggcaccggcaagacggccgtggcgctccatcgcgccgcctacctgctgtacacgcaccggcgcacgctggaacgttccggcgtgctggttgttggccccagctcggcgttcctgcactacatcgatcaggtgctaccctccttgggcgagaccggcgtggtctcacgcaccatcagcgatctgattcccggcatcaccgccacggcggtcgactccccttatgcagccaagctcaagggcgatcgacgcatgacctccgtagtggccaatgccatcgccgcacgcgtgcgtgttcccgctgctctgccgacagtaaccattagcggcattcaggtaccaatgctggccactgatatcgagcaggcgcaggcggacgcgaagcgcacccgacaacctcataacaaggcccgcgagacctttatccgttcgatgctgaccagcatgcagaaccgttatgccgaacagcttgattacacgccggatcaggcggagctgaaccgcgcgatgtcgctgctacgtatgaacgagcaggttcgcaagaccctgaacctgtgctggctgccgatgaccgccccatggctcatcgatcagctgttcgcccatcccgaacgtctgaagtctctggctggttggctgaccgacaacgacatcgcggcacttgcccgccccaaaggctccccgttgacccgctccgatattccgctgctcgacgaagcaatggatatgctgggccccgatcccaaggcggtggcccgccagtccgccgccgacgcacgtcgtgccgccgaagagcagtatgccaaagacactctggccgcgaccggtctgggtggaggcatcgtctccagtcagatgctgctcgaccagatgaacggggacgacgctgagctgaccgcgcagcgggccgcggccgaccgtgaatggacctacgggcacatcgtggtcgatgaagcgcaggaattgaccgccatggactggcgtatgttgatccgccgttgcccctcccgctcgttcaccatcgtgggcgatgtggcgcagacttcggcgctgggtggcacccgacgctggagcaaatcgatgaaccgcctgttcggcgaaagccactgggatttgaacgagttgaccatcaactaccgtaatccgcaggaagtttccgaacttgcctcacgatttgccgaggaggaaggcctctacatctccacggtcaatgcggtgcgcaccatccccgattcggtgtcccgcaatgtggtgcccgacatgtcgtccttgctggaaacgacggccgagcaggcggcgcagcttgccgaacaattcgtttcggcagacggcaccggccgcatcgccgtcatctgtccggataatctcatcgccccggtgcgcgatgccgtgcgccgcaaactggctgtcattcttgacccggccgaatacgcaaggctcatcgagcagcccgaatgggatgagcaaatcagcgtctgcggcactgaaacggtcaagggtctggagttcgatgccgtcgtggtggtcgagcccggtctcatcgaggatgacgcgccgagtcgcctggtcgccgcctcggacctgtacgtggcaatgaccaggccgacccagaaactggttatagttcggacaaaagcggacgaaaagtccctgaacatctaaggtatgaagcatgcccaaagcactgttattggaaaacattcaccccgatgcggccaaatcgctgcgtgatcacggtttcgaagtcgagaccatgaagggagccctgagcgaggacgaactcatcgatgcgctggatggcgtggacttggtgggcgtacgctccaagaccaacgtcacagcccgcgtgctggatgcgcgtcctacgctaagcgccatcggctgcttctgcatcggcaccaatcaggtcgatctggcacatgccggcaagcgtggcatcgccgtgttcaacgctccctactccaacacccgttccgtggtggaattggtgatctgcgacatcatctgcttgatgcgccgcattcccgcacacacacatcacatcaagcatggcctgtgggacaagtccgcttccggctcgcatgaagtgcgaggcaagaccctcggcatcatcggctacggcaacatcggctcccagctgtcggtactggccgaggccctcggcatgcgcgtggtgttctacgacattgaggagaaactggcactgggcaacgcctaccgttgcgacaccctcaacgaactgctggaacagtccgatgccgtgaccctgcacgtggatggccgcaagtcgaacaccggattcttcggcgaagaccaattcgcccacatgaagcaggacgcgattttcattaacctttcgcgcggtttcgtcgccgatctgggagctctgaagcagcacctcgattccggccatctgtctggcgcggcggtcgacgtgttccccgttgaaccgaagaagagcggagatccgttcgagacctcactggccaatgaagacaatatgattctgactcctcatattggcggctccaccttggaagctcaggaatccatcggccatttcgtctctcagcgtcttgaggattactggttcaagggttctacctccttgtccgtgaacctaccgcagatcaacctcggtgagtgcaagggtgtgtgccgtatcgcccatctgcacgacaatcttcctggtgtgctggctcatgtcaatcatgtgctcggcgaggagaacatcaacgtttccttccagtcgctggcaaccgaagacgaacttggctatgtggtcaccgacgtggctcagacgcccagcgccgccacgcttgaagcactgcgcaacatcgaaggcaccattcgcatgcgtgtcatcagctgacgcagctcatcctcgattgatatgaaagagacccgtcatcatgacgggtctctttcataagtgctgggcttcatgattggctcgcaccatggtttgcgaatcactcgcatatcacggtgcatggcattcgcatattattcacgcaaaccatcaatggcgctttggaaatcctccagacctgcaaagttctggtacacactcgcgaatcgaaggtacgccaccacatccaagtcacgcaacggtttcaggatggctttgcccacttcatctgaggtgacttcggcaaggcctcgggagcgaagatcctcttcgactttctgtcccagcagcttcagatcctcttctctgaccggccgcccctgacaagctttgcgtacgccggaaatcactttgtctctactgaatggctccacgccacccgaacgtttagtgaccagcagcatactggtttccaccgtggtaaaacgcttgctgcatttcgggcatacgcgacgccgacggatggaatgaccgtcatcgctaatgcgcgtatcaatgactttggtgtcggggttctggcaaaaaggacaatgcatgctccccagaataacgtgtacgggcggaaaaaccatgccgctcgggtttcatttactcaaccggaacaataatgcgctgcccggcctgcaatgatccggactcaagattgttcaacgcaatcagctcatccaccgtttccgatacatcatgaccagcaggcgtgatagccgaagcatatgaccagagcgtatcccccggccgcacgatataactggtcacctgcgtggcccccgtatccgattgggcccgctgagcggtaagcgcgccgaaaccacaccaggccagcgccaaggcgaccatcactgcgataatcttcccacgcacattccggtggaacgttccagcatgctgcatagctacacgtgcgctacgggccggggccatcaccattgaaccagtcatcacgaccacctctctcgaacagatgttctatcgaacaactgttcttataatggcacaaacgttcgacacggtcaagtcgaaactcgaacagatgtttgatttcacacgaacaacacgttatgctggtgacgtaacgaaaggagccctgacgtgagcaccattcccttctcccccaagcagaagccggacgagtccaccctgaccgaccgccagcgcaaagtgttggacgccattcgcacgcatatcgacgaacaaggcttcgctccctctttccgggaaatcggaaatgccgccgggctcaaaagtccgtcttcggtcaagcatcagctacaagttttggaagacaagggcttcatccgcatgaacgcgaacaagggtcgagccatcgaggtggtggcaggatccgccccgaatgccgaaaagccctcccaagccagcgaagaggcaaccagcaccagtaatgtggcggagatataccaattccccgccgaagccattgccgaatcacacgatgtgccgctcgttggccgtattgccgccggcgtgccaattaccgccgaacagcatgtggacgacgtcatgcgtctgccggaacggctgaccggctccggcaccctgttcatgctggaagtccacggcgattccatggtggatgccgctatctgcgatggcgactatgtggtggtgcgcgaacagaattccgccgtcaacggagatatcgtcgccgctctgctggacgacgaggccacggtgaagaccttccgcaaggaaaacggccatgtctggctgatgccgcacaaccccgcatactcgcccatcgacggcacacatgccacgattatgggcaaggtggtcaccgtgctgcgcaaattgtagcctgttcgccaccagctgatcagcgtgcaccgaatcgcgctggtcgtgctatagtcacgcacagcttacggaaccccggcctcgcgccggggtttcgtcgtattcagaccatatcgcaaatggaaatgagaagcggtttcaactcgatagagcgaaggagtacatatggctcatacccatgcacccgcaccatccacatccgtaaaccctgccgcgcaccagcgtaggctgattgccacgttgaccgtaaccggttcggtcttcctcatcgaagtggtgtcggctgtcttaaccggctcattggccctgctggtggatgccggtcatatgctcaccgacatgtccgtgctggcggcatccacaatcaccgccatactgatgcgccgcaagcccagcaacactcgtacttggggctgggccaggcttgaggtgctcaccgctgccgcaggtgccgtggtgctgctcgtcgttggcatctatgcgttgatggaggccggcatgcgtctgttcggcggttccaaagcggaaatcgacgatatcggcttgctgctgttcgtgggcattctgggtcttgccgcaaatatcatctcgattttcatccttgcctcgcagcgcgaagacaacatgaatatgaaggccgcgttcctcgaggtgatgaatgacgcacttggctcggtggccgtggtagcctctgccctggtaatgatctccaccggatggaatggcttcgacgccgtggccggtgccgtcatcgcactgatgatgattccgcgcgccatcaagttgctgcacaacgcggtcaaggtgctgctggaggaaacaccggatggacttgacctcgataaggtacgcgaacatctggaagacgtgccgcatgtgcttgccgtgcatgacctccacgccagcacggtgtccaccggcatgccgattctgatggcccacgtggtagttgacaaagacctcaccatggaagatgccgccacaatcctcacccaactgcaggattgcctgcgcgagcacttcccggtctcggtcccccacaccaccttccagctcgagcccgagggctatagctccccctcctccaacgaactccacgaataaaaaatgctcccaacgggagcattcagcagggtataaaaaatcgctgtacgtgtgcgattttcgtgccgcacaaggtgaaggcctacaaaggtaggtcgagtcttgtgcggtgcgaaaggcgctccgtacagcgattttttatcagaagccgaactgggcggcggtttccttcagcgtctcggcagagcgcttcagagcggcgagctccttgtcggagaccggggtgttgatggtgttgttgacgccctgacggttgaggagggtcggcacggacatgcagatgtcggagatgccgtggaagtccttgagcatggagctcacgggcagaatgcggttggtgtcgtgcaggacggcttcgatgatgtcgacgccggacatgccgatggcgtagttggtggcacccttaccgttgatgatcttgtaagcggcgttcttgacttcctggtggatctcctcgcgcttgtcggcgtcgagcggatcgtggccgggcagcggggtccagtcgcacatggggacgccaccgatggtggcggactcccacagcgggacttcggagtcgccgtgctcgccggcgatgtaggcgtgcacgttcttgacgttgacgccggtctgctgggcaatcaggaagcgcaggcgagcggagtccaggttggtgccggaaccgaagatctggttctcgggcagaccggtgagcttctgagccacgtgggtagcgatgtcgaccgggttggtgatgagcatgtagatggcgttcggagccaccttgaccaggttcggcatgatggccttgaggatgttgacggtagcgccaacgagctcaagacgagactgacccggcttctgacgcggaccagcggtgatgacgaccatgtcggcgtcgcggcagatctcaggatcgtcggaaccgtcgatggacacggtcgggtagaagctggagccatgctgcatgtcgagcacttcggcttccacgcgctccttggcgatgtcttcaagcacgatctcgcgagcgatgccacgctgggcagcggcgaaggcgagggtggagccaacggcaccggcaccaataacagcaagcttcgtgggcttaacggtagtttccgccatgatggatgaacctctcttcaaaggcggtctgctgatgaatggcaggccttgtaactaacgtcttcactctataaacccgctaagacgttttgctaccggcacaccaccctgtttgataaccgtatggtaatgttttcaacggttgttagcgctcacgaatatactgtgatgtttatcacgttagtcaatggactgttcgaccacctgagcggcaagatgggcgtcaacgtccgcttcaagctgtatgccatcatcgcggtactccaccttgtctaccttgccgtattcgcgtacacgagagatcagggagccagcggtatacggcagcagagcgttgacatgcacatgcgggaccggcagcagactttcgaccgcggtacgcagctcgtccaatccctcaccggtataggcggagacgatgaacgcatctggccgcagcgcggcgagtcgttcacgagtcgcctcgtccgcctgatcggccttgttgaatacgagaatacgcggaatcgaggccgtgccttcgatgtccgccaacacgtcattgaccgcgtcgacctgagagaacgggtcagggtgggagccatcgaccacatgcaggatcacgtcggcctcggccacctcttccagggtggatttgaacgcctcgaccagctgggtgggcaggcggcgcacgaagccgaccgtgtccacgtaggcgtaagcgcgtccgtcgcgggttttggcgcggcgcacggccgtgtccaatgtggcgaacagcgcgttttccaccagttcggccgaaccggtcagacggttggtcaacgaggatttgccggcgttcgtgtagccgaccacggccactgtgggcaggccgaagcgacggcgtgaaccgcgcttgacctcacgtgccggggccatctcacgaatctgacggcgcagtctggcgatacgcgtgcgaattacacgacggtccatttcgattttggtctcgcccgggcctcgcgatccgatgcccgcatccgcgccggccgcgcgaccgccggcctgacgggacagcgaaccaccccaaccacgcagtcggggcagcatgtattcgagctgcgccaactccacctgcgccttaccttcacgcgaggtggcgtgctgggcgaagatgtccagaatcaccgcggtgcgatccaccaccttgactttggcggcgtcctccaatgcacggcgctgtgacggcggcaggtcgtcgtccacgataatcgtatcggcttcctcacgcgccacgatgccggcaatctccttggctttgccggaaccaacgtacgtggctgcatccggcttggagcgatgctgcagcaaaccatcgcataccaccgcaccggcggtttcggcgagcgccgccaactctctcaatgattcctcggccttggcttgcgtggtgacggcggacgaccagacgccgacgagcaccacacgttccagacgcaccttgcggtattcgacttcggtgacgtcctgcagctcgccgagaccggcgacatgcttgagctcgttgcgggcctcgcgctcctcccattcctggttggcgtcctcatgccagccggtcgcgcgctggctgtcgtcgagcaacacttcggactgctcggccagcacaccttcaggggtaacgtcgttgttgccgcggttgatgtcggtgtactgggtgttgtcggtcaagtgcgcctcgtttggttggaatggttcacgattcttctatggtcctttattatcatcacatgaggtgacatgctggcatagatcggcacgtaccggcataggccggctgatacaggtcggcatacgagagcggcgaatcccgcagaaatggagcgaccatggcagaacagtatttctctgcggaacccgcatcgaaggatgtgcgccgcacattgaacgtaacgttgcgcggccatgaggcgaccgctcaggtgtcgaacggcgtgttctccggctcgcgcgtggacctcggtacgtcggtattgctgaagcatgcgcccgagccgccgcttaccggcgattttctggatttgggctgcggctggggccctatcgccctgacattggcgtttgagtcgcccgaagcgaacgtgtgggcggtggatgtcaacgagcgcgcggtggacctgacccatgccaacgcacaggcgaacggccacacgaacattcatacggctcaggtggacgagtccagcactcccctgcccgccgagaaccagccggcgttctgcgagacggtgccgagcgacctcacgtttgatgtgatttggtcgaacccaccgatccgagtcggcaaggaagcgctgcatacattgcttatggcttggctgccgaagctcaaggtgggcggcgccgcctatctcgtagtgcagaagaatctcggttccgattcgctgatcccctggctggacgatgcgctcggcgaagggttcactgcgagcaaatacgcgagctccaagggcttccgtatcattgaagttcgtcatgaaatatgagtatcccgcagaacttcccgtatctgccgcgcgtgatgagatagccagcgcggtcaaacgttcccaagtcgttattgtgtccggccagaccggttcgggcaaaaccacacagctgccgaaaatcctgcttgagcttggccgcggcacgcacggcaagcagatcgtgcacacccagcctcgccgcatcgccgcacgcacggtggccgaacgcatcgcctcggagatgggcgtgaagctcggtgacgaggtcggctatcaggtgcgtttcaccgacgaaagctcgcccggcacacgattgagggtcgtgaccgacggtattctgctcgcccagatccagcgcgatccgaaactcacccgatacgatacgatcatcatcgacgaggcgcatgagcgcagtcttaacatcgactttctgctcggctatctgacggcactgctgcctcagcgccgcgatctgaagctcatcattacctccgcgaccatcgattcggtcaagttccaggagcatttcgagcacgccttgcatgagaaggtgccggtaatcgaggtttccggccgcaccttccccgtgcaggtggtctacgagccgcttggcaccgcgcccgcgttgatgcgcgaagtgccgggattcgcggtgggcgcccgccccggcgacgccgattacgacgagctggccagcgccatcgcggaatccgatcccgaccggccccgcggccggtccggtgcctcctatgccgatgacggcatcaccgatatgcccacggccgtggctcgagcctgcgccgaactggtgatccactcctcccacgaacgcggcccgcgcgacatcctggtcttcgcctccggcgagcgcgacatccacgagttcgaggccgcactgcggcatcattacggcccgcgcgccgacgacatgcgccggccggatgccatcgagatcatgccgctgttcgcgcgactgtccgccgccgaccagcataaggtgtttgaatcgcaccttcaccagcgcatcgtcattgccaccaatgtggctgagacctcgctgaccgtgcccggtatccggtatgtggtggaccccggttccgcccgtatctcccggtattcgaagaccgcaaaggttcagcgtctgccgatcgagccgatcagccaggccagtgccgaccagaggtccggccgatgcggccgtgtggccgacggcatcgcgatccgcctgtattcgcgtgaggattacgagacccgtccgcgcttcaccgagccggaaatcctgcgtacctcgctgggtgccgtggtactccacatgctgtcggtgggcgtggcccgcacggccgaggacgtcacgaacttcgggttcatcgatccgccggatatgaaggccgtgtcggacggtttcaatgagctcaccgagctcaaggccatcggccgcaagcgcggcgaggtgacgctcacccataccggtcgtcagctggcgcgcatccccatcgacgtgcgtctgggacgtatggttatcgaggccgcgaaaaccggttcgccgaatcttctggcccaggtgctcgtggtcgtggcgttcctgagcttgcaggacccacgtgaacgcccggacgacaagcgtgaggatgccgaccgcatccacaaccggtatgcggatgagacctccgacttcctgacggccctgaatatctgggaccgcgtgttccaagcagacggcgacccgagcaacaacgcgctgcgccgtatctgcaaaaccgagtatttcagctggctgaggatgcgccagtggaaagatctcgtctcccagctacgccagatgtgcaaggagctgaagttcaaggtcggcgacccgctgcccgcctcccgcccaggcttggagatccgccagctgccgttgaatcagcaggccgcgcattcgctgtgctgcgcgtgggatgcggacggcatccacaagtcgatgctcgccggattgctgtcgatgatgggcatgcaggtggtgcgcgagcccaaggcctccgatttcgcggggctgaccggtgcggcgcgcgcccgtgcgatgaaacgcgcccagaagcagtcgaagaacgattatcagggcgcacgcggcacccgtttcgccctgttccccgcttccgccgtggccaagaagaccccgtcatgggtgatgagcaccgaactggtggaaacctctcgcctgtgggcccgctattcggcggccatcgaccccgcgtgggccgaaccgttggccggccaattgacccgcaccacgtatgcggagccgcactggtcgggttcgcgtggctcggctgtggccaccgcgcgcgtgctgctgtatggtctgccgatcgtacaggaccgtgccgtgcagtggggacgcatcaatccacttgaggcgcgcgacttcctgattcgccagggtctggtcgagggcgatattcagcagcgtttcagttacgacgacttcgtgggcaaaaaccgcgacattctcgaggatgccgccgatgatgcgagccgcacccgccagctggcggataccgtgtccgacgaggatctgttcgacttctacaacgcggtcattcccaacgatgtgaccagcgtggccgatctggcgaaatggtggaagtccgagcatgaccgtcagccgaatctgcttgatttcgacccggccaaggtggagcgtctggcatccagcgattcggtgagtctggacgattaccccgaccattggcatacgaccggatcggacggccaacccatcgacctgcgtctgagctacgtgtacgatccggccgacccggccgacggcgtcaccgtgcatgtgccgttgaaggcgctctcgcgtatcacgcccgaccagttcacatggaatgtgccgggtctgttggatgagctgatcctgtcgatgatcaaggcgctgcccaagcagctgcgcgtccagttcgtgccggccccggatgccgcgcgtgcgattcgtgactggatcgacgagcattacccggatctgccgggctcgggctcgcagcagaagccgaatctgccgccggtggatgaggatggcacgaccgttggctggcccgatctggcacatgtgttcaccaaggcggccatcgccaccaagggtgcgcagattcatcccgaagtgttggggccggaactggtcgagcgtctttccccgtatctcagagtcacgttctcggtggagcagcaactgccggccggcaagcaccctcgtggacgccggcatgcgcgcggccccatcaaggtgctgggtgtgtccaaggatctgaaggcgctgcaacgcaagttcgccgcgcaggcggaggcgtcggcccgtcaaatggtcaagaagcaggccgatcaggctggagaacagggcaagctggtcagtcaggcgaacctgttgcataaggcgggtgccaccaccgagtcccgggccacgatgctctggcgtggcgcattggatgcgttgcgattgccggccgaacgcatttcgtcgcgctggctgggtaccgaggcgttgatgctggcttctgctccgtacaagtccaccaaggatctggtcgaagacctgcagctggccacggtcaaacggctgatgccgaatgtcgacaggctctcggacgatgaggcgttagccaatgcggtgctcgatgtgcgcgaagtgtacgaggacaccgtctatcaggtggcgcatgacgtgatcgccgtgctcaaggcttatgccgaggtcgacaaggccactggcggcaaggctgatctgccgatgctttcggtgttgcagtcgattcgcgaccatatcgccacgctcgtctaccccggattcatcgggcgcactcccccggatgcgctgaagtcgttgagccgatatttgagagccgatctgagccgactcaataaggcgaaaaccgataagaaccgtgatgtcaagtgggcttggcaggccgacgaggcccgtcaggtggtcgataaggcgttggcccgtgccaaggcggagccggccggcccgaagcatgaggcattgatgaagcaggccgaacaggcccgttggatgcttgaagagttctacgtgtccctatgggcgcaggagcttggcaccaaggggccggcttcgctcaaccgtatcaagaaagcgctggcgtgaccggacggcaaacaagtcgccaggccacgcgccagcgcacgcgcaagccgtcatcacagcgtgggcaagtgcgcggatgcctcggcaatcggaacaggaaacgcaatcgtaggcacggtccgatcaatgctctgaagcgttcctggcgtaaggcgaactggccgacccgtatcaagatggtgctgattcccacggtggcggtggtcgttgtcgtagcgctggtggccgggctggttcgtttcacaaactggcgggcacaggttcgcgcagccgaggcggcacagctggaactgacgcgaacatacgatttcaatccgggcaatattatttcggatggtcagttcttcaacggttcggcgatgagtcaggccgaagtccaatcgtttttggacacacaaggtggctcgctggccgcgatgaccttcgacacatcgaacgagtcaggcgaaggcctgtgcgcggactatacaggcaccaaaggcgagtcggcggcggcaatcatcgaccagtcggcccgcgcctgcaaggtgagccagaaagtgctgctcaccgtgatgcagaaggagcagcatctggtcactgccgtcgatcccagcgactatcagcttatggcggcgatggggttgaactgtccggataccgccgactgcgatcccgcctatgccggattctttcggcaggtgtatggcgcggccaagcggtaccgttactatctcgagcacgaggaacagtacgggtatacggcgcacaatctcaactacatccaatatcatccgaacgcggcatgcggcggcgcacaagtgtatatcgagaacaaggcgaccgccctgctctacatctatacgccctaccagccgaacatcgccgcactggccgctggcaacggtaccggcgattcctgctccagttatggcaaccgcaacttcgcgcttatctacaccagctggttcggttcgccgcgaagctgataacggcagctgaccggtcttgtccgattggactcggccaacactgtcagcgttcgacgtatggacgcagcagggtcgtggcgccaaccgccagcagcgaggcgaaagccagcagacacaggcagacggcctgcacgcagtagatcggtcgaatgtgggtcaatggttccacgccatgacctttgtcggccagcttgccgccgtacaggttgctccacaggcaggcgcagccgtaaatcaccaagccgatgctgatatagcgttcgggcacgccgatttcgtcgcgcatgatcggcgaaagatacgtgtagaagacataggaggcggctgcgccgaagaccacatccgccacgccgagctggatgcggcggtcgaagaacaggcggaattgcctcaggaaaccgatcttcgccggatgcgagttgcgtggcagagacactgccatcgatgccatcagcacggcggtgagcaccgagaccaaggcaaaggtgacacgccaaccaaaggtatcggccacccaagtgccggccggtacgcgcggtgttcgcaggtgcgttcgtcatgggtgctctcttgagtgctctcgctcgtactacaagctgattcgtcggttacgtcaatcgttttttcgtatcaactcagcgataacacttttcccgcctctgcccgctacccaccaccacgacacgccatagaaaaccccgccgatgaccaatcatcgacggggtttggcacatgtgcaacgcttgcgattacagcttcggcagatacttcttcagctcgtaaggcgtgacctgctggttgtactcctcccattcctggtgcttgttgtccaggaagtagccgaaggcgtgttcgccgagcacgtcggccacgaagtcggatttctccatgatcttcagcgcctcgtccagcgagcgcggcagcggctgaatgcccatagcctgacgttcgccgtcggtgagctcccacacgtcatcactggtaggctcgcccaactgcatctgcttatcgataccgtcgagaccggcggccagcagcaccgagtaggcaaggtatgggttggccaccgggtcgagcgcacggaactccatgcgcgcggagttgcccttgcccggcttgtactgcgggatacgcagcagcgcggaacggttgttgtggccccagcagatgtagcttggtgcctcgttaccgccccacaggcgcttgtacgagttgacgtactggtcggtgaccgcgcagatttcggccgcatggtacaggatgccggcggcgaactggcgggcggtcagggacatgttgaactcctgaccggcctcgtagaaggcgttggaatcgccttcgaacaggctcaggtgcgtgtgcatgccggaaccgggcgcgtcggccaggggcttgggcatgaagctggcgtgaatgccacgctccaaggaaatctccttgaccaccgtacggaatgtcatgatgttgtcggccatggtgagcgcgtccgcgtatcgcagatcgatctcgttctggcctggccccgcctcatggtgcgagtattccaccgagatgcccatttgctcgagcatgttcacggtggcacggcggaagtccatgcctgggctgcgcggcacgtggtcgaagtagccgccctcgtcgatcggggtcggggccttggaccagtcgtcctggctttcgaacaggtagaactcgatttccggatgcacgtagaacgtgaagcccttgtccttggctttggcgagcgtgcgcttcaacacgtgacgtggatcgccgagcgaaggctcgccgtccggggtcagaatgtcgcagaacatgcgggcggtaccttgcgggccaccgcgccacggcaggatctggaacgtcgagggatcgggttgaacgatcatatcgtcttcggacacgcgggtcatgccctcgatggcggaaccgtcgaagccgagaccctcctcaaacgcggcttccagttcggccggagcaatcgccacggacttcagtgttcccaacacgtccgtgaaccacagacgaataaagcgcacgtcgcgttcttcgaccgtgcgcagcgcaaactcctgctgtttatccatagtcgcctatcgttccataaccgtgttacgaagggcgttaacatctcactgttcgtcacctgcgagtcgcgagatttcatcaacatgccccggtccgcatgtcaggcatggttcaggcccatgccggcacggcactatggtagtgactatgagcgaagatcatctcaccccatccgccaatccgcccgtcgacgtgaccagctggacgcaggccaccgacccgcgcgaccgttcgcgcgccggcatcgccactcgtaccaaggcgccgctggacgcacatgccatctggaaggtcaaggagggccggcgtgaggcgatcagccttttggaggagcagtccgcgattcgcgtaccggatctgattccgctgcgttacaagcgtatgagcgccagccccttcaccttctaccggggcaccgtgctcatcatgaccaatgacctggcttccacgccagtcactggcattccggtgcagtgcgtgggcgacgcgcatatcggcaatttcggcattttccgctccccttccgcccgtctggtgttcgatatcaatgatttcgacgaaaccgctatcggcccgtgggaatgggatctgaaacgtctcgccgcctcggtggagatctgcggacgcgccaacaaaatcaaggagaaggaccgtcgcgccgccgtggtccagtgcgtacacacgtaccgcacacgcatgaagtggttctccgaaatggattaccttgacgcgtggtatgagcacctggacgtggaggagacgctcgaccgcttcgagaccaccggttccaaacgcagccgtgtgctgcgtgaggcggccatgaaggcgctgctgaaggataacgacgcggcggcggccaaactgtgccgttatgagagcggcaagctcaggttcaaatccaatccgcccgagctggtgccgatcaatcagctggatgattacgccgacttggatgcgttgcaggcacgtatagacacgctgttcgagagctaccggcattccctgtacgacgatcgccgttgggtgttcgatcatttgcgctatcaggatgcggcccgcaaggtggtgggcgtgggctcggtgggccagcgcgcgtggacgtcggtgtggatcgcgcgtgatatcgacgatccgatgatgattcagatgaaggaggccacgtattccgtgctcgagcattactgcggcgcgtcgccgtacgccacgcacggtgagcgcgtggttcaggggcagaagctgattcagaatacggccgatgtgctgttgggttggtcgagctttatggccgaggatggccgaccgcgcgactattacgtgcgccagttgtggaatggcaaggggtcgattgatatcgacaatctcaacgcttcgggattgagcgatctgtcacgcatgtgcgcatggtcgttggcgcacgcccacgcccgcaccggcgattcgattgcgatcgccaattacatgggtggcaccgacgaattcgatcaggccatcgcctcattcgccgtcagctacgccgaacagaatgatgaagactacgccgtcttcaaaaagctcctcaaatccggcgacctcccttgctgagccgttaagcggacagcccaatgggctgtccgtaggaggggtctgagtgaagcgatagctgagcgaaggtagattaacagtctcgctaaggcgagtcctttgcctacttcgctacttcaagcgcttcctggagcgtgaacgcacgtgcatagagggacttgccgaggatggcagaatcaacaccaatttcagccagttccttgatggcgcgcaaatcgtccagcttggagataccaccggaagccgtgaccttggcgtcggtgcgttcagcgacttcactcagcaattgaatgttcgggccggacatcatgccgtccttagccacgtcggttaccacgtaacgcgagcagcccacggagtcaaggaacttcatggtctcaaacaggtcgccgccttcgcgcgtccagccgcgcgccgccagtgtgtgaccgcgcacatccagaccaacagccacgcggtcgccgtacttcttgatgaccgaggcggtccaatccggattctccaaagcggcggtgccgatgttcactcgggcggcaccggcctcaagggccgcgtccaacgaagcgtcatcgcgcacgccgccggacagttcgatgttcacgcggtcgccgagctcatgaacgatttctcgcagctgatcgcgattgttgcccgtaccgaaagcggcatcaaggtcgaccaggtgaatccattcggcaccggcctcaacccaagtacgggcggcctcgaacggcgaaccgtaatcggtttcggaaccggattcgccttggcgcaggcgcacggccttgccatcgcgtacatcgacggcgggcagcagagtcaacgacataagaagagcctttcttcagttacttatacacaatttgagctccctcgtcagagggagcttcatgcttttttacagcgtggcgatccagttcttgaggagctgggagccagcgtccccggacttttccgggtggaattgcgtggcggacagcgggccgtgttcgtaggcggccacaaagcgcgatcggccgtacgagcaccagctcacgcgttcgggcgaatcgctcagatcgatgtcgaagcgggacgtatccgccggcttcacttccatcgcggcgtaggagtgcacgaagtagaaccgttcgttctccacgccgttgagcagcaccgaatcgggggcggcctcgatcgtgtcccatcccatgtgaggcaccacgtcggcgtccagcaggttcaccgaaccgccgatcagtccgatgcctgcggcatgggcaccgtgctccagaccgtgttcgaacatgatctgctcgcccacgcacacgccgagcaccgggcggccagcgcggatgcgatcatagatcacacggtcgccgtcgaccttcttcagtccttccatacatgcggcgaacgcacccacgcccggcacgactaggccgtcggcctccaacgactgccggtagtcggaggtgagggtggtgtcgacgccaagattggcgagcgcacgcaccatggaacgtacattgccgaaaccgtaatcgaaaacaaccgctgtggtcatctgctctcctatcccctactggtttggttggcgtctattcgatgcgggagccgcgcccgccacgtccgcgcctagtgtggttggcgagaatctgcatcgcctgatcatggtcgagtccagcggaatccaccacttcgaacccttgggtcttgagttggttcagggttacgatgccgagcatcaggtcctcgacgaagcgcggtgtggaggtgaacagcacgggcggcgcgaaactctggccggcctctccctgcacgtacatggccacttcgagcttgtcggcacggttgactgcaagaatcacggccatgccggataccacggtggtcaggtccttggctgcggcttccgggccgtcgccgttcagattcttcagcaccgcgacggccccctgattggcaccgatgcatgcggcggagatgtccgacagctggcagaacgcggccaacagttcggcggaggcaagacgggtaacgatcagcgccaccttcgccttgttacccaacagtccagcgagttcgttgtcgaagccgagcgaggggtcgaccacatcggccatggcctcgttcaccgcatccgcaacggacccggtgacgtcgtcggtcataggccggccggaatcagcggaagccttatcagccgtatcatcattcgcgtcggaatcggacttcgctgaagcagcgtccgctgttttatcggcatcactggtatcactggcatcgccggataccgaatcgtccgcgaattctttctcgaatccggcgagcgcagcctcaagctcctcgtcggagaagtgcgattcgtccggatcgaacttgtcgtcggtcatcacagggctcccttggtgctgggcacgccgtctacacgcgggtcgatttccacggcgaagcgcagcgcacgggccagcgccttgaattcggcttcagcgatgtggtgcgggtcgcggccggcgagcacctgcatgtgcaggcagatgccggcgtggaaggcgatggattccatgacgtggcggaccagcgagccggtgaaatggccgccgatcatgcagaattcgtagccttcgggctcgccgctgcacacgcagtacgggcggccggaaatgtcgaccacggccttggccagcgcctcgtcgagcggcacggtggcgtcggcgaagcggcggatgcctttcttgtcgccgagagcctgcttcagagcttcgccgaacacgatggccgtatcttccacagtgtggtgcacgtcgatgtcggtgtcaccgtgggcgtggatggtcaggtcgatcagcgaatgcttgccgagcgcggtcatcatatggttgtagaacggcacggatgtatcgatatcggttttgccggtgccgtcgaggttcagttcgaggtcgatgtgtgattcgctggtttcgcggacgatgtgcgcggttcttgccatcatgtctcctgtgtgattcgtcatattggattgcggcgggactcgaatcgcttcgggtctcgccgcaatcggaaagaaacgtcccttatgctgcttccactatacgaagcacttcaacaagggcgttacggaaggtttccatctcctcgtcggtgcccatgcacacgcgcagccaaccgtccggtccgaccacacggatgagtacgccgcgcttcaggagctcgtcgaagatggcttcacgcttgtcgaagtgcccgccgaacagcaggaagttcgagccggattcggccacttcaagcggctggtccttgtaggtctgttccttgagccatgcggcggtggcctcgcgggtttcgcgcaggtgctcgacacggctcagctgctcgtcggtgtgttcgaaggcggccagtgcggcggcctgagtcacggcggacaggtggtacggcatacgtacgatacgcacgcagtcgatgatgcccttggacgcggccaggtagccgactcgcgcaccggcgaaggcgaaggccttgctcatggtgcggctgacggccaagttcgggtggtccttgatcaggctcacggcgctcggggtgccgggcttgcggaattccacgtacgcttcgtcgatgacgagaatcgggtgcacgccctcgcccgcgccgaccacttcagcggtttcgcaggcggcgagaatacgttcgatatcctccatcggcaacggggtgccggtcgggttgtttgggctagtgagcagcaccatcgagggcttgacctcggcgatggcctcaagcaccttgtcgacgttcagcgtgaagtcggcgttgcggtgggcgagcttccaaccggtgaaggtgtcgcgggcgtactccgggtacatggagtacgtcgggtcggcaccgagtgcggtgcggcccgggccaccgaaagcctggaacagctggagcatgatctcgttggagccgttggcaccccacagctcgtccacgtccagacgggtaccggattcgcgggccaggtaatcggagaatgcctgacgcaattcgatgtgctcacggtccgggtatcggttgagtgtgggggcgatttcacgcacacgcttggcgatggtgtcgcatacagccgggtccggcgcatacgggttctcgttgacgttcaggcacaccggcacgtccagctggggagcgccgtacggctcctcaccgatcaggtcgttgcgcagcggcaggtttgcaggaatcgagctcatcgcagaccggcttccttctcctgctcgcgcagggtggccttgtcatacggatccttgacgaagcgggagagcacgcactcgccgtgggcgggcaggtcctcggataccgcgaaggcgttgatgcgggcggcgagggccttgaggccttcctcgtcgtattcgatgacttcgaccggcttcatgaaggtgtgcacgccgaggcctgcggcgaagcgggcggtgccgccggtgggcagcacgtggttggagccggacatgtagtcgcccagcggcaccggggagtacggaccgcggaagatggcaccggcgttcttgatgcgcttgacgaccgcatcggcatccttggtctgaatctcaaggtgttcggcggcgtaggcgttggccgcgtcgatggactggtcgagaccgtcggtcagcacgatggcagactgggtgccggacagcgacgtgtggacacgctcggcgtgctcggtacgcggcacgcggtacttgaggctctcctgcaccttgtcggcaatctcggtggagtcggtgaacagcacggaaccggcgagctcatcgtgctcggcctggccgatgaggtcggcggccagcaggctcgggttggcggtttcgtcggcgatgatgccgatttcggtggggccggcaaccgcgtcaatgcccacgaatgcggagaccagcgacttggcggtggccacgaagatgttgcccgggccggtgatcttgtcaaccggatcgcacaggatgtcgccgtcctgcggctcgctgcccttggcgccgtatgcgaacatggcaatggcctgagcgccgccgaccgcgtatacctcgtcaacaccgaggatggcgcaggtggcgaggatggtcttgttcggcaggccttcctcattgtcgcgggcgggcggggtggcgatggccagcgattcgacgccggcggcctgggccggcacagcgttcatgatgacggagctcgggtagacggccttgccgccgggcacatacaggccgacgcgctgaatcggaatccagcgttcggccacgcgggcgccttcggcgaggtcggtgtagaagtccttcggcacctggttggcggccacggcgcgggcgcggcgcaccgattcctcgatggcggcgcgcacttcggggtcgagcgtggtcagggcgtccttgatcgcctcgaccggcacgcgcaggttcttgggacgcacgtgatcgaacttctcctcgaagtcgcgcagggcagcggcgccgcgttctttgacatcgtccagaatcggacgcaccaaatcggtggcttcggaagtacccattgcagcacgcggcatcgcggcgagcagttcggcacgggacaggttctgaccacgcaggtcaatgattcgcatgatgttctcactcataacgccccatcgtagcaatgtgcgaggcctaagcggcgaggaacgcccatgttcacccgtatcgtgagattatcgtgcgtgatgtgggttcgtgatacaggttattgacgcacgccaaatgcccgagcggtctcatcgataatcggcatgtcatgcacggcgacgtgactcgcttcggaccatcgcgggccaatggctaattgctcaaccaaggcttgcactgcgtcgctgctgccttgtgcttccagctcaaccgagccatcgcggcaattacgcacccagccctgtacaccaagccgacgtgcctgagtcaccgtaaaataacggaatcccacgccttgcaccagtccggtgaccactatatgtttgcggaccaaattcgccgattgcctcatgatgctcagttcctaatccatcgttcgcagcattgggtagaggctcaggaatcgccggtatgcgtcggcatatgtgcgtgcggtgtcaggattcggctggtatacagtgcattcgcatactgattgcagcaggtctggtacattgaataccaacgaggccattgccactgctggcagaatatcggcattggcgaacacttcaataggatgctccaacacatcggccagaatctggcaccacgcattttctctggctccgccgccaatcagggaaatctcggtgggtttggcgtcaaaactttccataccttgacgaatggagaaggccacaccctcaagcgcggcacgcatcatgtctgccttggtggtgtctggatcgaggcctacataggccccgcgaatattcgggttcattacggggaaccgctcccctaccaaatagggcaggcacatcacaccgttggagccgggtttggatgtttcgataagacgatgcgcctctgcgtaatcgccatcagcgaatacgccggtaacccatttatgcacgtcaccggcgttgaggaatggcacggcattcacgaagccttcttccacgccaaatgccagattctcagcacctggcttgtcagtgaacggctcgggcgaaacggtggcgatccagcctgaggtgccgatattgatgttgtattgaccagggtggctgacaccgctggcaagtgtggtggcacccgcgtctccaatgcccgtgtataccgcagttccggcggagaaaccggtgcgttgtgcagcggattccgtcactatgctaatgcagtcctgcggattatgcagttgcggcaatatggtcatgtcgatccctgcggcctcgcacaattcgacatcccattggccattacggatattcatggcaccggctgtggaacaagccgccacatcgcccacgcattcgccggttaattgggcgatcaagtagtccttggaactgatcaatacatgacgaatgcgcgcgtacgtttccggctcgtgttcacgcagccacatcaacttgggcaacggcaagcagccttcgagccggttaccaacggtgttcaggaaacgttctgcaccgccctgatatgtctcggcgagttgcttggcctgttcctcggctcggccatccgaatacagaatggcattgcggacgggattgagctcgccgttcaaagcaataacatcctgcatctgaccgctgaaaatgatgccacgaatgcgagtcacattgaattctgactcggattgccgcgcctgctcaatcatgtgcctggaggccgagcagaaagcttgccaccattgatcggggctctgctcccgatagtcaccgttgataataaggtcaagttcgctactcgcactagctacaatgcaaccctgcccattaactaaggcacccttcaacgccgtggtccccgcatcaaatgcagccacatattccgtagtcatatcgttcatcgtagcgctgaaaaagaatcattctttgccagcaaaacgcggcttattgcatcgtcttgtttctagaatgggaaattgaacgaatactacgactagtgaggcattatggcaattcaatcgacaattatgctgaacaacggcactgtcatcccgcaggtgggcttgggcgtattccagacaccggatggcgatactacggtgaacgcggtgcagacggctctggagaatggctaccgacatatcgataccgcaatgatttaccgcaacgaagcctcagtaggtgaaggtattcgccgtgctggtgtgccgcgcagcgatttcttcttgaccaccaagctgtggaatgacgatattcgcgcacgccgcggcaaggatgcattccaagaaagcctcgaccgcttgggcgtggattatgtggatctgtatctgattcactggccggcagacggctggcagcaggcatgggacgacttgcaggagatttatgcctctggccgtgccaaggccattggcgtcagcaacttccaaaagcatcatatcgatgagctactgacccatagcgatgtggtgcctgctgtagaccaggttgagtcttccccacaattcaccaatcaagagcttattggccagctgcgtgccaagggcatcgcaaccgaggcgtggagtccgctcggcggcaccggcggtaacctactcagcaacccagtactggccgaaatcggtgccaagtacggcaagtctgctgcacaggtagtgattcgttggcacatccagcgcggtatcatcgtgctgcccaagtccactcatgccgagcgtatcaagcagaacttcgaggtcttcgacttcaacctatcggtcgatgatatgaccgccatctccgccatcaacaccggcaagcgcaacggtgctgatccggacaatttcaatttctagacctttatcggtccagatacgcaaagagggaactctccgtcattggagggttccctcttctatatgctttcgattcggccacaccctaggtgcgagagcctatgtcttgtcggtgtcttgtcttgttggtttcgggtatgcgaaagccccttggggcgtgtgctccgaggggcttcctgtacgtgtggtgcggcggcgtgctactctcccacaccctgtcgggtgc

SEQ ID NO: 902 - DNA, 31372 bp, Unknown
  gut microbiota DNA sequence
tcgaggcgctgcatgaacacgcaggtggagcgcaggagccgcaggctgttcgcccggctcgtcgacgacaagagcgcgtccgccacggccagggccgaatacgagaccttcaaggacatcccgccggccgcgcgcgtcgaccgcacgtgggacaacggcacggaggcgagcctgcacatgctggtggacgaggcgctgggcatgctcacgtacttcgccgacccgtacagttcctggcagcgtggcagcaacgagaacaggaacggcaggatccgccgctatctgcccaaaggaaccgggttcgaggacttggcccaggaggacctcgacgcgatcgtcggggagatcaacgacacccccatgaagctcctcggctacaaaacgcccaacgaggtatgggacgaggagatcgccaagctacaatcgaaggcagccagcccgaacacaagcgttgcgcttacaaattgaatccggcccgccgaggcattcgccgacgaactgctagaattgcaggaccaacagggggtgttgcacctctaaatagacatcgggcacacggtttgcgcggtggtgagcagtgagcggtgagtattgagcgacgtacggcgactcacgtgcgctcacacagtggtgagtaatccgccaaacaacaccacgagcagggcgatggtttcaatcacgaagtacagaatgaaactcgcccagcttttggtcagtacgttcagcggcgaggtcttccggataatcaccagcagaccaacaaacaccagggcgtatacggcgatgccgatcgccgcccccataatgcccagattcgcggcatttgccagaccggcctgcttgccgtagaccacgtacgtggaataccagaagttgagattgagcatgctgagtcccgcgatgaactgctcacaggccagcccgagcacgaacacgatcagccatggccaggacggcgagacgaccaccgccatcgccaatccgacgtacgtgatcaccacggccacccaaccgaccagtgcgataccttgcggagacactcccccgagcacggccacaatggagtcagtattattcaccgccagcgagcgaccgaaccagtatggcgcgatgatggcgcacagtacggcaagaataatcaacgcccaacgcaacggatgggagcgacggcgctcgatatcagccaaagacaaatcggtctcgggtatggaagcctcggggtgcctggaaacctcgacggtctctactttgccgcctacgatttccgtcgcctcgttaggttcttgctcgttggattcctgctccatgcaccgcctcgccgattacctgcttattgccatgtattgccatgccgattattgcgatgcctatcttagcgtgcgtgttgggcaagtacctgatgttccctgtggtttcgcgcactgattggatacagacaggctactgctgttgcccgtctgtatccggcgacttgtccgccgctgtatccgtctgttcctcaggcaacgtattggcagcctgttccttacgccgcctgccgtgcagcagggcctcgagcatgtcgacctgacgctccagttcgtcgatacgacgtacctgctgcgaaatcagcaagtcgcgtaggtcattgttctgctctttgcggtagacggggaagatgatggcgcgacgttcgggcgatacatggaaatcggattcgctgccggtaccagccggaagtgacgattccgccgagtcgcgccaagctctcgctgctcgcgcactctccggaatgtttggtgcgcccgcggctcccgagcggaaaagctccgaatctgaagccccccccccagcttattttccacgccggctttggcattgccggagttcaggatttcgtcttgcgattcacgccagcgggcaaggcaacgttcgatgcgcttgtacccgattagagccggatccaatccggcttcacggaacatgcgcacgggtgaggcaccttcgttgtagtggactacacagtaacgcttgaaatcatcggtataggtgatgcgcttcgccgtggcttccgccactgccgacaacgacttcagatacttgatctcctcggggctaaaagtccctccaccactggtcatcctcatcccttacactcgttggaaggctcattgcacaccccccttgattatggggtgaatgccatagttcgggatagtaatacttataattcggacatgcctaacccctagtagggtcgtttttatccccgtttaagtggagcctgagtagtggctggacggcaactgaacgataatcggcccacgaatggggtatacaggcccatccttcacctcccctacgattgtgttcgcttggcgattgttaccgagcctgcgtgaaacgtttgttgtggtgaaacacaagttattttcgatgcccggccccattacattcaaatcaaaatgccatacattgcccataagattcggagatggtccacaagtcatccgtctgagatgccgccaatatgacaaatggccgatctgaataatcagatcggccattgttatagctgctcagtcataagcagcagtcaagctcacgcgttgagagcgcgcttggtggaacgggacttgacgaacacggtcaccgcggcacccgcgatcagcagaccgatcacggagaacagcatggttccggcggcaccggtgagcggcagctgggtgatgttcttgacgttggtgacctggaaggtgcccttgttgtccttggacaggttccaggcatccttaccagcgaaggtggcagcagcatctgcggttgcaccggtagtgatcgtgaacttgccaacgaaggtgccgttgtagccagtcgggaccttcgtctcaatcacggtgtaggtggtgttgagcttaagaccgttcagagtgtacttaccctcagcgttggattgcagtgtgtccgtggcgccttcagggtaaatgccatcagcattggcggtcggcagagaatacgcaccgttagagccattgaacttaagcggagtcttcgctttgagctcgtcagcggacagaccgctaacatcgccttcgtacacttggaactcagcaccagtcagagcagcagcgttcttgtcgactttctgccaagtcacggcaccagccttggtggtttcttccttgctgctcttcaggtcgacaacgccggcagcggcgagaacgccagtggcgttgttcacggacggcgcggcgcccgtgatagcagtgccagcgagaatcggagcattgccattccacacgagcttgtgagtgtcattatcttcgacgaccagctttccactctggtcgacaatcaagtacagaccaccctcagcgaaggtgaaggtctgggtcttgccaccgttagaagccgtcggggtaatgtccgtgacagccagatccttaagcgcgttcacaaaagcggtggtctgcgcggcagtcagggtagtgttgcccagccaggcccactcgttcagggaatcacccttggtctggtcgttgtaaccagcagcagcgaaagcagcatccactgcctcaccggagaccaaaccctccagctcaacgccagtgttgccatcagacacatacttggcgagctcaacgtacttgaacatgcgcaggttagcctgcaggtcagcggtgtcaaccggcttggtgtagaactggtttgcatccgtggcgttgactgtgatagtcgtgctggagatgttggcctcagccgcgttggcggtggtggcgccgaaggccatgccaccgagcagggtggccgcagcagcgacacccgcgaaaagcttcctcaacttcatgagaaaccctctcttccttattgtgattgattttcttgcaatcgcggaggctgcagacccacagcagggcctccgtgatccgcaaatccttattgttttttcgggagggaagccttcattgcccccctcagtccgccttcggcggccagctcccctcagcgagaggagccaaaaccacctcaagtttcttgaaatcagaccagctgacgcttacgccaaaccgtgtagcccgcagcagccagcagggccagcaggcccaggccaccgccgaacaccatccagtcacgaccagtcgtgccaccggtcagcggcagactggagatagccacatacttgttcgtgaactgtgccgactccgtattcgttcggtcggaatcgttctcgccgtactcgtaagagacaacggcatccgtcctggagaccgtgaccttgacggtcaccttatcgttgtcatacttccaaccggcagcaggcttttcggtgtcctccgaagcctcgaacgtgtagaccaaattgtcagcaccggtcggaaccctgaacttcaggtccccattgccgaagccaaccgtcgcgctcgcgccgctagcagtcaattcgtccttggacacagtcgtagtcagtccattgttggccaagccggtaacgtcagcgcacttaccagcattcgcatccgtgctatccacacacttcaggttgaagccgaagtccgaattagcagcatgtccctgcacaaccttcgtcaccttgacatccgaagcgggcaaggtcacgtaagaaggcgtgttggttaccgtgaaggcaccggattgtgcggtcaaaccttgtagcttgaggtcagtcttatcaaccttggagtcatagccttcaaccttgacctcggaaaccgagtatgtgtgcccctcagggccggcaggcaccgtgaactcgtgagtccagttgccggcggcattcagagttgctgaaccgttggcataatcctcgccgtcctgcttgagctggacctgcacggaatcattcgcgtgattctcgttgtcgtcggaccaagtcttcgtcaccgtaatcttggagaccggaagggtgatggtcggcttctgcgggtaggcggcggtctgcggatcgctcgtcgtcgtgccgccctgcgaggaggtcaccacggtcttgtagtcgacagtggcgctggagttgtcgttcgtgtagaagttgttgtcgccggaggcattggcatcgtccttgtggttcttaacagcctcgtcgaacgcagcctgcgtcggcttgacattgaagctcaccgtgtaggtgacgccgtcctcaagcgtgtcgtcgttggacgtgaccggccaagacacggtgccatcagccgcaaccgtcgcctccggggcgtcagcccacgccgtggtctggcctttccgggtcttcgtgtacgtgaagcccgcgggctctccattctcggaggcgctgtcggagctcacgacccagctggacagcctgtcgtgaatcgtcacgtcggcatactcagccgtcttggtgatctcctgataaatggactcgaagatgttgttcagctggccggcatccgtggcggccttgtagtagctgctggtctcggcgcggtcaccgaggttggcgttccaagactttccccacaaatgctcactgctcgttgcagtggcatccgggtagttgctggagatgccgtgcatgtacttgttcaggttgctcgaggtgtcgccggggttggcaccgctgacgacgccgatcgagtagatggtcgtcccggcgtccttcaggctcttcgccttgttcaccgcggtggcggcgacggtggggtcaaacccgctgccgtggttcggctcgccgtcggtgaagaagatgacgaccttcttcgcgttggcgcgaggctgatacgttagcgccgcctgggcgcggttgaaggcgtagtcggcggaggtcgcgccggacgcgctcaggccgttaaccgtgctcgtcagtccggagacgtcgtacgtcaggttgctgacgatctgcgtgtagttgtaggaggaccagccttcgcggtaaaagtcattgccgacgctggtcttctcggtgccggcgaacttcaccagggcgatgcggttccgctggctctggtcggtaatcttcgcgttctctgcagccgtcgcattgatgaatttattgaccgcggtcttgagcgagtcaatcttcgtaggctggttccaaccgctagcgatcttttcggccatcgaaccggacacatccaacaccagcacgatgtcgagtggctggttcgtcacgatctcgcccgtacccgcgctcttcgcaccggtgacgttcaacgccaccgtgtacgtgccgtcttcattggcggtaacggtcttctcgcgggccggagcagacaacgtcggatcatccggcacgccgtttgttccctcggtggaaagaggagcaggcgcgctggcggccgccttctcatcggtggtctgcgattgtgtcgtggaggcattcccatcgtccgccatggcggtcgcgctcacaccggcgacgccaccgagcatcgccacggcggcaacgatcgccactaaccgtttgcctttcctgcccgccgcggcccctaccgctgcgaaccattctgcaattctcttcataaccttgcctgtctcttacgatcacgtacgccaaaacccggcgttacgcttataaggcgttacggtattaagcaaaaagcacgaatgcgtacacccgggtagagggaattttttacccgacactgaaaagaaccttggaatttttgaaaagtggcaccctcgtcatccaccctgcgataacgcacttttcttctcgacggggcgtgccggtcccaccatctgggaactgaggcggatttgccgccgctgcgcgggggccggagttactgacgaccgtcagtatgccactgctccgcatgtgtgcagtatcacataccgctacgcatacacggagacatactacatgcaatttctgtgaacgcaaacatacgactcaccaaggccgtgttctgttgcgggcggtggtgttacgggcaatgttgtgggtagtaccctagccacaaacctatatagtggagcggatgacgggaatcgaacccgcgtaatcagtttggaagactgaggctctaccattgagctacatccgcgttaagcgtcgcttttggcgacttgagttattatacatatttcttcggggatggcaaacgcgtgtggctgcagcaggaccagccaatctagttgatggattgcggctttgccgaggactcccctcagtcacctacggcgacagctcccctcaaagaggggagctagaaaccgtcgaaatcacaaatggatgagctgggactcgtatggttggaggtcgacgtccatcgcgttcagaatgccgttgcaggcgttgaggtgggcgtgctgcgggtcgggcgagaagttgaacaggccgaccagcgtcttgccttcgtgctgacgaatcacagcgagcaccgaatcattgaacgtatcccacgtggacacccaagcgtcaggcgcgaagcagggatcgttgcgcatcgcgcgcaaatcctccatgcccttccacagctggttctgcaacgtaccggacttcttgcgcagagcggccttggtccagtcgaacttactacggtgcagattgcggctgtcttccacgcgatccgggtcttccttgtaatcccagccgttgagctgggcgatttcgtcgccgcagttgagcatcgggaaaccgcgcaggaagctcatggcgtggtgcatcatgaggtcgcgatccaccgaggtctctagcagtggcttgtcgtgcgtgatgatggccttttcgatgccgcacaggctggcggtggtgccgcaactgcgggcgtcgcgcgtggcttcgtcgtagttgtagagttcgcccatcgaccagctgccgggggttgcgccctcgtagaagtggtacaggaattccttgtgcttgagcgggtcgatgtcgaggtaacgctccacgtcttcgtccaagccccagccgatgtcgtcatggcagcgcaaataattcacgaaccagcagttttcgggcagcgagttgagcttgtcgatctggttcttgagcagacgcacgtcgcggctggcgagcgcgctccacaggttgaccatgatggagacgttgtacagcatgtggcactcgggggcctcgggcgtaccgaagtaggcggcgagctccttgggggccatgaccacctcgcccttaagcaccacggccgggcagacgcattccaaaatgatgcgcagcatgcgcacgatggtgtggacctgcggcaggttgcggcaattggtgccaagctgcttccagatgtacggcacggcgtcgatgcggaacacctcgacaccgaggttggccaggcgcatcacgctgcccatcatggctacgagcaccttcgggttgcggtagttgaggtcccactggaacgggtagaactgggtcatcacccacttgttcatcttctcattccaagtgaagttgccgggcgcggtgttcgggaagacctgcggcacatcccggtcgtagcggtcggggatggtgcggtccgggtagcagaagtaatagtcctgatactcgggatcgccggcttcggctgccttggcccagcggtgggtggaggcggtgtggttcatcacgaagtcgatgcacagactgatgccggcgcggcgcagcttcttggccagcgcggcgaggtcttcgttggtgccgagcttcgggtccacggtgtcgaagtcctggaccgcatagccaccgtcgttgttcgggtgcggcatgtcaagcagcggcatcaagtgcaggtaggtgagcttctgctccttcaagtacggaatcttgtcggcaagtttcttgaggtcgccggcgaacaggtcggtgtacatggtcatgccgaacatatcgccgcgcttgtaccagcccgggtcctgctcgcgggttttgtcgagacgcttcaaatcggcgggacggtcagcgtaggctgcggccatgcttgcgacgagtgcgtcgaaggcgtcgtgatcgttatataggctcatgaagagctgttcgagttcgtcttgatgagcagcaaggcgagcgttgaacacggcgctcgaagcgggacgcttggcggttgcggacttggtcgccgctgccttggaggtacgggccgaacggacggcagtcgtcgccttagtcgctgtggttctggccgtacgagacgtcgtgcgcttggttgcggttgtcttggttgccgtggaagtcgtagcggttttggccgctcgggttgatgctgtcttggcagccttcttcgccacctcggtcttctcgaccgattccactgcctgtgccgactggttgctttgagccaccggaaactcctttgtctctatccgttgcccgcgtcaatcgtttgacgctttgtattacaaaacatcaaaccggttcgacaatcgcaacccaagactcgccgagccaccggcgctattccacagaaatcgtcaccaccgcggaggcaatcggaccatcgtggctcagggaaatatggatatgcggcatcgaccccgcaccgaaagccgagcgctgcgccgaacgcgcattccgccgctcctgcatcactgcataaggcccgttatcggaagcaggggaataagcagaggaatagcgagcgcctgcagccgaattcgcgtaatcagtttggaagactgacgccgtccccttacccagagacacatgcggcacaccacgggaatcatccaagatctcgatttcaggccacgggaaattatcaagcgtgaacggatagggggcatcgccaagataatcgcaccacgctttgaggaacgcctccttgcctgcccacttggcggacagatgcacggcctcgtcatcgttcttcagccgtgcacgatccgccgcctgacgtacctcacgaacggaaaacagcgagcgcatgcgcgagccgggttcagacagctgctcggcgaatgcggcgacgtcaaccacgtcatgacctaaaccaaatgtgcccatagcacctattatcagccattcaacacgttgacaacacatccagaataacgaggttcacacggaacgcggcatccacaaacggaaaccctcggccgctccgcaagccgaatcctgaaagtcaacaccaagtcaaactgttgactaacggtggacacggcgtaaaatgtcgatattccgcccgacactccaatacgtaaatcgattgacgtcaaacgtttgactttttaacgcggttaacacaatgatccaatgaaggataacttcacaacaaccaaccacaaccagccaatgaagccagcaaggaggtagaaccgtggtcacgatgaagcaaatcgccaaccgcgccggcgtttccatctccaccgtctctctggtgctcaacaaccgcgatatcggccgcgtcagccccgatgtcgccgagcgagtccgcgacatcgccgccgaactcggttacctgaccaaccgtctggccagcgggctgcgcaccagcagtacccgcaccatcggattcctcagcgacgaagtggccaccacgccgtttgccggccgcatgattgagggcgcgcaagacgccgcccgcatgcccgcgttcttcgacaagcacccggatgtcgacggcttcttctgcttcaacgacacccgcgcttgggccatctacaccgaggccacccgtcgcgggctgattatcggcaaagatatcgcggtggttggcgtcgacaaccaccaggttgtggccgaagcgctggatccgccgctttccactgtggaactgccgcattacgagatgggctactgggcagtcggtaagctggtctcgctcatcgaaggcgaggcacccgatccctttcctcgtgccggatacccggtcgagaaggttcagccgccgccactgagcgagcagtcaccccagcttgaatgccagctgcgcatcaagcaatcctgggtccggccccgctcccagcgatagcctgcccaaaaatcacgcatctatcctacttgacccggtttcgactgtatatcgaaggcgctattgctgttttcgtgggtggtggttcgttgttgaaccgttgcgggagtaagagacgacgaaccgacatccacgaaaacagcaatagcgtcaaaaaacaatagggtcgggaagaacaccgtaaatgacgttcttcccgaccctaatcgcgagacactcccctcagccggcattcaccgaccggggggagccagagaatatcaggcctcgtagtagccgtcggcaccgaggcgggcgtccgggttgaggagcatcgccttttcgacctcgtggtggtcgtagccacggtgatcctcgcggaagcgacggttgtcgatcggctcgtagagcgcggcgcgacccatcatgccttcctcaaggtgacgctggccggcagccaggcgggcgttggcacgctcacgccaagcttccagtgcggcctcaccatcggccttggccacggccgcctcgaaggcacccggatggaccagagccacgaagccggaaacatgtccgaagccgagcgaggtggccagaccggccttgaccgggcgaccagcggtctcgcgaccgaactcgtcctcaccaccgccgatgcgcaggggcttcctaacccagaccatgtggtcgtcgcgctggagcttcggatccacgcagtcgagcgccgcgttcgccggaatcacgccggacttgaacagctgcgtcagaccgttgacctggaagatgcaggcaccacccttggcgtggccggtaagcgtcttctgcgagatcacgaacagcgggttgccgtcggtgcggccgatggcgtgggccagcgtgttgtgcagctcggattcgttcgggtcgttggcgttggtggacgtgtcgtgcttggagaccacggcgatgtcgtcggctgagacgccgagcttagccaggtcgtgcacgagcttggagtccttgccgccgaggccggcagccagggcaccgaggcccggagccgggatcgaggtgtgagcgccatccgcgtaggagtggatgaagccgaccacggccgccaccggcaggccgagcttttcggcgatgtcaccgcgggtcacgaggatcgtgccgccgccctgggattccaggaagccgccacggcgacgatcgttcgcgcggctgaagaagcgcgcgtcgatgcccttgccgtacatttcctccgagttggcggtggcgttcatgttgccgaagccgatcacggattccacgccgatgtcgtcgatcgcaccggtgaccacgaagtcggccttgccgagggcgatcttgtcgacgccttcttcaagggagacggccgcggtggcgcaggcggagaccggctgaatcatgttgccgtagccgccgatgtaggactgcatcacgtgagccgcgaccacgttcggcagggcttcctgcaggatgtcggtcgggatctcgtggttgaggaagcggtcgaggtacagcttgcgcatcgacatcatgccaccgaagccggtgccctgggtcgaagccaccagcgaggggtggatggactcgaggatttcggccggggtgaagccggcgcccaggtaggcgtccacagtggtgacgatgttccacagggcgatcttgtcgacgtcgccgaccatcgaggcgggaatgccccatcgggtcgggtcgaagcccttcgggaactggccgccgactgtgcgggtcatggtggcgcggcgcggcacgcggatcatcgagccggcgtggcgggtcacgttccattcgccggattcctcatccggggcgatggtggtgtgagcctcgtccaacttgacgtattcggtggcgacttcgcgggtgggcacagagaaggtgacgtcgtggtcgaggaagacctcggcttcctcttcgtcagcaccgtccttgtagtcgttgcccatgccttcctcgaacgggcggatgccggagcgggccacgacctcgtcgtggtagcgctcggcgatgtcctcttcgggcacgaggttgccgtcggtgtcgtaccagccgggcttcgggctgtcggcccaagtcagcagacccatgttccacgcaagttcgagcactgctccggcgctcaggtcgacggtgccgtccgagtggatgccgagctcggcctgggcgcgcgtacgaccggagccccacgggcccagctcaccgacggaaacgatgacgatttcgtcttccggcttggcggtgacgttggtccagtcgttgaggtcgaccgaagcctgcttggtgacgatcggggtgggcagcgccttgatttgctgcccacgcgaggagtcggacagtccagtggactttccggcgacggagccatccgtttcctgagacgaggccgcagcagcttccttctcggcgtcggccatggcctccgcacgcagggccttgatgtcgatgggctcggaaccgaggccaccggtcaggtccacatcgagcggggccttgagggcctgctcgcgcgattcggcagtgcacaggtcgagcagcttggccgcaatctgtgcggtggagtaggtgcggatgccgtgacgctcaacgacggcgaccagcgggtcgttaccgcccatcaggccggtgccacgcacccagccgatcttcgggtgagcgaaggtgacgcggctcgaccacaccttttcagcgcgggcacggttgacgatggcgtcaaaggcgctcttgacttcgccgtaggcaccgtcgccgccgaatacgccgcggttcggggaaccgggcagcaccacgtggagcttgtgctgcacgttggtgtcggcaccgatgtggctgaagccggcgatggcgcgttccacgccccacagcatcagtcgggcctgcgattcgaacaggtcgccggagtcggcgagcgtgccatggaccggcggagcggcgaacgggaagaacagggtcggctcccacgcaggcttcagaatcgtggtggtagcaccggaggtcttcttctgctcgtggcccacccagtcgaccagtgcgtcgacgtcgcggtagctggagaggttggccggaaccagccacagcttggcgttgccggtagcgtgctcgcggtaggcctgcttagcccaagccttaatggacggcttgaagctgtgcgaggtggccaccacagtggcaccgcctgcgagcaggccttcgaccacctgagcggcaatcgagttcgggctcacgccggtgacgatggcgatatcattcgcgtaacgggaggcgttcttgttggacgcaacctgttcgagggcctcggagccggccttctggaaggcggccttgagttcttcactctccgactcgttggcgaaccactgggcttcggcggcgatggtcttgccaaggccgatgaagctgccgttcagggcggcgggatcgttgtcgtagtaggcgcgggcgaggtcttcgcgggcggaagcccaccgatcatcgaagaggatggccttgttggcgtcgaagcgcggagcgacctgcttgggccagtcggagccaagttcggcttcaaccgcggccacgacggcggcgttctcgtcctcggattcttccggagccggagcggccacgccgagctcgttcagcacgaagcgggcggtggcggcgagcacgccgttggaaccggtgaccttctcggcgaaggcgtcgagcgcggcggaatcgaccacagcgccaccagcggcaccaccggcggacggcagggccacggcaacacccttgagctgggcgacgacctcaacggccgcatcaatcagcttgtcggcttccggcttgttctgcacggcggcggtgggcagcttagccaggtcgccgccacgggagctggcaccctcgcgagtgtcgagcagcagtgtggcgagcacgctggccacccaaccttcaccgagctgccatacgttggtcacgcggtcgcggatgtactgctgcttgacgccggcggcaccgaacagcgagcgcaggcggtcgcgcagcgcctcggagagcacggcaccgaacggcttgtagttcggggcggccttgttgacgatttgggcgagcttgtcgagcgtcgcttcagcagcaccgtccacgctggcgactcccagctcggagctgatgtccatgagcagctggttgcggcgagaagagacaccgttggtcagggtgtcggtggtgtcgttgctgccgatctggtcgagacgcaccttggcggagtaggccatgagcacgccgatggcatcggaagccttgaagggcaggtcggcgacggcggcaccggacggtgcgccagccgcggcctgccctgattgcaggccgcgcgaggagtcggacagtccagtggactgtccggcgacggagccatccgttgtctgagcagcctcagtcacggcatttgccggagcggcaccggaaccgagcttggcaacggcggaaccaccggcaggagcggtttcgaccggggccgaggccgcagcctcttccggctcatcgtcgggaaccagcgaatcggtgtcggtcatgtagacgcggccttcatcgcggccgacgttgtagacgaccgtatcgttgccggcgaactcgggcagatgcagggtcttggcaccgaggttggccagggtcggggcgttgccgaggccgacttcgacgtattcttccacgccgaggccgccctgttcgcgctgaccgaagagcagcgcctgggtttcaatccaacgcaccggggaggcgaactgccaggagagcagttcggtcaagagcagacggccgagcttctggtcgtcatcggcgtaggaatcccacacggccgggtcgtcgagcgcggccttgatacgctcggacggcacgacttcgaggatcttggcggcgaattccttggtcatctcgaacggggtggccaccaggttcgggatgtagcggtccaccagacggccacggtagtcgatgtaagcgggaagcagcgcgtcgagcttgtcgcggaattccggcacgcccttgcgcagcagtgtggagtggaacggcacatcgatgccgggcaccagcatgaacgcgggcttgccaccgaatgcggccacgcggcgggcggaatcggccttcagggccttgagtccggcgatcgtaccggcgatggcgtactgctggccggcgaggttgtagttcacgatctccaggaattcgccggacgccttggccacggattccacgtattccttgacgtgcgcgtcgtccacaccgaactggttcgggcgcagggcacccatgcggtagttggagcgaccctgtgcgtcacgctcgatgaggtggtgcatggtggaaccacggtggaacacgagctccagcacggtttccagcggaatcacgtcggcgaacgcggacaacgcgttgtattcgccgagcgagtggccagcgaagtatgcaggccagatatcggcgccggcttcgcgcagacgggcggtctgggcaaaagcaaccgtcgcgagcgccacctgcgtgaactgcgtcaggttgagcaggccttcggggtgacggtaggtcacgccgttggcggtgagctccttcgggttatcgcgcacgaggcccaggatcgagaagccgagcttggagcgggtgagcttgtcggcgcgctcccacacgtcgcgggcggcggcggacttggcacgctcgtccagaaccatgccctgcttctggatgccctggccggggtagacgaaggcggcgcgcggcgcgcggaccagtgcggtgccgcgggagacgagctggccgtcgatacggcaggtgacttcgagggtcatgccgccgtggcgcaccttgccgacgcgctcgacggagatttcgacggtgtcgtcaagctgaaccatgccgtacatgttgtaggtccagccggcaatctcgtagtgggcacccttctcgtccagcgcctgcacggcgtgctgggcggtggcggacagccacatgccgtgcacaagcggagcggccaaaccggagatgcgagcgccacgagtggaggtgtggatcgggttgaagtcgccggaagtgcgggcgaaggcggtcatgtcgtgtggggcgacgaccttcacgcggcgcagcagacggcgcggcgtgggcgcgatctcctcgtgctcggcgtcgccgaactcgggggcgtctgccggcaaagcatcggagtagacgcggccgcggatcgcgaaacgctcggtttcgcgggcaagcagcatgccgtcggcagcggtgtgggtcacgtggatggtgaccacgcggccggaggcggactcgaagtaatcctcagcccaagacttcagggtgatggtttcaccggtgtgcttaagcaggtcctcctcgttcacctcaagttcgatgaggtggtcgaggtggacggcgttgagcaggccttcaatcaccgggtagcccttgacatacacggagccgagcgccgtgtaaatcgccggccaggccgggccgaccagcgcatcgggagcgatgcggctgggctgcagggtcgtcggcagagcggcgccggtggccgcttcgtggtcgaagccgaggttggcggagagggtgtaggcggcggtggcggtagcaaacggacgctcgtcagaggtcttgccgtcaagctgcggcatctcggtgagcttgtcgccggtgatggcggtgttgccgatgcctgcggtggcggcgagcatcgcgtagacgtccggaatcaggcgttcgcggtccacgaccggcacacggccgggctcggcgccttccacgatgagcgggatgacgatatcgcgcacggcgtgcttggaggtgccgccgtccgggtcgttgtcccagtaggtgtcgaggtggatgtccagatcgtacttgccggccgcggcgtcaaacgcgcggatctcgtagtactggtcgcccagggcggtgccgtaggcggggttgtcggtgatgtggccgacccaggagatgttcggggacttgcggatgaagtcctcggcgctggtggcctcgccaagtgcggcgaaatcgtcgttctcagcggcatcggcggcctgctgttcgtcctgcacgcgcttgatggcggcggtttcgaagcggccgaggatgtcggcgatcggctcgtcgatggtggtgatgccggccacggagatcgggccggggatggcacgcacggaatcggcggagtagcgctggtcttcggactgccagagctggtcctgaccccaccaacgcagcaggtcgttgtcgatgacgggcacgaacggcatgggcttggggtattcgcgcacgagcaccgggaaccaagccacgtcggccggaaccaccttgagttcggcggtctgcgggtaggccagtgcgagcttttcgagtgcgggggccggatcggagagaatgtcgtcgtgggtcagcaggtcagcggcagctgcctcttcagcagaaacgccatcagcgacgaatagcttggaggtgaattcgccggagtccgtgtcgttcacacgggcttcgatgcgctgcagcaggtgctggaagcggtcggcgtaagtcgggtcggcccacgggaaggcgagttcggcgaagcgctgcgcccactcaaggtaggtcatggaggccaggtctccgaagtaaggcttggcggtcttgttcagggcttcgatgatttccttgcggcgggagtcgagctcttcggggtgcttcatgacgcgcacgagcagacggccgcattcggcggagtcgttctcgagctcgtaaatgtcggcgtgcaggtggctcaggccggaggacatgccgccgacggacttgccggatggcacccagtgggcggcctgcggggcgaacacgtcgtcggacttggcgtcggccggaatgccgggcgtcttgacaagcagctgcttgacttcggggctggtgtgagcctccttggcggtcatcgcggcggtgccgataagcacaccgtcgaccggcatgtcgggcaggccgtaggcgtgggcccactggccggaaatgtagtcggcagcgcgttcaggggtgccgatgccgccgccggcgaccagcacgaggttgtcgcaggcgcgcacttcggcgtaggtggcggcaagcaggtcatccagcgcttcccagctgtggtggccgccggcttcaccgccctcaacctgaatcatgatggtggtgggggccacggccttggcgatacgcacaacctggcgaatctggtcaacggtgccgggcttgaagctcacgtacggcaggccgtcagcctgcaggttcttgatgagctccacggcttcgtccagctcagggatgccggcggagacgaccacgccgtcgatcggcgcgccggatgcgcgcttcttgggcacgatgcgggaggagccgaactgcaggttccacaggtaacggtccatgaacatcgcgttgaattcgaccgtgcggccttcctccagctcgtcttcgagggcagcgatgtggcggtcgaatacttcggcggtcacctggccgccgccggcgagctcggcccagtagccggcgttggccgctgcagccacgatttccggttccacggtggtgggggtcatgccgggcagcagcaccggcggcttgccggtgagcttggagaacttggtgaccagcttggcgccggccggggtgttgatgacgcgcggggcgaacgccttccagttctgggtgcgctcaggctcgctttccagcgtggagagcgtggagcgctcggccagcgtggtggcttcgaccacgccgatgccggtgccctgcaccacgttgccgatcagcttgccgagcgtgttgccggggccgaggtccacgatccacagcttggacgggtcggcgtcgtcgaacagcgccttgacgcgggcgttccagtccacgtggttcaggagcacttcctcggcgagtgcacgggtgcgcttctggtcgaagccgcaggcgccggcccaggccacggtctgttcgacggcgtcggccatgagcggcgagtggaagggcagggtgacctcaaggtattcgagggtcgggttgaacacggtgccgccgtggagcttctgctcgcgcagcttggcctgatgctggtgttcgcgctcggcttcgagggcgaaagcggccaggtcttccgggtagccggacagcacgtggtggttgtcggagttggtgacggcgatggagatcgggccgcgagcgttgttgacgcgggccaccagcgcctcgacctgggcgcgggtggcgcccttgacggagagcatcgggctggcttcgccgtacttggggttcaggcccagttcgcgcacgcggcgggttccggcggcgccaatcagggcggccacggccagaatctcgtcaagcgtggtgccggcggcctcgatggagccggcggcctcgatggcgcgggtcatgtgcacggcgagcacgccctgggagtggccgagcacggcgagcggcttggcctgggccacgctgtagccgaggtgttcgaggtcgagcagggcgccgagctgggtcagcgccacgccttccacggacgcggtggcgtcggctgcggcgccgaggcgtgccgggttcggggcgaagccgaacaggtcgaccggacggccggtggtggccagcaggtcggcggcgaccggggtgagcagtcggccggctgcggcgacgtggccgcgcagggcctcgtcaaggctgggatcggtggtctggtctgccagggctaccggccacggggtggactggccggcgaaggcgagcgcatggggctcggtggctaggcgattgaggaagaaggtggtcattgctttccttacttgtgtttggttgacgtcttcaaaaatcagaggggctggttgccgtggtgtttggtggtgcgcttgacgcgccgcttggtggcgagcgtggccagcgattcgacaatcacctcacgggtctgttcggggtcgatcatgccgtcgatctgcccgatttccagtgacaggttcgcgttgacggtgctggtctcgtactccttgatgtacttggcccgcagcgcatcgacgtcctgtccggaggccttggccttggccaggtcgtggcggtggatgatgttcaccgcgccggccgcgccgagcaccgcgatctgggaggagggccacgcgaagttcaggtccgcgccgatggccttggatcccatcacgatgtacgcgccgccgaacgccttgcgcaacaccacggtcaccatcggtacctgtgcgttggcgtaggcgtagatcaccttggcgccgcggcggatgatgccggcgtgttcctggtcggagccgggcttgtagccgggcacatccacgagggtgaccacgggcaggttgaacgcgtcgcacaggcgtacgaatcgggcgactttctcggacgagtcgacgtccaggatgccggcgagcacgttcggctggttcgccacgatgccaaccggcttgccgtcgatgcaggcgaagccgacgagcgcggaggcgccgaacagttcctgcacctgcacgaattcgccgtaatcgacgatgcaacgaatcacttcgagcatgtcgtagggctgacgttcgttggtgggcacgatggtggcaagtcgcttggcggtctcgcgttcggcgcgggtgacggcgtaggcgtagaccggcggcttgctttcgctgttggacggcaggtaggcgagcacggtgcgcgcatagtcgatggcgtcggattcgtcctcgccgaggtagtgggccacgccggacacccggttgtgcacttcgccgccgccgaggtcggccatggagatggtctcgccggtcgaggccttgaccacgtccggtccggtgacgaacatgttcgagttctcacgggtcatgatgatgaggtccgtcagggccgggcagtagacggcaccgccggcgcaggggccgagaatcaggctcagctggggcacgaagccgctggcctcgcaagtcttgcggaagatgcgaccgtactgggtcagggcggccacgccctcctggatgcgggcgccgccggagtccacgatggccacgatcggcactttgaggtcgatggccatgtccatcagtcggcagatcttctcgccttcggcggtgccgagggtgccgcccttgacggagaagtcctgggcgtagacggccactttgcggccgtagacctggccgaagccggtgatgacggccgcaccggcgttgccgccggcgatattgccgccctggaagcggccgatctcctcgaacgtgccggtgtcgaagagcaggtcgaggcgttcgcgcgcggttttcttgcctttggcgtgctgcttgtcgcgggcgcgctcttcggcggcgcgggccagttcggcggccttgaccacagcggtgcgcagcggctggtgggccgaaggctgggcggcgttggcggccgaggccgcagccgcggccttcacggcctgcgaatccatgatgtcagtcattgccaccctccttcttggcgtcggtggccttatcggctccttctgacgagggagctgtcgacgcagccgcctgagggagagatcccggcgcagccgcagcagccttggccttgccggcgttcacgtccagcgtgaccagcgtgtcgccggcctccacgccgtcggccgggccaacgaaaatcttcttcacttcgccggcggccggcgcgtacacgtagttctccatcttcatggattcgagcaccaccagaaggtcgcccttggccacctgctggccttcggacacgttgatgcgcgtgaccacggcctgcatcggggaggcgatgacgccggatttggcgccgtcgttggccgcggcggcactggaggccacgttgtgcagtcccgcaccgcgcaacggctgggtgggtcgcttggcaccacgggcgcgggccgagccggtgatgttctccacgatgtcgagtggcacggtgagcttgacgcggcggttgttcatctcgatgacgaacgtctccgacttggacttgtcgggcgcggccggggcagcggcacccggggcggcggccaaggaggccggctggccggaggcggcggaagccggtgtacggttcaggtacgtgcgctccagccacttggtggacacggcgaacgggtggccatgctcggcggtgaagtcgtcgttgcggaagatttccttgaacagcggaatcggcgtgggcacgccttcgatcacaagctcatcgagcacgcggcgcacacgggccacggcgtcgagacggttctgggcggtgacgatgaccttgcccatcatcgaatcgaacttcggggagatggtgtcgccctgttccacaccggtatcgatgcgcacgccggggccggccggccactggatcttctccaaggtgccggagccgggggtcaggttggtggccgggtcttcgctggtgatgcgcagttcgaagctgtggccgcgcagttcgggggcgcgggtgagctcgccaccggcggcgatattgagctgttcgcgcaccaggtcgaggccgctgacctcttcggagacggtgtgctccacctgcaagcgcgggttgacttccaggaagtacaccttgccgttcggggtcaccatgaattcgcaggtgcccaggcccacgtagccgaccgtggtgaacaggcggcgggagtattcctcgagcgtgctgatgatttcctcggacaggaagggcgcgggtgcctcttccacgagtttctggttgcggcgctgcagcgagcagtcacgggtggagtacacggtgaagttgccgtgcgagtcgcgcccggactgggtctcgacgtggcgtgccttgtccacgaacttctcgatgaagtattccttcagatcgccgccttgcagcgcgtcgtggttcatgtagaagcggcgcagctcctcgtcgtcatgcaccacggtgatgccgtggccgccaccgccatcagtgcgcttcatcatgatcgggtagccgtgggtgtgtgcgaagtcgagcagcgtgcgcacgtcggtcaccggttcggacaggccgggcactggcggcactttggcgcgtagggccacgcggcgggcggtaatcttgtcgcccaaatccaccagcgcggtgtggtgcgggcccacccagatggcaccggcatcctcgaccttctgcgcgaagctcggcacttcggaaaggaatccgtagccggggtgcacggcattcgcaccggtcttgtgcaggatgtcaatcagcagatcttcgttgaggtacgtgtccttgtaggtgtcgccggagagcaggtatgcctcgtcggccatgtccacatagcggctattgcggtcctgttcggagtagacggccacggtggagatacccatctccttggccgtgcgcaccacgcgaagcgcaatctcgcctcggttcgcaatcagcagttttttgacgatagaagccatagtgtcaaattgtgctctctatatagaggagagggcaagccgcgttcacacaaaagctttcacgcccttttgtaggctacgaacaaacgcgcgcgtaggttccggcaacgcaaccgttggcgccggctatcaaaaacgttgcaaatccgccgattgcacatccttgcgcgccgactcaagaaattgacgttacggttgtgttcgtcaacttatgacaaatcgaaatcgacaattttgtaaattggtacgaaaccgcacgaaatcgaacacctctacgatggcaaccgtaagttcgggggaaggctcatctgcgggcgaacggaaggtgaccggaccggcatcggtccatcgccgcacgattcgcccgcacagggtcggattcatttgggaccgtccaccatatggacggttcggactgtcggggataccgcacgacccgccggaacctcccctcatccatcgcataccgcccgccgttcacggcgatatcacgcaacataggggtcattgatatgcagacttcacacaccaccgcatccgctgcggccaccacatcgctcgcccgtcgtatcgtcgccgcatcctggaagccggtgctgttcgccgtgctgatgtggctgtccgcggccgccggcgagattccgattccgggcacgccggtgccgatcacgctgcaaacgttcgtggtgatgctcgccggtcttatgctgccgtggcgtcaggccggtgccgccgtcgccacctatctggcggccggtgcggtcggcctgccggtgtttgccggcggcacctccacgctggccctggtcggcccgagcgccggcttcctcttcggcttcctgccgggtgtggtggtcatcgccctgctgcgcggcaagtccgacacttcgtccttcgcggccgccgcgcgcaccgcgggccgctacctgctggccgcgctggtcggcggcgtcgtggtggtgtacgccttcggcttcgtcatccagtccgcgctgaccggtgcgccgctcgccgccgtggccctggcctccatgggcttcgtggttggcgacgccatcaaggccgtggtggcctctctggccgccgccggcctgtccaagctcggtcgctgacctgagctactagctagctactggccggctattacagcactcccacatcggcggtgcggaccgtatggtccgtgccgtcttgtgttctcaggatcagtgaggcgtcttcgttgaggccgatggcttcgccggtcagcgtggtgccgtccgtgaagtgcgcctcgacctgacggccgcgcgcccagcacaccgccttcacctcctcgcgcaacgactcggcctggcccttcgggtcggcgatgaacttcaccaaccgctcgcggaagccctcgacctgacgttcggccaccgcatcgcgcatctcgccgaacgacggcagcccggagacatgcagctgcagcgaggtcgattgcggcgtgggcagccgacaggcgcccaaggccaggttcaggccgacgccgaacacgatgacgacgtcgtcatcgacatcagcatcagtaccggtaccggacgacggcggaatcaccagttccgagagcagcccgcccagcttgagcccgtggcagaacacgtcgttcggccatttgagttccagcgagcagtccggctggttcggcgcggcaccgtattcctcgatcatgccgttcagggcgtccagcgtgaccagtccggcgatcatctgcagccagccattgacggattcgtcggtggcgatcgcgcgcggaatgcgcacggcataggacatcgtcgagcaacggccgggctgactgacccacttgtgaccattgcgcccacggccggcggtctgccggtcggcggccaccacggccaccgccagttcgccatcctggtggtcgggcaacgtcaacgacccgtcgccaatcatctgtacggccagcgcgttggtcgaatcggtttcgtccacggcgaccacatgatctgcgacggctgtagttctgggtagctgcggcgttgcagctttcaacgcaatcatcatgggcactacgttacctcgattttggcgcgatatgcccgcgttattccatggaaaagcgcgcaaaatcaactattttcacccacatagcccatgttaacgttcacaacttcggaaattccgcattcgccgaccccacgcatgcacccggccgtcatattggcttgcgaacaacggcgatgcccggcagacatcgaatatcaaccgttgacctgtgcggctaccatatattgtcatgacgtcaccagccaccgcgaagcttgccgccgtatccagccgccagtcccacccgcatcttgcgcgcgcgggcgctgccgcgcgctggacactggccgtgctggccggcctgtggcttgcactgtgcacggcggtcggcccgctgtactgggacgaggagaacggcaccctcgcccattggaactgggccaataccgcaatattcgtcgtgtcattcctgatatatctcggaatcatcacgctgatggtgcgattcgcagcaggccagcgcatactgccgagggctatcggcgagcgactacgtcaacatcagcggaatagcgaaacatcacggcccgccgccgatcagcaggccagccaaccagccaagacccgtcgtaccgttcgcgctatcgtcacgtccaccgtcactgttctggaccgctggatcacacgcggcacgaaccggttctggaagcttatgctggtgttttttgtcggctggctctgggtgccgaccactctgctggccgcattcggtgcggacctccgctcacagatccgtgaattcagctgggcctggaaccagtggaccggcctgaaacagccctatatcggcttcttctccttcgtgccgatggacatctaccccactgcgcactacatgtggccgtccgatcccacgtatctgaccgaccagcacaatgtggtactcactgtgttctatggcgcgatggtcacgtttgcgaggcatctgaccggctcaaacgatgccggtatcgtgacgttggctgccctgcagacgctgttcgccgtgttctgctgcgctgccgccgccaatcgattcctgaaccggccttggataggaaaaacggcaacggattccgccgttcccccacaggccggaggattggacagattcctgattctgctgttcttcatggtctgcccgctggccgtgttttccactatctccatcaccaaatcgccgctgttcgcgttctcgttcgtctggtggttcagcgtctggtatgaactcgtccagacctggcaccccgccggcacccgcaaacatcctcagacccctgccatcgccacgcccgtccacttgccgtgccacagcttcatcgccttcatcctggccacgtcggtgatgctgatttccgcgaaatatgcgtggtacatcatcgctctgcaaatcgtgctggctctgatcgccgaccgcaaacgctgggcgacttacgtcgtggcgctgctcatccccaccgtactgattcacggcggcatctccttcgccatctcctctggtgcgatcatcggcggcgatccaatcgaaagccgcggcgtacagctgcaaatgatcgcccgcgtggctcagcgcaatccggacggtatttcagacgaagccaaaaagaacctcgcgcccgtcttcaatctcgatcagatggccgacgcttactcccagcaggatgccgacccggtgaaatcctccggtattcaggccaagaaggtcagctacaagtggcgcacggtgacgcccgaggatatgaccaatttcaacaaggcatggttcgaaatcgtcaaggacaatccgatcatcgcgctggatgcgttgctggccaaatgcttcggatacttcaatgtgaacgatcagccgtacgtatcgatggattattacgtggccagcgattacgtgcagaaaaactccacatggatcaaggattacaaccatgactggcgtgagcacatcgccggcttcactcgcgtatggggcagtattcccgtgctcggctggcctacgcacggcaatttctacgtggtgatgacattgctgatcggcgcggccgaggtgattcgccgacgttggctcaccctcatgacccatattccgctgctactgctgatgggcgtgatgattaccgcgccggccaataatttcgagcggcacatgttgccggttgcgtttgtattcggattcgtggtgctgacgtattggcgagagtctttggctgaaaggcaacgccaatcagcgacgctacactagtgactatgtcagattttctcgaacttcttgctgccgacgttgccgattcgtccggtgcatccggtatgccgggtgcgcccgattcatccgattcggccgcacccggcatcaccgcgaccaaccgcgtacgcaccgtgctgttcgagtgcctgttcaatcatctggccgacgaacgagtggagtccctgttcaccatcctcggtttcgagcatgacttcgattgttacgccatcgccggataccctgcccggtccgccgcacgtacggccaaggaaatcgagaaaatcgtggccgatttcggcggtgtgtgtctgaccgccaagcgcccgatcggcaacagcaccgccgtagtggcgttgattcgtccggtcggtgcggccacgccggaaatcatctgcaataccatcgccccgtcgttcgccgccgatcggccaatcgccttgggtccgcagcgtaccggtgccgatggcgcgatgcgttcgattcaggccacgctttactgtcttcaggccgcgccggctctggccgccaccgtgcagccattgccgcgcccgttacgcaccgacgacgccctgcccgaacgtgcgttgatcggcgacgcggacgcccgtgacgaactggtccgcgtggtctacggaagcctgacagcagcaggccctgatgatccgacgctgctcaccgtctccacattcctgaagttcggcggttcgctcgagaccacggccaaggagctcaacgtacatcccaatacgatccgctaccgtttgaagcgtgccgccgaatccaccggctgggatgccaccgacccgcgcgaggcgtacgtgctgatcaccgccatcgcgttgggtcgtgtggccgaagcgtaacggaccgcagcgtagtcgggcagaagcataaccagcagaaccgtagccggcaaaggccatagctgaccggacataaccgtccagcccgacagcctagcgggccgaatcaggctgcctgaatctcgtgtacgccatcgtgcagtaacgcggccaaggattcttgagtggctaacacttcgtccacgaatccaccggcggacaggctggcgatcacgcgaccggactcgttgtccacaatcggtacaccgacggcaccgacacccaacgtcacatcctcatccgacagtgcatatccacgttcgcgagtcaagcgaatatcctcgcgcaactgttccacactgaccagcgtgttctcgttatatgccgggaacggcgctcctgcaagatagcgttcgacatcggcatcctcgaaatacgccaaggccacgcggccggccgcgccagcatgtagaggcagcacgcggcccgggcgcaggatcagcgaatcgatggcatgaccttgcgcacattccacgcataccaattcagtgccggagaccacactgaggaatgaggtcatgccggtttgcgcggtgatggcatgcatgaccgcaatcgcaggctgccattcggtacgagacgtgcgagcggcatcagccaatcgcagccagtccagcgataatgagtagttaccatccgtatctgttacggcccaccccacatcgaccagtccatccagcacgcggtatacggaggatcgcgggatatcacaggcgtcggcgatatctgccggcgacaggccattctccgccgccaatgcgtccaccacacgactcgccttgtctaaagcgcgggtcggttcacgtttgtcttccgccatcgtcgacgttccttcccctgacttatccctgactcatcatattcaactgttcaggccaagatgatcaccactgtatccaaggcctcgcgacgcctcacggccggcagtctgcaccaatcgcaccatgtcttgagccgatgccgttgccggttgcccatctaccagacaggccagctcaggttccaaggagcgggaaaggccactcagggcgattgccgcttgaatctctccggcgtgattgaataccggtacgctgatagtcacggagccggccatggtctggccgacgtcataggtgaagccgcattcgcgtatatgacgagcctgtcccattgctgtggcacgcatcgtggagaatgtgccgccgagctcgttggtataggcatagtgttccaacagctgctcgtagcgagccgggggaagccaggccgtcagtacatgagagggagcgctcatgctcagaggcaagctattgcccaccagctgtgcatagctttgcaatgtctcacgggtgcgtgtctcgatgcacaccgtgcgcaatcgcctccgaacgaacagaccccagataccgaactggccgcgatgggcgcggaagatacggcgagcgatctgctgaatgtccagtctgctttcgatttggccgccgatacgtacgcaatcgatgccaagccgatactcgccacgattgatgccccgttccacccaaccgactgcgacgagattatccagcaaacgatacgttgagcttacgggttcaccagtacgttcgcttatggtttttgcggtgcttggtcccagttccgccaatacatcaagtactgccttggatttcaccaatgcatctacgctacggtcatcacggcttggcgccaccatgcgcgtcacctcctgacctgtttgttgatacctcagacatcttaccgggtattcagcgggttgccgcccaaaacgcactgggccccgacgggagtatcccgtcggggcccaagaggtttctggctcccctctttgagggggagccgtccgcgcggcggaccgggggaggcccgagacgctaaggcccaaggacgcgagaaacaccccgacgc

SEQ ID NO: 903 - DNA, 61072 bp, Unknown
  gut microbiota DNA sequence
cgcccacctgttccacacctccaacaagcgcgtctgggattacgtgaaccgcttcacgagcttcacgaactacgtgcaccgcgtgtatgccacgcatgacggcgaggtctacccgctgcccatcaacctgggcaccatcaaccagttcttccatgcgcattacacgccggccgaagccaaggccctgattgaacagcaggcgggcgagctggccggcaccgatccggccaacctgaacgacaaaggcatccagctcatcggccgcccgctgtacgaggcgttcatcaagaactacaccggcaagcagtggcagaccgacccgtccgagctgccggccgccatcatcaagcgcctgcccgtgcgcttcaactacgacaaccgctacttcaaggacacgtgggagggcctgcccgccgacggctacaccgcgtggatggagaagatgatcgacgacccgcgcatcaccgtggagctcggcgtcgacttcttcgacgaatcccagccgtacaacaagaccgcgctcaaggccgcgggcgtgccggtggtgtacacgggcccggtggaccgttacttcgactatgagctcggcgacctcaagtggcgcacggtcgacttcaaggaggtccgctacgacgaaggcgaccacttcggctgcccggtgatgaacttctccgacgcggacgtaccctacacccgcgccatcgaattcaagaacttcaacccggagcgccacgatgcccagaacccgaacaagaccgtggtgtgggaggaatacagccgtttcgccgagcgtggcgacgagccgtactacccggtcaacacggatgcggacaaggcactgtacgcccagtacgaggccaaggccaaggccgagccgaacaccgtgttcggcggtcgcctgggcacgtacaagtactacgacatgcacaacgtgatcgacaccgccctgaccgcttacgaggagcaagtcgcaccgctgctgaagaagtagaccgtcgtttcgccagaggattaacgattgagcctgaaaccgactgaatattgctgaggcaatagccggtttcaggcttttgtgttttttggaagccaaatttcctggggtgcttaaggctcgccacgaggagtacagttgtctgtaacgcacaatgtggcgcgtaagacgaggggcgcatctcgcaagtggggtgcgatgcagttgaaggagtgcatgtcatgactgatccgaatgtcaatccgaacggccaggtgccgtggcagcaagctgacgccaatccgactgagccgttaaatgcgatgacggcggaaacgggaaccgccgccaacaatgctccgacccaagcaatcgcagcgggcgagcagcccactcaagcgttcactcctgttgaacagcctacgcaggcgtttacacctgccgagcagcccacccagccttttgcgccggccaatcagccggtaccgcctacgcaggctttgccaccagtgactcctgccgctgcgcccgcgcccgcaccggcagcgcccgcacccgcgcccgcaccggcagcacccaattcgccctatccgggggcggctccggcaggcggatcggttcctccggtctacggcagcgtcagtgctccggtatatccgggcggcggggccgtgcctccgcaaacgccctataacccgtatatgcaaggcggccaaccgaacggccagccgggatggtctggttcttacggcagtgtgccgcctgaagcgaaccagaagtacaacggcctggctattgccggttttatctgctcgttccttgtctcactcctcggtctgatcctgagcatcgtgggcctcaaccagattaagaaacagggcggcaagggcaagggcttggccatcgccggcatcatcatcagtgcggcgggcatggtgatacaggtaatactggtcatcgcgctgatcgtcggcggtgcctcgtatgccagcaaggctatagatgaggcgaaaaccgattccttctatagtcagtcctcttcgggcaacggtgatagcagcgataagagcaaagctcaagataatcttgacgatgtgctggacgacacgttgggcgaaacccatgacgatctaaccgacggcgattatgggctgtacgattcgattcaggatttcgtcgactctttggaattcaaggactccattgaatccgaagcggatacgtttgcagacaccggcatcaccttcaactaccgtgtcgacggtgacaccttggtgtacgagtacgtgctcgacgacagctacgcctcgctaggcgataccttcgcttcctcactggatgctatggacagcacctatcaatccaccgcgaatctgctgggctcgatgtgcaagacctccagcggcaaggcatcattgcgcgtcatcatgcacacgcaaagcggccagtcgctgtatgacaaaacctggaccgaaaagtagcaatcccagcgaacgtgcgttttggtcgattgaaggccggtctgcttgctccttggacggatgcttctgcggaaggaaccgccaaggagtaggcttacaggcatgagactcgcacgtttttctttgaatgattcgccgcgctacgccttcgtacaaaaggacgaaacggacggcaaggactacctcatcgaactcgacggtcatccgctggccggcgaccaggtcaagcccaccggcaaccggtacccggtcgacggcgacggcatccgtctgctctccccggtcatcccctccaaggtttacggtctggccaagaactatgaggcccacgcccagttcatgcacgaggccggccactccgaaatcgcccacgcgccggaagacatggtgatcttcaccaagccgtccacctcggtaatcggccccgacgacccgattgtgtacccggcctgctccaaggacatgaacttcgagccggaagtggccgtggtgatgggccgtatcgccaagaacgtgaccgtcgagaacgcgatggattacgtgctcggcttcacctgcgtcaatgatgtgacgttgcgcgatctgcagggcatcgaccccacgtggacgcgcgccaagggcttcgatacctcctgtccgcttggcccgtggatcgtgatgcgtgacgacctcgactggaaggacgccaagatttccttcacgctgaacggcgaggatgtgccgatggcgtctggcaccaccgcgaacctgattcacggcatccccgagcagattgccgccatttcgtcgttctccacgctgctgcctggcgacgtcatcatgaccggcaccccgaacgcctccggccacctcgacccaggcgacgagaccatcgtgcacgtcgaaggcatcggtgatctgcgcaacgtaatcgttcgggcgtgactcgttctggctcccctctctgaggggaaccgtccaggcggagaagctgactgagggaaccaagaacgcgccttacgctcccggcagaagtgcgtgcagggcggtcatcaccaccaggctgatgatggccgtcactgtcagcgagaagccggcgagtttggcgttgccggtcagcgaatcggtgaacttagttgagaaaatcgtgatcggggcgaaggagcccagcacgatgatctcgcgaatcctcatgtcaaactgccgaccgcgccgagacgccgggacagttccgtgccggcaagccgcagcttggtcttaagcgaccgctcctgttcggggcgcagcgatccgctcacgaaagtgagagccagcccggcgatgggaaagtcgttgtagtcgcgcacagcgacggcgtatgaatcaaagccgggcgtcacgtctccgtgttcctcggcaaaaccggtgcgttgggtttcggcgagcgttgcctccagctccttgggcgatttggggccgatgccggtgcggtcggtgaacgcctgacgattgggatatagcgcgcggacctgattgcgggggagtgcggacagaatggcccgcccggtggcggtcaggtgactgggtaggcgcacgcccacgcctgacactagcggcgggcgatgcgcggcgcgctcctcaatcacataaatgatttcgttgccgtgcagcacggccagatgtccgttttcgccggtctcgtcaacaagacgcgccaacaccggatgcgcgacctgcgatacacgatgttggcgagaataggccgatcccagctcgaaagtcttgagtccgatgccgtacgcgcgctgctcggcaaggcgggtgaccagtccgtgacgctccaaaatctccaacaattggtacaccgtggagcgcggaatgccgagttcgcgagcgagcgtggcggcttgcgtctgaccattgctcgcgatgaactcgaggatgtcgagcgtacggtcggccgccggagccagcgagacacgtggcgcggatgatgatgtctgatgttcccgttctgatggcttcacctgcgcccgcttgacggtacgtggctcggtgaaggcgtattgctgcgaggcatggctcatatttccatcaccttacatgtctgagatttcagacacaagatggacgaagtggcttatggcgggcatccgactgaggtgaaatggccaaggtttgattactcggggagcgattggtcgcgtttgcgtcgcctgctgttgatgggcaggtgcggtgagcgaatgcgggcagtcgcggatccccggcgaagcatgtgccgcatatgtcgtatatgcggaatgcggcacatatatagaaaggtatgagcatggcagagcagacggtcaccgtaggtgttggagcgctgagcatcgaggacgttatcgccgtagcgcgcggcggtgccaaagtggcgatttcggacgaatcgaagcatgagatggcgctgagtcgcgcggttatcgatcatttggccgacgacaccgtgccgcattacggtatctccaccggattcggcgcgctcgcctccacctccatccccaaggaacagcgtgcgcagctgcagaaaagtctgattcgctcgcatgccgccggtgccggaccggaagtggagcgtgaggtggtgcgcggcctgctggtgctgcgcctgagcaccctgtgcaccggacgcaccggtgtgcgcccggaaaccgcgcaggtctacgccgatatgctgaacgccggcatcaccccggtggtctacgaatacggttcactcggatgctccggtgatttggcgccgctcgcagcctgtgctttggtggcgatgggtgaaggcgaggcccgcaacgctgacggcctcaagatcggcggcggcgaagcgctgcgtgcggccggcatcacgcccgtcgatttgaaagagaaggaaggactggcgctggtcaacggcaccgacggcatgctcggcatgttgtgtatggccatcaccgatctgcgcctgctgctcaagaccgcggatgtcgccgccgcgatgagcgtggaaggcatgctcggcaacgaccgcgtattcgccgccgacttgcaggcgctgcgcccgcatcgcggccaaggcgattccgctgcgaacatcgcccgcatgctcaaggactctggtctgattgaggccggccgcccgggctccaccgtgcgtgtgcaggacgcctactcgctgcgctgcaccccgcaggtgcacggcgccgcccgcgacaccgtggaatacgcggcctccgtggcgggcgtggaactcgcctccgccatcgataacccgtgcgtcacgctggacggccgtgtggagtccaacggcaacttccatggcgcgccgctggcctatgtgctcgatttcctggcgattccgaccgccgacgtagcctctatctccgagcgtcgtaccgaccgcttccttgacgtggcgcgcaaccgcggcctgccggcgttcctggctggtgacccgggcgtggactccggtttcatgatcgcccaatacaccgctgccggcatcgtctccgaaatgaagcgtaacgccgtgcctgcctcggtcgattcgattccaagctccgccatgcaggaagatcacgtgtcgatgggttgggccgccgcccgcaagctgcgccggtcgattccggcctttgcgcgcgtgctggccgtggaactgctgtgctcctgccgctccttcgacttccgcaagccgtaccgtccgggtgcggcgggcgccgccgtataccgcgtggtgcgccagtacgccaacgaaatcggccccgacgtacgcgatacctggaccaccccgcagattgagggcgtggccgaggcgattctctccggcgaagtcctcgccgccgccgaatccgccgtcggcgcactgaagtagcggctgcccaagcttcctcatcagagggggctactagtcaccctccccaccaaaatccaaaacttgagtcatatgcactcaagttttgggaatagaatgggttccaggtcggttgaccatatcagacaacgacaagctgcggtctgtcgcaacgctcgcagggctttcgaagcccgcgagccgcactgcgcagaccgcatgatatggaggaatacgatatggaacagaagttcaccactatggcccaagaagccgtcggcgacgcgattcagagtgcgtccgccgcaggaaacgcgcaggtcgagaccctgcacgtcatggatgcgctgctgcgccaggaaaacggcgtggcgcgctctctgatcgaggccgcgggcggggacccgcaggccatcggcgcggcggtgcgcaacgctttggtcgcgctgccgagcgcatccggatccagcacctcgcagccacaggccagccgccagctgaccgccgccatcgcccaggctgagaaggaaatgcagcagatgggcgacgaatacgtctccaccgaacatctgcttatcggcatcgcggccagcaagccgaaccagtcggccgaaatcttggagaagaacggcgtcaccgcagcctccctgcgcaaggccgtacccggcgtgcgtggtggcgcgaaggtcaccagcccggacgcggaaggctcgtacaaggccctagagaagtactccaccgacctgacggccgccgccaaggaaggcaagctggacccggtcatcggacgtgaccaggaaatccgccgcgtgattcagatcctctcccgtcgtaccaagaacaacccggtgctgatcggcgagcccggcgtcggcaagaccgccgtcgtggaaggcctggcccagcgtatcgtggcgggcgacgtgcccaccaccctgcaaggcaagaagctcatctcccttgacctaggctccatggtggccggttcgaagtaccgtggcgagttcgaggagcgcctgaagagcgtcctgaacgaaatcaagaatgcggatggtcagatcatcaccttcatcgacgagatccacaccatcgtcggcgcgggtgcggccgaaggctcgatggacgccggcaatatgttgaagcccatgctggcccgtggcgagctgcgcctgatcggcgcgaccacgctggacgagtaccgcgagaacatcgaaaaggatccggcattggaacgccgtttccaacaggtgttcgtgggcgagccgagcgtggaagacaccatcgccatcctgcgtggcctgaagcagcgttacgaggcgcaccataaggtaacgatcggcgacgacgcgctggtcgccgccgcgaccctctcgaaccggtacatctcaggccgtcagctgccggacaaggccatcgacctggtcgatgaggcggccgctcacctgcgtatggagctcgactcctcgcctgaggagatcgatgaactgcagcgcaaggtgacccgtcttgaaatggaggaaatgcagctcaagaaggccgaggatcctgcatccaaggagcgtctgggcaagctgcaagccgaactcgcggacacccgtgagaagctcagcggcctcaaggcgcgttgggatgcggaacaggctggccacaacaaggtcggcgacctgcgtgccaagctcgacgacctgcgcgtgcaggcggataagtatacccgtgaaggcaacttggcggaggcctcgaagattctgtacggcgagattccgtccattcagaaggagcttgccgccgcggagagcgcggatgctgaatctgctgatgccagcgcggccaacccggccgatgagccgatggtcccggaccgtgtggacgccgactcggtggccgagatcgtctccgactggaccggcattcccgtcggccgcctgatgcagggcgaaaacgagaagctgctgcacatggaggactacctcggcaagcgtgtgatcggccagaaggaagccatcgccgccgtgtccgacgcggtgcgccgttcgcgtgccggcatctccgacccgaaccgtccgaccggatcgttcctgttcctcggccccaccggtgtgggcaagaccgaactggccaaggcgctcgccgacttcctgttcgacgacgagaaggccatggtccgcatcgacatgtccgaatacatggagaaggcttcggtctcgcgcctgattggcgcggcgccgggctacgtgggctacgagcagggcggccagctgaccgaggccgtgcgccgtcgcccgtattccgtggtgctgttcgacgaggtcgagaaggccaacccggagatcttcgacgtgctgctgcaggtacttgacgatggtcgcctgaccgatggccagggaaggaccgtggacttcaagaacacgatcctgattatgacctctaacctcggctcgcagttcctcgtgaacgaggacatggacgccgacgccaagaaaaaggccgtgatggacgctgtccacatgaacttcaagccggagttcctgaaccgtctggacgacatcgtcatgttccacccgcttacgcgcgaggagcttggcggcatcgtggatatccaggtggctggcgtgtcccagcgtctgaccgatcgccgcatcacgctggacgtcaccgactcggctcgcgaatggctggccaacaccggttacgacccggcttatggcgctcgtccgctgcgccgcctggtacagaccgaagtgggcgaccagctggcccgtatgctgctggccggcaaggtccacgacggtgacaccgtgctcgtcgaccagaccggcggcgaacatctggagctctccgcttgggcgagcgaccagattgtctccgacaatccggacgtgagcgtggacaacgtcaccgaagacaagtgacaatcactggctcccctctctgagcaaagctgtcagcgaagctgactgaggggagttcgggctggcgagcttcactatattggctctcctctgaggaggagagccttttcgctaccatggtgctgaacttcatacgaggagggccagtgactggacgattcgcgccgacgccgtcggggcgcatgcatatcggcaacgtgtacgccatgttgggtgcatggctttcggcccgctcgcgtggcgaccgcatgctgatgcgtatcgaggacgtggacaagccgcgtgtggtcgccggtgcggaccagctcatgatggatgacctgcattggctcggcctcgactgggatggcgaaccgatgttccaatcccagcgcactgaacgatacgaatacgctctcgaatgcctgcgctcgcaaggtgtgctgtacccctgtttctgctcgcgtgccgacattcgcgccgcctcggcccccaacgagggcgacggcttcatggtgtaccccggcacgtgccgccgcctgctgcacgaccatcccgacgaggtccgtgcccgtttggttcgcggcgaccagcattccatccgtatcgccatgccggaatcggcagcgggagaaaagcaacgtacagtgcctgacgattccgctgcgctgtcgggagccgtgccgccggaacagcagggcgatgccggaatcgttgatggtgtcgcatgctttaacgaccgtgtctatagtccacagcactacgatttggcccgcgaggtaggcgattccgtgattcgccgagccgatggactgttcggctatcaactggtcgtggtcgtggatgacctcgatatgggtgttgatgatatcgtgcgcggccgtgatctgctgcgctccaccgcgctgcaaatgtggattcgccagtgtctgttggctggcggctttgagccggaatgcggcaacacggaaaagcctctcgccgagcaccccgagtatgcgcacctgccgcttatcgacaatgcggccggccggcgtttagccaagcgcgaacgttcgctggatatgggagccttgcgcgcccgcaacgtaacccccgagcaaatcatcggatactgcgcctggctgctgcgtctgcaacccactccaattccttacaaacccgccgatctgctggcagatttcagctgggagccactgcgcgccaaccacctggaccgcgcgctgaaaccggatgatccaaccactccacaatggctggcagaagcgttaggctagaggcagcccaacaggaaggattccaatgtcgtcgaagctctggagaaacgtggcgctggcaggcgtggccgccgccggtgctgccgtgtgggccgtggccccgcgcacgttcaatgacaagcgtcgtaatttcgtgccctccattccggaggtatggtatgcccatcgtggcttgcatgatgcgggttctggtttggtcggctataccgatatcgctgattatggtggggataatccggttagcgcccaagccgataccactgagcgatccatcgccgaaaacgatgattatgtgtcgcttgcccgtcgcatggctgtcaaggccggctacggcagtgcggatatgaccggtccgattgctcccgaaaactcgctggccgcgttcgccgccgcctgcgaggctggctatggcatcgaactcgacgtgcagcttacgctcgacggccaagtggtcgtggtccatgacgccgatttgttgcgcgtggccggcgatccgcgccgcatcgaagacctgacttacgacgaactcgcccgtattccgctcttcccgaacggcgagtcaggcgatttgaaggccgaaccgttgccgggtgccgacgcgaacccgccgctggtggtcacgccgtccgccgcgccgaaggggtactaccagcatgtgccgctgttctccgatgtgctggacgtggtggccggccaggctccgctgattgtggaatacaagttcagcaacaacagggcttgggatgagcgtagcgaagagctcatggaaaagggccacgccttgcttgaggcgtatgacggcccgtacgtgatcgaatccttccacccgggcgcggtgaattggtacaaggagcatcaccctgaggtgtgccgcggtcagctgagctggccggcgaagctgagcaagaatggtgcggctgaatgggccgccggcttactggcgttcgactggctgtctcgtcctgatttcgtggcttatgactggaccggtggcgcttcgccgcaagtcaagctcgctcgttcgatgggtgcgatgccggtttcatggaccgtgcgcagcagcgatgaactcgcccagtgcgccccctacttcgaccgccacatcttcgaagcgttcgtccccgacgcagtgtgaggttgagggcgttattgatgcgcccatggggtggttacaggctcatcgggcggtaacttgcccatggggcggtttgaagaatatgtgaaaccgcggaattaagccattttggcataccgccccatgaggattttgccgcctcatggggcaattaccgccccatgggggatttcccgccccatgaggtatggcgttttacttgtgatacggctcgccagcgttgattttataagcgcgatagatctgctccagcagaatcacgcgcataagctgatgcgggaacgtcatcttcgagaaactcagcagaaaatcagcacgacgcagaatcgcgtcgtcaaggccgattgaaccgccgatgaccagctgaatatggctggtgccacgcaatccaaggtcgttgattttggcggccaattcttcactggacagctgcttgccattgatggcaagggcaataacaaacgcgccgtccttcagatgcttggcgatgcgttcgccttctctggccttgatctgtcggtcaacgccttcggaggcatggtcaggcgttttctcatctgccacttcaatgatgttgagcttgcagtagcgcgaaagtcgcttggaatactcgtcaatggcgtcgcgaaggtaacgctccttcacgcgccccggcgcaataatgtcgatttgcatagatgttccgttatgttggctcccctcggggaggggagccagggaaatcagtcaattacgccatagagacggtcaccggcgtcgccgagtcccggcacgatgtagcacttgtcgttaagacgttcgtcgaccgcgcacaccacgaccttgaagtcgatggacgggtcgatgtgctcctcgacgtacttgatgccttcgggggccgcgatgatgttgatcgcggtcacgtccttggcgccgcgctcggccaggtagtgcgtggcggcgaccagcgttccgccggtggcgagcatcgggtcgatgaggaagcactggcggccggacaggtcctcgggcagacggttcgcgtacgtcacctgctgggtggggtgctcctcgtcgcgcttcatgcccaggaagccgacttcagcagtcggaatcaggcgggtcatgccgtcgagcatgcccaagccagcgcgcagcaccggcacgatgatcgggcgcggggaggcgagcttcttgccggtcatcggggcgaccggcgtctcgatcggcgcggccaccacggacaggttgcgggtggcctcgtaggcctcaagcatcacgagttcggagacgagctcgcggaaggtggaggagggggtgttcttgtcgcgcagcacggtgagcttgtgctcgaccagcggatgattcaaaacatggagttccatgattcccagcctagtccaagtttgccgacctgccgaattggtaatggcgcggcttgcttatcggattggatttgtgggtgattcgactttttgctgcgataggccagttgcagcaggacaatgccctgtccgtgccgagatctgcctctgatacctctgagagggtaaagcgtaaaaaacaacacggtgtaaaacagggaatgaaactggtgtaaaaccgggaatgagataggtgtaaaatcgggaatgaaactggtgtaaaatctatattgttagaacgatagaactgggaaaggctgcaatatgaacgatttgagtggtcgcgatggtaccttgaccaggcctgattatcgttcacgcgtggtagatagcagattaagtaaactgctcaaggcgttcggtgcagtggaaatcgttgggccgaaatggtgcggcaagacatggaccgcgctctcccggtctcgaagcgttgatcgtctggatgatgtggcagttttcgcggccgcccaaaccgatcctgcattggtgctgatgggggaggagccccatctggtggacgaatggcaagatgtaccgcaaatttgggatgccgctcgtcgccatatagatgacaatgcgaaccgcaaggggcagctgattcttacaggttcggctattccaaaggatcgtgacgccattcatcacagcggcactggtcgcattgctcgtctgcgcatgtggcccatgagcttggctgaatccggagaatccacgggcgcggtcagcctatccgatttgttcgaggggaaattcgagcctgccgaatgcaatacgagtatcgaagacatcgccagatggtgttgccgtggcggatggcccgcgaatcttgagctagacgatgaattcgccttggaaatcccgggcgaatatatcgcaagtgtgctggatatcagcgtgccgaagatgaagaagaatcctgaaactgcacgagctttgatgcgagctcttgccgtgaacatctcgcaggcaccaaaatatgcgacgctggctgcggatatggcatatggcgatgagcggcgtgagccggatacgcagacggtgaagagctatttggaaatgttcaaggacttgtaccttctgacggatttggagggttgggaaccgccactccgcgcaaagagtcgtgtgcgaaccaagcccaagcgatatttcgtggatccttcgttgcctgctgcggttttaggtgccgcgccgaatactctgatgcgcgatacacagacgctcggcgatctgtttgaaacgctgtgcattcgtgatttgaatgtatatctgtcggctatgccgggtgccgggaatcgcattgcgtattaccgcgatgacaaggggcttgaagttgatgtcattatcgagttgtctgacggcaggtggggtgccatcgaaataaaactcagtgaccttaaggtgaacgatgacaatgcggataagctcaaatccttccgcaacaaaatctgcggcaatcccatggctcaggtccgagaccccgaattcatgatgttccttaccggccgaggtgggaaggcctatcgccgcaatgacggcatactggtcgtgcccatcgcaacgtttggggcgtgaatctggtaaaagaaaagaagcgccgaaccgcgaaagcgcctgtcggcgcaagggccgctcgcggcggcaaaaaatggagcccggggcttaagcacggtccgacgcggatacttagtatagcttgcgatgggtctcgccgcgccggggaaggggtggcgttggccggtagctgattgttggggtgcggtcggtgggtttctccctcagtcatgggcatcgcccgtgacagctccctcatcagagggagcctggagcggggttactccaaccgtccgcgacgccagaggttggcaccgtgttggaaatccttggcggtggccatgaggctgccggcggtgtgcataaggcgggcggctttggtgcgcacggccttctcatcggcatccgaggagaagccgccgttggcctcggcccgggtcaccatgcgccgcgcctccacgcgcaagcccaacgccaccacatcggtaaacgccgccgcacgctcaagcgccacggcaaaatcgcccacaaaagcaccggagagaatcgaatcggccaatcgcacgatgtcatcttcactgggagcttgatccacgccggcgatggcggaggcggtagtggccaccggctccgccaagcgccacagatgcgcgattgagtcgcgattcgatcgcatccacgtacgcaacatatacagtcgccacagcacaccaggcagcgaatccggttcggcgtcactccacaattcggcgatttcatccacgccgaccgtctccaccaacgtgagcacgcgctcgacaaccgtcgggtcttcgctatggcgcacacgatccagcaatgcggcagcggacagatggctcatctcgctcaacgcttgcgggtccatgccgccggccaatccatcggccacagccgggtcgagctgagccgggcgcgaaggacgtgaagaacccatgcgagcaggtccgaatgccgctccggccgcacgcagcgagccgaagcctgggcccagactgccggcggcaccattgtgcgcggcatgagctgcggcggcagcggccgaggagttggatgaatcagggaatgcgggtctagtagacaagcggttgaaccttctgaatatcgatgattttgggaccatgaggcgtcggagtgacgaacagcgccgccgccgtgccggtcggcatgaacggtgtcttggcgatcaggcgtttgctcagagacggcgcaacgcacatgctgcgcaggtgttcgaacataccaccaatcaccggccggtgcatgcatatcgctatgggctgacggcgctcaagtgcgaactcgatttcgctgagtagacactcccatgcggtgtccggcgcagcggcgtatgcatcttcggtgagcggatcgagatgaaccatgtctcgtccggtctgccacgcgaacatctccaacgtctcctggcagcgcacccaaggcgacgtggccagtcggttcggattgaaacacgccagctcgcggttcagcgcgtatgccgcagccgcgccgcgcggcgtgatcggacggttctcgtccgagcccttccacagtttgcgcgcttctgccttgccgtggcgcacgataatcaccggcacggcgtcaagcgcgccctcctgcacccggtcaacgaatagcgcaaggatgtccttatcggtggaatggctgagtttcttgcgggcctcagccggcgtcaaccacaggacttcgtcgatttcgccgatgtccgcccgatgcaccgggccaaacgcatgggtgcgccgcagattgtcgatggcgctgattggcgtggccatccagaactggatgtgcttggtgtccgccgaccgatccttggtatggcgctgtttgcggccctcttcggacagcgggtactcgatgtcgcccagatagggaccgagctccacgggcaggcccgattcctcgccgatctcgcgcacggcggcatgccggtgtgattcgtttgggtcgaccttgcctttcggccagctccagtcgtcgtatttcgggcgatgcacgacgcacagttcgatgcggttgagtacgttgtccaccgcggccgggctgtcggcctgcgccgggtccggggtggaagccgcgtccgatgcgccgtgtgctgccgtggccttgccgtcagaatccgcggtattcgcgatgatggtgccatcggtggcaatattggatttcgctgatggagacgatgcctgcgtcggctcggcatcatccttccaccggtacagaataccgccggcggcttccacgattcgtctcatactgttcgtacccatctcttgtattgtaggtcacgttggaccgctgctacgtagtttttgcgcgctgaacaacgatgcccggcatcctctcgaaagaggagccgggcatcgtaaccaccctcagtcagctcgtgctgacagggagcatcgaatgaaatcagttgtgcgaattggggcggcgctggtgcttgcgaatcagatattcctgactgtcgaccagcgggcggccctcgtcgtccttggtgtgcagcacatacgtgccgtcgggctgcatgtgccagctcatggtggagtcggccatctgcaggtccacgtacttgatgagcccgtcgacctgctccggggcggtgacacgcaccagagcctccacacggcggtcaaggttacggtgcatgaggtcagccgaaccgatgtagacctccgggccggaagccggaccctcgccgatctgcgggccgtccgcgttgcagaaggcgtagatgcgggagtgctccaggaagcggccgagaatcgaacgcacgcggatgttctcggacaggccgggaacgccgggcttcagagcgcagatgccgcgttcgacgatgtcgatcttcacgccggcctgagaggcacggtacaaggcgtcgatggtcttctcgtccacgatggagttgaccttgatcttgatccaggcctccttgccagcgcgggcggcgtcctcctcgcggcggatgcgctggattagaccggtgcgcacggtgcgcggggccaccagcagacggtggaagctggactttggcgcgtaaccggagagctggttgaacagacgagtcagatcctggccgaccaccgggtcgcaggtcagcagacccagatcggtgtacagtcgcgcggtcttcgggttgtagttgccggtgcctacgtggcagtagcggcgcagaccgtccgcttcctgacgcacgacctcgatgagcttgcagtgggtcttcaagcccacgatgccgtacaccacgtgcacgccggcgcgttcgagcttgcgggcccacgcgatgttggcgtcctcgtcgaaacgagccttgatttccaccaaagccagcacctgcttgccggcatgagcggcgtcgatcagggcgtcgatgatcggcgagttggagctggtgcggtacagggtctgcttgatggccagcaccttcgggtccgcggcggcctgcgcaaggaaggcctgcacggaagtggagaaggagtcataggggtgatgcagcaggatgtcgcgctcgcggatggcagcgaaaatatcctgtgcgcgggaggactcgacctcggcgatctgacggttcgtggtcggcacgaacggacggttcttcaggtccgggcggtccacgctgccgagctcaaagagcacggtcaggtccagcgggctgggcagacggtatacctcgtcctggctcacgccgagctggtcggcgagcagctgggagaggaaggggctcgtggtgtccgtgatctccaggcggatcggcggtccgaagcggcggcgcagcagctccttctccatggcgttgagcaggttctcggcgtcatcctcttccacgtcgatgtcctcgttacgagtcacgcggaaggagcgggcctccttgatgatcatgcccgggaacagggattccagatgcgcggcgatgagcttttccatggcgatgaagccgtaacgctcgtccttggactcctcatcggtcatgtcgtccaccggcaccaggcgcggcaggttgcccgggatcttgacgcgggcgaagtgcgacttgccggaggccgggttctccacaatcacggccaggttgatggaaccgccggaaatgtaggggaacgggtgggccggatccacggcgagcggcgtcaggaccgggaacacctgctggcggtagtagcgcgagaggcgctcctgctcggaggatgtgagcttgtcccacgtcagcaggacgatgcgctccttctccaattccggcagaatggtgtcgatcgtgtaatgtgcgtgctcgtcttgcagacggtgtgcggtctcgctgatcgcgcgcagctgctgacgcgggctcaggccggcggcagacggcacggcgatgcccgagtcgatacggcgcttcaggccggcgacgcggaccatgaagaactcgtcaaggttcgaggcgaagatcgcggcgaagttggcgcgctcgagcaggggcatgtcttcgttctccgcacattcgagcacgcgctggttgaacttgagccagctgagctcgcggtcgaagaaacggtccttgggcagcggtgcctcgccttcctgatcgacgcggcggtcgttgttgtcgttttcggcaatatgctctgcgatttggctgcgcagaattgccttcgagggtgcgtcaaatatctgtgccatagcttatatcgtaagctttggcgtggccggaaaacgactgaacgcgccagaattcaacgggtgttcatgttagttcggtgttggttggttttgagtgtgctagcgtcgctcgcgacacgccgtgagcggcggtgaaacgaacgaaatcgaacatcggacgggttcgatgtgaacggttcagctcgttttccgatagccagaaagtgcgattgaacagttgtgataaaaaacgcacaacgactctctgcaggttgcgagaaacgggagtgatgaatagattatgaggtacaagaacaactgaacagagcagagcccacaaatagtgtatggtcacgaggactgttacgttggacgggcattggaaagacttaccgttacaacgatgatgttgtgcagagattctgctccagtagttgaacttgtagaaaaggcccgctccggcgggccttttcgtttgtgtgtacagtggagggcatgacggaaacacagcgtacgccagaggggatgtcgtcgaaacctcgtatcaagccggccgatgccgaagacggccgtccggtctctatctctgcgcgtctcggacgactgcaattccactattccggcaagttccgcgtgctgcagattgccgacattcaggatgggccgaaagtctccaaagacaccatcaccctgattgaggccagccttgatgccacacggcctgatctggtgattttctccggcaaccagatcgccggctacgatccggcgtttgccgattcattccgtaaacgtcgctggtgtaacgaacctattgccgaatccgcgctgaaccatacccgagcgctggtgcgcaaggccattggccagttcactgagccgttggcggcgcgcggcattccgtgggccgtgacgtacggcaaccatgatttccaatgcgggctaagcaatgcggaactggacggtatctatcgcgagttccccggttgtgtcaatccgccgagtgagaccttgccgaaccagattgcatacacctgtggagcgggtggtgctgtgcagacgctgtctggtgccactggttccggtgaaccaggcaccttcgcgctgccggttatggacgttgaccatacgcgcaatgtgctgggtctggtcattcttgactccggcgattacgtgcatggcggcggcttcggcacaccatcgcccgcagcgctcgccttcctgaacgccgtgcccgaccgtatcggtgcgaaatcaatggtgttccagcacatgccgatgcccgagtattacaacgtgctgaagccggtggcggccaacgcggcgtttgccatgcagggctatcgttcgcacgccgatacctactacgtgctggacgaattgcaaactcagcccggcggatatttgggagaaggcatatcctgccctgatacgtcagacgaattcgaattgctgcgcgaggggtatttcggcgtcgtagctggtcatgatcatcgcaacggtttcgtcggcgaacatgagggtctgttgcttatcgctacgccaacctgcggattcaatacgtacggaccggctccggccaaacgtgccacgcgattgatcgaatttgatatccgtcacccttacgagccgcgtacgcaattgctggagtttggcgaactggtgggcaagcccagttccaaacgcgcctacacctatgcggtgaaccagaccacgcctggcgagggtgagggcgatgatttgctgcgcaagccgtcgctatggagtcaactgtccggtttattcaggtaacccggtttattcaggtaactgttcctgatagaggcggaaagcggcgcgaagtattcgaggtttcggtggccttccgctgtgttggacgattagtggcagaaatcccgcgtctctttcgttgtgacgcgggatttctgccggttgggctatcggttggattgactggtatgtttcagcgaacggctttgaccagtgcctcggtgaggtacttgccggcggccatcaccagcggcgcatagcggcgtccgggggcggcacccatgcggccggtcgggccggaaatcgagatggcggcgatgacctggccggaggcgttgcggatcggggcggaaatcgagcacacgccctcttcgcgttcgttcacggactcggaccagccgcgcttgcgtacggcggccagcttggtggcggtgaacttggcgtggcgcaatccctggtgcagacggtcggaatcctcccaagccagaagaatctgggcggcggaaccggcttccatcgacagcatggcacccaccggaatggaatcacgtaggccggaggtgcgttccacagcggcgatgcacacgcgctgatcgccttggcggcggtaaatctgcgcagactcgccagtgcgatcgagcagggtctgcaggatcgggccggcggcggtcagcagacgatcctcgcctgctgcggcggcaagttcggcgaaacgggagccgagtacgaatcggccatgctggtcgcgcagtacgaaacggtggcgttccagtgcaatagccaaacgatgtgcggtcggtcgagcgagaccggtggcggccacaagctgtcccagcgtggacgggccggactccagtgcgtcaagaatctttacggttttatcaaggacgccaacgccggaatggatttccccatcgtccttggcggtggtgtcttcaaccggctcggactcggtcaagctgttgttcaatggctcttcttgggaatcagtcataataagggcgattatgccatctcacatagtgaaatagcaaattggggaagtgtctcacagggtggccatgaagttgaaagggcgttcgtggatgccgaagagacatgtctggagcggaaccgagtcatgactaggtcatgttcgagtcgtatccgagtcatattgaggccatcatttgaccgtatctcaatatccggcatgctcatggccgggcccatcgcaagcacataggctaataccacgaacaaggcgcgaacacaatacctcgcgcggaattttttggaggaatcactatgggaacgacactggccgagaaggtctgggccgatcatctggtgcgcaagggcagcgacggagcccctgatttgctgtacatcgatctgatgctcatgcatgaggtcaccagcccgcaggcgtttgagggcctgcgcttggccggccgcaagccgcgtcacgtggatcagctcattgccaccgaggatcacaacacgccgaccgttgatatcgatcgcccgaacccggatgagacgagcgcgttgcagttgacgactttggagaagaactgcaaggagttcggcgtgcgcctgcacccgctgggcgacgccgatcagggcatcgtccacgcgttcgccccgattctgggcctgacccagccgggcatgaccatcgtgtgcggtgattcgcatacgtcgacgcacggcgcgttcggcgcgctggcgttcggcatcggcacttccgaagtcgaacacgtgatggccacacagacgctgtccctgaagccgttcaagaccatggccatcaacgtcgagggcaagctgcccgcggacgcgaccgccaaggacatcattctggcgatcatcgccaagatcggcaccggcggcggccagggttacgtgatcgaataccgtggcgaggcgattcgtaacctcaccatggacgaacgtatgaccgtgtgcaatatgtccatcgaggccggtgcgcgtgccggcatgatcgcgccggacgagaccacgttcgagtacctgaagggccgtccgcacgcgccggaaggcgagctgtgggatcaggccgtggcgtactggaagacgctgaagaccgatgacgatgccgtattcgacaaggtggtggatattgacgccaccaagcttggtccatatgtgacgtggggcaccaaccccggccaaggtctgccgatcaccgcctccgtgccggagccggacaagatcgccgacgccaccaagcgtgccgccgccgaacgtgcgattacatacatgggtttgaagccaggcatgccgatcaaggacatcgccgtggacaccgtgttcattggttcgtgcaccaacggtcgtatcgacgatttgcgccaggccgccgcgatcatgaagggtcaccacaaggccgagaacattcaccgcgtgctcgtggtgccggcctcctcccgcgtgcgtctgcaggcggagaaggaaggcctcgataaggtgttcaaggactttggtgccgaatggcgtaacgccggctgctcgatgtgcctgggcatgaaccccgacaagctggtaccgaacgagcgctcgatttccacttcgaaccgtaacttcgagggccgccaaggcaagggctcgcgcacgcatctggcgtcgccggccgtagccgccgccaccgccatccgcggcacaatctcgtctcccgccgatctctgagtcaatacacgtgagccccctctgacgaggggctgtcagtcgaagactgactgggggagagatccccgaaaggaaaattgttatggaaaaactcaccacactgaccggcgtgggcgtgccgctgcgccgctccaacgtcgataccgaccagatcattcccgctgtgttcttgaagcgcgtgaccaagtccggcttcgatgacgccctgttctacgcatggcgccgagacccgaacttcgtgctcaacaagccggaatacgccggtaagggccagattctggtcgccggccccgaattcggcatcggctcctcccgcgagcacgccgtgtgggcgctgcacgattacggtttccgcgtggtcatcgcgccgagcttcgccgacatcttctacggcaacaccgccaagaacggcgtgctggccgcgattatgccgcaggagtccgtcgaactcctgtggaagctactggaggaagagcctggtcgtgagatgactgtctcgctggagacccgcactgtcacttgcggcgacgtgaccctgccgttcgaggtcaacgattacgtgcgttggcgtctgatgaacggctacgacgatatcgatctgacgctgcagcacgaggacgacatcgccgcctacgaaaagatgcgcgccgaaaagttccccttcaagcccaagaccatccccgccaaacactgggccgaagaaagaatcgagtccgcccgcgagcctgaggacgcagactggacagggccgttggccgatcgcggcattatttagccgcgatcggcctgctgaaagcccggtgggctttcagcaggccctgtgccgagctgcgacagcagcgaggccagcattgagcctcgccgaaaggcgagtccataattgcaggcccagggccgttggctctgtatctgattgagattattgggtcgctcgcatcgcatcaaacaaaggtctcactggtgcccgcgccccacatccattgcgcggcgggcaggagttgcggcaatattcccttcagtgccaacaacgccatacggtcgttatccaccgcagccaccaacaccggcgtggcggcgctttcctcaacactcatgaactccgtcctagcgttcgaaatactgtgcctgaattcgtacacatttgtggacataatcacgattcatccagtaatgacggttaggttgagcatcatgaccatgaatggcatgaatccgtcgaacgattccgatacggctccggcgcaatcgctgtcagcgcaaccgttgccacctcgaccggcaccgcagtctgcggcacagtcacagacgccgatgccacagacgccacagtatgttcagcctgggccgagtatgcagccgcaatatgcgggtcagccggaggcatgggcacaaccgctacctccacaagatgtttcacggggtgttccacggattgtttcacaaggtgtttcacaacctgtgccgcaagccgcaatacctgctgtgcagcctgcacaatacgccgcgcagctcgtatacccgacatatcccgtccaacctacgtatcctgcccagccgatgtatcccacgcagccgacgtatccggcgcaatccgcctattccccatacccggcgcaacagtcggctccacagcccctcgctcatccgtactacgctcaaccagtgggctacgcgccacaaccctattccgctgcgccgcaaccattcgtgcaaacggctccggcaatgccagtcacaatgcccaacgcaatgcctgccacgatgcccgcagcaatgcccgtggtcatgccgatcgatcctcgccgtgtatggcgcacgtggcgtcgcaaggtggtcaatcgtgtaatgggactgactctcgcctatgaaggcatgatgctcttgggcgcaatggtcgccaccattatcgtcggcgtaataaccgcgagcgatttgtccggcgtgcagtgggatggcatcatcagcctgatatcggtgttcgtcgcgttcggatttctgctgctcatgcgccaccgtgacatcttcacctgcgaattctggcttggtggccagcatcgcgactcgtacggggagcccaatcagcttggccacatcagccaatatggcggcgggcgcatgcagcctctctgggcgttgatgttcatcgtgctgggcatgggcgtgcaaggcatcgttatgttggtgcaggtcgctttttccaggctgggcaccgatcttgcctctcccacgtcagacagcatcgccgaatccagcgtcaccgtaagcatgtggctgtacgttgggctggtcgctccgatttgcgaggaagtactgttccgcggcgtactgatgaaggagctcaagccgttgggcaagaacttcgccatcgtcacctcggcaatggtgttcggcctgttccatgacgacgtagtgcaaggcacattcgcgttcctctttggcctgattctgggattcgtggccatggaatactcgttggtttggtcgattgcactgcacatcttcaacaatgcgattctttccggcgccatcgatacccttgccggcaactatcttgatgacaacgcatatttgatattctcattgtcgctatctgtgatcggcgtgatcggatcgattatcatattcgtgatatacggcaaagagatgcgccaatatcaccgtacgaatcgtagtattccagacacgtactttggctgggcagctccgacgttcatcatctttgtggtagccaatgccgctttcgccattatttcgtttgtcggcgcgatgatgggttgagtgtgcgtgtgcgcatgcaggttggcttatcgttgaagcatgagtgattttgagccgttttacgacgtcagccgcagctacgaagacaactatgagcaagggccgttcggcgcgttcgccgaggcgctgaaggatggcaacggtgccgatgccgccggaaccaccagcgagggtgccttggccacctttttgggccagccggtcaacctgcctttcggcattcccgcaggcccgctgctcaacagccgtttcaccacggccgctttccacatgggtttcgatctggcgacctacaaaaccgtgcgttcgcgcgcctggggctgcaacccgttcccgaacgtgctcgccgtacaccccaagtcggcggacggttcactgacgccgggcagcgccgaactggacgaaggcgtgctggccgacaccaactatgaacagccgatttccatctccaacagcttcggtgtgccctcgcagagccctgacgtctggcagccggacatgcgcgccgccatcgaggccgccggtcccggtcaagtgctggtcccgagcttccaaggctcgcgtgtggagggcatgagcgaggaggaatacatcgccgaccatgccactaccgcccgcctggtcaaggagaccggtgccaagctcatggtgatgaacaccagctgccccaacgagggccacaaccgcctgctatgccacaatccgctgctcgtgggccgcatcaccgaggccgtgaagcaggagatcggcgacatcccgctgatggtcaagctcgcctacatccccagcgacgacgctctggagcttatggtgcgttccaccgtgggccacggcaccgtgcagggcttcagcaccatcaatacgatttccgccaaactggtcgatgccaatggcaatcaggccctgcccggcgcgggccgcgatcactcaggcgtgtgcggcaatgcgattcgtggcgccggcctcgacatggtcgcccgtctggccgcgattcgtgaaaagctcgggctcgatttcgcgatcaacggcgtcggcggcgtggtctcgcccgccgactaccaggcgtaccgtgacgccggcgcggactcggtgatgtccgccaccggcgcgatgtgggacgccgaactggcccacaagatcaaggccagccggtaaatcggctccaaaaacaagcaacagcctgtacgggccgtgattcccagacgattcccagacagtgcccatgttgcattgaaactgttgctgttatatgtaatcacggccgaacaagctgcataacttaacctctttcttcttctctcctttctctccccggcgcccatcacgccggggtttcttttttgcggtgggtacagccgtcttactcggccgccgccttcatggccacggcgccgacgtagtagaccggcttgtcgaagttcggctggaacaggaagtccacgttggcgagctggtcgatggtgaagccggcctgaatcgccatggaaatcacgtttgccgcgccggagatatcggccttggaacagaactggccgcccttgaccttgcgggtttccgggtcccaggtcagaatcgacgtgactggggtggtggtgagcatgaagtccgggcgataatcctcggtgagcgaggtctcgcggaccgtgagcccgcggcgttcggcaccggcgcgggtcaggccggaggcggcgagcgagagatcgtacagctgcacggcggacgtggcctgcgtgcccatgtacttcacggtcggcgtctcgatgttgcggcccaccagcaggccctggcgcaccgcgttggtggccagcggaatgtaatcgtgctggccggtggggttgtagaacacggtggcggagtcgccggcggcgtacacgcccggcgcggacgcctgcatgtagtcgtcgaccacgatcgcgccgttcggcagcatgtccaccttgcccttgagcaggtcggtgttcggcaggaagccgacggccagaatcgccatttcggccgtgtactcgcccttttcggtgaccacagtgacggtgtcgtcgtcattgtcgcggaactcgaccaccttctggccgagcgcgagcgtgacgccgtgctcctcgaacgcggccgccacctgatcggtgatggtcttatcgaaattattggccagcgggcgatcaaggccgtcgaccagcgtggtcttgacgccggtgacgctgaactgctcggcgatttccgcgccgatatagcccgacccgatcaccactgccgacttggcggttttcgccttttccttgatggcgatggcgtgatcccagttcttgcacagcagcacatgcgggctgtcgatgccggggatcggcgggatgaccgggcgcgagccggtggtcacgaccagtttgtcgaaagcgagggtctgttcggcggggtctccggcctcgtccagcgcgcggtaggtgagggttctggcgtcgaggtccacggacgtcacgtcggtgcgcatatgcatggtcgcgccggcttcggccagagcggcaggggaggagtagaacattttcttcgggtcggatacgtggccgcccacccacagggcgatgccgcaggagaggaaggacagcgtaccgttgcgctcgaaaacatggacggtccaatcggggtgctcggcgagaatcgaggtggtggcgaacgtgccggcgtgcgtgcagccgatgacggcgactgtggtcatgaatgctcctttgcttgtggacatggcgtctgatgccattgccctgaatcgtagcgtagaagtatggagaacgccgtggcggcaaatgtgaggaagatcacgttatcggtttgattcgacggggggtatgggatccgttgtgcacggtgatcaaagttcggctggggtgcatttcacggagtcggcacatggcttatggcaaactggacggtagcattttttgaatcttgattgattgaggagagtggcgtggctgagaatccggatgacgtgttgcatgtcgagggcggcaagcctttgaatggcacgatcaaggtgcgtggcgcgaagaacttcgtgagcaaggcgatggtcgccgcgttgctggcaccgggcaagtcggtgctgaagaacgtgccggagattcgtgacgtgcatgtggtgtccgatttgctacgtctgcacggcgtggacgtggatgtggacggtgcgaacggcattgtgaccatcgacgcctcgcgtgtgcagctggccgatgtggccgacgtggatacactgtccggttcgtcgcgcatcccgatcctgttttccggcccgctcgtgcaccgtttgggtgaagcgttcattcccgcgttgggcggctgcgcgattggcggacgtccgattgacttccatctggagacgctgcgcaagctcggcgccaccgtggataaggaacataaggacggcattcacatcactgctccgaatggcctgcatggcgcgaagattcacctgccgtacccgtccgtgggcgccaccgagcagactttgctggctgccgtgctggccgaaggcaagaccgaactgtcgggcgcggccaccgagcccgagatcatggatctggtgtgcgtgctgcagaagatgggtgcgattatttccgtggacgtggaccgcaccttccgcattgaaggcgtcaaggagctgcaaggctacacgcacacgtcgctgaccgaccgtatcgaggccgcgtcctgggcgtccgccgcgctcgccacgcacggtgacattttcgtcaagggtgccacccagccggagatgattacgttcctcaacgtgttccgcaaggtgggcggcaagttcgaagtgaccgataagggcattcgtttctggcatccgggcggggacttgaagcccgtggcgatcgagacggacgtgcatcccgggttcatgaccgactggcagcagccgctcgtggtggccctgacccaggccaacggcctgtcgatcgtgcacgagaccgtgtacgagaaccgtttcggcttcaccaagccgctggtcgagatgggtgccaccatccagttgtaccgcgagtgcctgggctcgctgccgtgccgtttccggcagcgcaactacaagcattccgccgtgatcttcggaccgaccccgctgaccggacgcgacatcgacgtgccggacctgcgtggtgggttcagccatctgatcgcggccttggccgcgtcaggcccctcggacgtgcacggcatcagcctgatcgaccgaggctacgccgacttccgcggcaaactcgaagcgttgggtgccgacttcgattaattcggccgttccgcggctcccctctttgaggggagccacaatttttacaacagcccgtccgcctcgagcgcggcggccatgcggtcgaagcattcctccagtagcgggtagggcatggcgaagttcatacgcacgcaaccgcgcccgacctcgccgcattcacggccgtccgtcaacgccacgttggccttcttgaagaaatagtcggccgggtcatcgatgcccagtggcgagaaatccagccacgcgatatacgtgccctgcggctccacatagcgcaccttggcgaatctcgtgcgcatctgctcgttgaccagcgcgatattgcgctcgatatatgccatcacgccctcgaaccatgccgcgccgccgtcataggccgcagtggtggctatggcaccgatggtggccgtctggtgctcggaccattccgcgttcctcatccatagttccagatcgtccggattggtgagaatcacctgcgcgcacttggtgccgggaatgttgaacgacttcgaggctgaagtggaggtgaaagcctgcatggccgtctgccggttgattgaggcgaatggcacatgcgtgtggccttggtagacgaacggcgcgtgaatctcatcggagaatatacgcacgtcgtacttggcggccagatcggacaatcgcagcatttcttcgcgcgtcaataccttgccgatcgggttgtgcgggttgcacagcacgaaggcatggcagccgttcgcgaacgcctgctcaatggcgtcgaaatcgaacagccattcatcattgcgcccgctgctctcgccggcgcccgcgcacagcatcggaatctcaaggacctccacgccatacagacgcggcacacttaggaacggcatataggccggagtcggtaccacgatggagttaccggcgcgcacgatctcgcgcaggaacacttcgaacgcctccagcacgtccggcaccgggcggatgcacgttggatccacctcccagccgtagcggcgctgccatgcggcgcacgagcgggcgacctccttcttccacgggtcgggaatgtagccgagcgcgccacgttcagtagcctcttcgatggcttcggccacgcacggtgccagaccgtaatccatctcggcgatgaatgcgccgatgcagccggggtaacgggtccatttatccgaaccgacctgctccagatcctcgatggtcgtcacgtcgatgtgattggcatcaaagcaagaggtgccggcggttgtgttgctcaaagtcgttgactggggaatgttgttcatgctcataacatgtcattgttcccggtgcagaagggctgctcaacggtctggctccccgaaatcgtgatggcgctcgcaagcttgcttatcgctgtgcgactacttggcactcaaatatttgagtgacgtgcgctcgagctcctcgagcaatgaaccaagcgcggggcgatggtcgccggcacgagtcacgatgccgacctcgcgcgccgcaaaatcgtcggcaatgggacaggccaccagatcgccctgcaagttgatatgcgtatcgagcgccggcaccagcgagacgcccataccaacctcgaccaggttctgcgtggcccagtaatcatccgtgcagtggcggatatccggcttgaatccggcacgggtggccagtttcaccaaatttgcgcggcaggtggggcagccggcgatccaatgctcgtctttggcggcggacagcggcacaggttcgccggtctcctcgaatcgtttggcgatgccgctggagcggcgcaccagcagtcgcatcggatcgtaacccagcgaatggaaggtcaggtcgtcgccgatgtgcaggaagttcgggatgctgctgtagcggaacacggcggcggtatcggccttgccttgggaaatcagaccgatcgcctccggcggctccatctgaatcaggctcagctcgatgtccgtgaacatactgagcttgaccacggtacgggccgcgatagtagagcagattgacggtggggccaccaaatgcaggtgatcaaaccgatgatgccgataatcctcgacttcacgggccgcccgctccagccgatcggcgatggcctcgccgtggcgggcgagcatcgaaccggtggcggtgagttccacgccatgcgaggtgcgttgcaccagagtcgaaccgcactgtgcctccagctttttgatctgctggctgatggccggctgcgaccaacccgtggccttggccgtggcggagaacgaaccatactgttcgatttgccacaacgtgaccaatgattgggggttgagcgtggccataggtacctctttcgtgccttttcgtgccttttcgtgcggtgattcaattatggccgggcggcaggatgtggcgtgcgcgccgatcgtcagtcctcgaactgcttggcgagcggaaccatcagcacggtgagcacggcgaacagggcggtggtgatgaacagcacgatggcgaccggcatttggtcgtaggcccagccgtacaccatctggccgagcggctgggcgcacatgctcacggccgcggccatggacatcactttgccggccattgcctcgggcgtactgagctggatggcgggcacggcgatgagattcgtgaagcaactggcgaccatcgtgccgcaggtgaatacgatcagcaccacgagtttggtccatgcgtcgaccggcagcaggaacacaataccctgtgggaccatggccagcgtaagcgtcgccatcagccccggcagccagcgcatcgtgagcttggcggcgaacaggccggcgatgaatgcgcccgccacgccggaaacaccgatcaggccgtcggcgatgccgtagacagtggcgtcgaagccgagcactgtacgaatcgtgtacgggaagccgacgccggaatagccgataagcacaaagttgagcgccgccgcgaacaacagcagtctgaacacgttcggccggtccttgatgaggaatcgcacgcctgccttgaggtcttcaagtggggtgggcagctcctcgtcgccgcgatccggggcactgaggcggatgaagcattcgagcgcggctgcgccggcgaagcttgcgatggcgatgatcatcatgagacggatgccgaacatcgcatacagcacgccgccgaggaagctcggcagcagactgcttagttgttggacctgattgatcacggccatgccttggcgcatggtggccgggccgtactgccggaacatctgggggagtgcggcctgcacggtcggggtttcgaaggcgccgagcacggcgagcagcacctgcatggtggcgatggctacgatatggaagcccgtggtggcgaagacgatggcgctcgccagcacgagcacggcggagatggcgtcgagcgccaccatgatggtgcggcggttgacgcgatcggccagcacgcctccgaacggggagagcaggatggtcggcacgatggagatggccagcaccgaggcgaagatggtggctgagccggtttcgtccagcacccacatcgacatcgcgaatcgcagcatcacattgccgaacagcgagatgccttgtccggcgaccagcagcacgaagtcgcgggacagcagcgggcgttgggtggcggtgccggcgatgtcattctcgggtttcactgtgctattcattctgagcctttctccggctcccctgcgaacgtcatcatgcccttcgcggcgaccgtgatgagctcgtcatcgaaaatcggcacgccgatcgcgtcgagcatggtggccaagcagcggatgcgatgctccatttcgggcagggtcaccgggtagaaatacggcatcagccaataattcggcagcaacgaaagcagctctgcggcctcgcgcggatactcggtggggatggagccatccttgacgcccgcctcgatcagcggcaggaagcgttcgggcagatgcttgctccatacctgcatattcgcggcgaacgaaaccggattgctcagcatcggcatggcggctcgcatgatctgcacgtggtcttgctcggtcatcgaatgccgccatagcacgcggaacttttcgagggcggtaaggtcagtgcgattcatgacggattcgttgaagtcgtcctgcatattgttgtctcggttggtgagctcttcgaggatggcttccttggatttgaagtgatggtagatcgcgcctttggagaggtcgccgagctcgtccacgatgttctggatggaggtgtgctcatagccctgggccatgaacagccgttgtgcggcgtcgaggatgcgggtgcgcgtcacctcggggtgagcgttacgtgccatggtggcctccctactgtgcttgatgttgcagatcactatagataccgaccgacggtatgtatagcggtttcggcgagcctccaacgattccggcgattgtcgcctaccctttttcgcttggtatctttcggctgtgtgcttgcccccgccagcaggggcagcatataggcataccagggcgcaagtgtcgccgttctcagtatccttagaagaatgagtcctgaagccttaagtgaactgatttccagcattgcccacaacctcgtcgccgccggccaggccggcgcgttgaccgacgagctgattccgcccgtcgacaagctcgccgtgatgcgcccgaaggaccgtgcgcatggcgactgggcctccaacatcgccatgcagctggccaagaaggccggcatgaagccgcgcgatctggccgagccgttcgccgccgcgctcgctgaagccgacggcattgccaaggtcgaggtggcaggccccggcttcatcaacatcacgcttgactccgcctcggccgccgccgtggtggacaccgtactcgccgccggtgccgtgaccgacgccgacaagcatctcaacaaggtcaacgaatacggccgcaacgaccatctgggcggccagaccctgaatctcgagttcgtctccgccaaccccaccggtccgattcacatcggcggcacccgttgggctgccgtcggcgatgccatggcccgcgtgctcgaggccaacggcgccaaggtggtgcgcgaatactacttcaacgaccacggcgagcagatcaaccgcttcgccaagtcgctggtcgccgcttgggccgaggccaataacttgggtgaggccggctaccagaccgaaaccccgtgcgacggctacaagggtgcctacatcaacgagatcgccgcccgtgttcaggccgaagccgagtccgacggcgtggacctgaccgcactggcccaccaggatcagggcctgaacgatgacggtgaaccgctcggcgaggccgataccgaagtgcgcgaggaattccgcaagcgcgccgtaccgatgatgttcgacgagattcagaagtccatgaaggacttccgcgtgaacttcgacgtctggttccatgaaaacagcctgtacgccgacggcaaggtcgacgccgccatcgaagagctcaagtcccgcggcgacatcttcgacaaggacggcgccacttggtttgaatccaccaagcacggcgacgacaaggaccgtgtgatcatcaagtccaatggtgagttcgcctacttcgccgccgacatcgcctactactgggacaagcgccatcgcgccgaaaacccggccgacgtggccatctacatgcttggcgccgaccaccacggctacatcggccgcatgatggccatgtgcgcggccttcggcgacgagcccggcaagaacatgcagattctcatcggccagctggtcaacgtgatgaaggacggcaagcccgtgcgcatgtccaagcgcgccggcaacgtcgtgaccatcgacgacctggtctccgtggtcggcgtggacgccgcccgctactcgctggcccgctccgactacaaccagaacttcgacatcgacctggccctgctcgcctcgcacaccaacgacaacccggtgtactacgtgcagtacgcgcacgcccgctccaagaacgtggaccgcaacgcagccgccgccggcatcagctacgagggtgccgacctggccctgctcgacaccgaggccgacggcgaagtgctcgccgccctcgcccaattcccgagcgtgctcgccactgcggccgacgaccgccagccgcacaaggtggcccgttacctcgaagaactggccgccacctatcacaagtggtacaacgtagagcgcgtggtgccgatggccctgaccgatccggaaacccgtggcgacgacgaggctcgcaaggccttggagatcgccaagaacccggagccggcccgtgccgccgcccgcctgaagctcaatgacgccgtccagcaggtcatcgccaacggcctcgacctcctcggcgtcaccgcccccgaaaagatgtgattatgcccatttctccaatttggccggccgctacggctgtgaatgccgacggtgccattacattccacggtcgtaccgccgaatcgctgcttgacgagttcggctcgccgctctatctcatcgacactgatgaagtagtcgcacgtgccaggcacttcgtgcgcgctgccgccgaagcattcaacacatccactacgcacgtgagctttgccggtaaggcgttcctgtccaaagaaatcgtgcgattggtcaccgaggccggcatgttcgtggacacctgcacgatgggcgagatgaaaatcgccctcgccgctggcgttcccggacgtcgtctggtactgcacggcaacaacaagtccgatgaggaaatcgcgctggccatcgaacagggcttcgccaaaatcgtgatcgacgagcccgacgagccggagcgcgtcgccgccatcgcccgcaagctcggcaaacgcgcccgtgtgatgctgcgcgtcaccgtcggtgtccacgccggcggccacgagtacatctccactgctcacgaggaccagaagttcggcgtgccgctgctggccgccggggccgacgccgccgtgctcgacgtgctgaacgacctcaaagacgtgacgcctgccgctgccaacgcgcgtatctctgcgacgcattccccggaaaatggcgcggaaaagaccgagaaatcagagcgcgagctgcactacgacgtcaagtacccgtacgacctgagccacgaggaagtctccgacacagacaaggcgctggccgccgcgatggaagccattgcggacggtccgtccatcgccgtgctcaagaccatcctcgccaaccaggacgtactcgaactggtcggagcccactcgcacatcggctccaacatccacgatgcggacgccttcattcacgcggccaagcgcatgatgctgctgcgcaagaccctgtgggccaccgacgcctacatcctgcccgaaatcgacctcggcggcggctactccgtggcctacaccgatggcgaagactcaatggacattgacgtggaactcactcgcttggcggatgcggtcaacagcaccaaccgtgcgctcggcatgcccgccccggccatcagcttcgagcccggccgctacatcgtggcgcccgccggcgtaaccctgtaccgcgtgggcaccatcaagcacgtgcacttgtccgatgccaaagacagtgacggcaacccgattgccgagcgcgtgtatgtgtctgtggatggcggcatgtccgacaacattcgcccggcactctacggtgccgactacaccgcgcgtctggcgaatcgcaccggttccgctgaaacgatgcttgcccgtgtgtgcggtatgcactgcgaatccggcgacatcgtggttcacgaggtgcagttgcccgccgatttgaagcgcggtgacattctcgccgtgccggttaccggcgcatacggccgcaccatggccagcaactacaaccaagcgctgattccggcggtggttgctgtcagcgagtccggtgcgcacgtcatgctccgccgccagaccgtagacgacctactcaacctcgacgtcagcgagtgatccacgtgcagaggcgagcgcctgacagtctgtaatgtgcggccaaatccgtcataatacgaaaaggaccgtcagctttgatgagtactttcggtctgctgtcggaaataatccgtaaaatagcggtgggatatagaaaactttttggaaggaccctgaattggctcgcaacaacgaaaccccgattcgcgtaggcctgcttggtgccggcaccgtcggctcccagaccgcccgcctgattgtcgagcagaaggacgaactgtccgctcgtatcggccgcccgatcgaactgaccggcgtcgcctgcctcgacccgaaggaaaccgagaagttcccgtggatcgaccagtccatcgtcaccaccgatactttgagcgtggccaccaactcggacatcgtcatcgagctcatcggcggcaccaccgtggcccgcaagttcgtgcttgccgccatcgaatccggtgcttccgtggtcaccgccaacaaggcgctgctggccaagtacggcccggagatctactccgccgccgaggccaagggcgtcgacatctacttcgaggccgctgtgggtggcgcgattccgttcctgcgcccgctgcgcgagtccctggtcggcgacaaggtgaccagcatgctcggcatcgtcaacggcaccaccaactacattctcgacgagatgaccaccaagggtctccagttcgacgacgtgctcaaggacgcccaggccaagggctacgccgaagccgacccgaccggcgacatcgaaggctacgatgctgccaacaaggccgccatcatggccaccctcggcttccacacctccgtgaccatcgacgacgtgtccgtcgaaggcatcaccaagatcaccgccgacgacatcgccgccgccaccgccgagcacaaggtcatcaagctgctcgccgtggtcgagaacggcgaggccggcgtctccgcccgcgtctacccggccctgatcgacgagaaccacccgctggcctccgtgcacggctccttcaacgccgtgttcgtcaaggccgaggccgccgacgacctcatgttctacggccgtggcgccggcggcgctccgaccgcctccgccgtcgtgggcgacgtggtgaccgaagcccgccacattgctgctggctgcaccggcccgtccatcccgctgtacaagaatctgccgaaggctccgattaccgcctccaaggctgcattcgccgtgcgcttcctgatccacgacaagccgggcgtgctggccgccatcgccgccgagttcgccaagaacggtgtctccatcaacggtgtgaaccaggatctgaagcccaccatgaccgaccccggctacgacggcgagatccagcagctgcgcatcgtgacccacctgaccgacgaggaaaccctgcgcaacaccgtcaaggccgtgcaggcgctcgacttcgtcaccggcgacccgtccatcctgcgcgtgctggactgacaccgtctaggctccctctgatgaggcggtcgaacggctgcccgtgagttgaaagctgaatacccaagctcccctgacaaggggagctcctttttaaggaacaaccatgaacccaatctgcaatagcgttcacgtgcgcgtgcccgccacgtccgccaacctcggctccggcttcgataccgtgggtctggcgctcgactaccatgacgagctcactttcacgctcaacgacgacccgaacgacggcattgcccacgtgatcatccacggcgagggtgccgacaccctcccatgcgacgaaacccacctcgtggtctccaccttccgccgtgcctgtgccacgttcggcctcggccgactcggcttcacgctggaagcgaccaacaacatccctcaggctcgtggcatgggctcttccgccgaggccattgtggccggcatcgccgccgccgcggccttcgcccagaccggtgacctcaaccgtccggccgtcttcgatatggccgcccagattgaaggacacccggacaatgtggccccggctgtgttcggtggcctgaccgtctcttgggacttcgaaaccgcagaaggcgtcggctcggtcgccgttcctggtggtgaaccgctgcacggcggattccacgccgtcaactacccggtggacccgtccatcaccgccgccgtgttcgtgcccgactatgagctgtccactgagaaggcccgtcaggcgctgcctagggaactgccatacaaggacgccgtctacaacgtgtctcgcgtgggtctgctgcccgctgcgatgaatcccgtggtgctggctcaggccgcccagcagggcaagtccggcgtcgccgctgccccggctcaggatgccgatacgtgcgcttgctctggcggaacccgtgaatcggcgttcgccgacgagcttgcggccgctcaggcccagtccaacgcgctgctgttcaccgccacgcaggacaaactgcaccagccgtatcgcggtgccctgatgccgccgtccaccgagctcattgcgctcttccgctccaagggctatgccgccgcagtctccggtgccggcccctgcgtgctcgtgctgcattacggcaacgcccgcgaagccatcgaccagatcgcatcggagcagcttgcttccggccattggcgtgtgcttcacctgcccatcaacaccgccggcgtcgaaatcgagcgtcgctaagtcgaggagaaggctcccgctggcgggagctggccgccgcaggcggtctgagggtggtccgccataccggcagagaccaccctcagtctcacttcgttcgacagctcccgccagcgggagcataaggacttaagtcatgcccattccactaattcttgcttccaagtccaagcctcgccgtgacgtgctgtattcggcgggtatctgccccacaattcgcgtctcgcatgtggatgagcctgctgcgctggaagcggccgcccgtgaagaaggcgtcaccgtcgacgatttgagcatcaagcagcgcgtgatgattctggccgcggccaaggccgaggccgttcatcgtgcgtatcgtgatgtggccgatactgccgccgctgcgaccggtgaccgcgtgatcgcctacccgctcaaggccaaggaaatcaaggattcggaacgcgaagctgccgtcgaagacttgcgtgaagccgccgctggcaagcccattgactattccaaggcggaaatcgccaccacgcgcgacttctccggcatcgatatgccgaccgtcaccgaacccatcgccaccgctattgccggacagccgggactgaccgaggcgacagtcggcccgctgattctcggctgtgattcgatgttcctcttgggcggcgaatgctacggcaagccgcacagcgaagccgtggccagcgaacgactgaagcgcatgagcggcgcgaccggcgaactgtggaccggccactgcctgatcgatttcgcgaccgggcgtaccgtgcgcggcgcaagccacgccaaagtccatttcggcgaattcaccgatgccgacgtcgaacggtacattgccactggcgagccgctggaagtcgccggatcgttcacgctggaaggcttcggtggtgcgttcatcgacagtattgagggcgatccgcacggcatcatcggcctcagcttgccgctggcccggcatctggccggcgaactgggcatcacgtggactgacctgtggaatgtcggccgtggtgaactggaaccggaaagcaaggcatcgggcaaccagcacgctggcattctgccgccggtcgaaaacgtacaccagcccggcgatggctgggtggactgcgcctgcggccgcaagcattggggcaccaacggtgcttccggtattctgctggctcgtcgcgacccggtgagtggcaaggtgacccacgtggtcatgcaacatcgcgccgcgtggagcgccgaaggcggcacgtggggtattcccggcggtgccaccgcggacggcgaatcgcccatcgagggcgcgctgcgcgaaagctatgaggaagccaacatcactcccgaagacatcgaggtagtcggctcctaccgcgaggaccacggcccgtgggcctacaccaccgtgtttgccttcgaaaagcccggccacaccgtcgagcccaaggcaaacgacgacgaaagcatggaaatctgctgggtcccgattgacgacgtgcccaaccgcaagctcctcaccgctatgaagaccgactggccccgcttcgccgcccgcctggacgagctggcctgtgctggacatcggtagtggtgttggctgggccaatgttttgccgatgagtttacttgggtaatgccgtgtgaaccgcgtgtggaccgggacggattctgctgtcccggttcgtcatttcgtctcttttgggacaaccgggacagatttcgctgtcccggttcgtcattttgcctctttttgggcaaccgggacagaatctcattcacctgacgccctatcgtgcgatggtcgtcgtcggggaatggcggaattccggggttttggatttgcatatatcgggtgttcatggaagggcctgtcccggttcgccaaaagaggccgaaatcccgaaccgggacagccgaatctgtcccggttcgtatgtcgatcgattgaccccgccaccgggacatcaaccgcgcatagacaggacgcttcaatgcctggcgggcatgaccatatcggatgacacacgtttcctcgtgcgtttcgccacgacctccgccccaagtcagtgcgaaaatggcatttttagcggtgtggtcagctgtcgcatgcggaaaatcctaaatcaaccgccgaagagacacatcgccgactcggcggaactcgctggtctgcgcgcaatgaggagtgttgtgtctgaatgcgattcagacaatggtcggcgtcaaatagcggtctccagccattaatcattggtgattgtggacattgagcggagtaaacattctagatgattcagggatatgccgaaaatcatatcgttcagagaatgaagtaccgcatctcggagtaactgactgtcgacgtgcatggtttgaaatctgatatccacgcccatcatgcctagcaaaattacgggaatggggttcggactatttcgcctcagccaaccgggagcttccgaatgctcaatgctgtatgcacttagtgtgtggaaaccagccaatcattgaccaatggcaggccgcagtcgaaaccagaaatatcctcgctcgcagtcaggtgccgaggctcagtgaagttggtcacgtccatatgggatcacgctccaacaattcattcagacgtaggcccataggttcgtttaatgctgcggtgaaatcattccacgctttactgttgagccgaatgatatgagcttcatggatgtcccgatctgcggcggcgagcagattcgataatgcccattgcaacgaagtcatgcctttggactcggccgcttggtcgattctggaacgttgctcttaggtgagtctcatttcaaaacgactgttcttgttattctctgtagtcatactcctgttgtacgacttttgtacggacacgattggtgtgtgcgggatgtcgattgcgatggccatgtgggctcctttgcttggtctgttcgatgtacaggcgcgcagcgcgctggttccctgaacataccgtgcgtgcgattcgcatatccagccgaaccggcctatgtggttccagctcccgaaccggtcttccactgttcctcgtcttctcgagcaatgaacatctgatatatggattgtcgcgtcgactgcgtatctctaatccttgcggatgaggagcgggccggtaatccagaaaggttcataccgcagcccgatggtcggctgggcgttcgctccgtacgctcgggagtatgaatacagcagcatcgcaattgcagcagcctcagccggcgccgggaccggcggctcagcctcagcagtctcagcaaccccaacagttccagcagccggcatcgcacacccagcagtgggccccggtcatcgaggcccatgacctggtcatggactacaccgccagcatggcccgcgcacaggccgggcacggcgtcaccggcgtgataccagccggcacgggagccggttatgcgtcggcgaatcccgctgcggccggaccgggtgccattcaggccggccagccatcccagccagcccagcccggcttcgccatgccgaccatgcacacgctcgccctgaaccacgtgaacttcacgctccgggagggcgagacggtagccgtgatgggcccgtccggctccggcaaatccactttgctgcacgcgctcgccggcatcattaagccgaccgccggcaccgtcatcttccgtggtgccgacctgagccgcatgagcgacgccgagcgcaccaaactgcgccgcaacgacttcggcttcgtcttccagtccggccagctgctgcccgaactgccggcggtcgaaaacatcgccctgccgatgatgcttgacggcatgccctaccgcaccgccaccgacacggcgatcctgtggctggaacgcatgggattgcgcgcgctcaccacgcaccggccgggggagatgagcggcggacagatgcagcgcatcgccatcgcccgtgcactcgccgtcaaacctgccgtggtcttcgccgacgagccgaccggcgcgctcgaccaagccaccggccgcgaggtcatgggcattctcatggccgccgcgcgggacaacggttccgccgtggtcgtcgtcacccacgaccccaacgtcgcttcgttctgcggccgtaccgtaatgatgcaggacggccgtctgcaccagacagacgccaaccccaactccgcccccgctggcgggggctgtcagccgcaggctgactgggggtggcccgagggcgctgaaccaccctcagcctcgctacgctcggcagctccagccggcgggagcgaaaccaccgcaggaggcgcgcgatgagcacgttcgccctctggcggctgtttcaccgccccggcttgcgcggcagcgccggccacacctcgatgctggcaatcatcgccttcgccgcagccaccaccatcttcctcaccgtgctcggcggcgtacacggtttcatctggcgggcttcggccgatcataccgtcgcctgcgcgttcgacttcggtgcctgccggcccgatacggtggccgcgtggaaacggcagatcagcgacccgacgagcctggcccaattctccaccgcctatgtggcgttggcggtattcgcctgcatgctgctcgtcgtgccgttcgtggcgctcgccggttctgccgcacgactggccgcatcccgccgcgacgcccgtctcgccgccctgcgtctggccggcgcgaccaccggtcaggtggtgcgtctcaccgcgcttgacgccgccggacaggcgctgatcggcgcgcttatcggcattgccggctattgcgccctgatgccggcagtcatgctgattcccttccaggagcagcggttcaccttcgaacagctatgggtcggcccgctggcgctggtaatcaccttggcgggcgtggccatcttggcgctgatatcgtcgctggtcaccttgcgccgcgtggcaatcaccccattgggtgtcacctcgcgcaccgccaccgcattgccctcaggcacccgtatggtgctgttcgtggtagtcgtggtggtggccatgatcgtcttcaagaacccggccatgctggctcaggccggccaggcggtgatgtacggcgtgatcatcggtttcatgctgctgtgcttcgcgctggtgaatcttatcggcacgtgggtgatcaccgctcgcgccaaggccaaggccaagcgccccaaggatgcggccacgatgattgccatgcgccgtattctcgacaaccctaagcgcgcctggcgcaatgtgtccggcattgcgttggccgtgtttatcgccggcatcacgtcgatctgcggattcttcggatcggccgccgtggtcgatgacgccaacgacccgttcaccgtgttcattcgcgacatcggcaccggcggcattctgacgctcgtgttcgccgctgtgcttgccgcggtcagctccggtgtgatgcaggccggcagcgtgtacgatcaggccggcgaatatcgcatgctggtgttggagggcactgatgtcaagaccttgaaccgtgcgcgattcatcgaggtactcaccccgctcaacatcgtggtgatcgtggccggcggctgttccatgctgcttatggcccctctgttcgccgcttcgatgaccgaaccggccacgctggccagcttcttcggcgggcttgtgttgtgctatgcgctggtttccatcggcgcgttcgcgtccaatcatgtggcggccagcttgaatctgaccgattatcgggctgatgactgagccgagctgcgcagcgaatcgttctcaataacaactgtgcgtactttcgtatacgcaaatcgaacgtagaaacgctgaaatcaccgcaaatatgcggatgagcaaatgttcgtttgtgcgatatctgtgcatttgcgcgcacggatactattgagaacgcttctctgcgcacccatcacgacagcagcgccgcgatgatcgcgataaacaccgggctggtcatggtgctcatcagaatgccgtcgcgcgcgaaggtgagacccacgttgtagcgggccgcgtagttgtatacgttctggccggtgggcagagcggcgagtaccacgcaggcgtacagctcggagccgcggaagcccatcacgaagtaggcgagcaggaacgcgataattggcatgatgatgttcttgaggaccgcgaccgtgaagatggccgggcgatcgcccttctgctgtagcggcttggtgccgtgcagggacatgccgaacgccatcaggatcattggcacagccgaatcgccgatcatgtcgatcgggtcgaaaatgaatttcggcactgggaaccagccgcttttagcggaaatcgcagagaccacaatgcccagcagcgagccgataagcagcggctgatgcagtggctgcttggcgatttccttgatggagaccttgcccttggtggtcacgtccagcactgtcaggcccaccggtgtgaagatggcctgctgcatgaccagaatcggtgccacaagagccggattgcccagaatgtaggtggcgattggcaggccgatgttattggaattgaggtacagcgaattcagggcaccgatggtggcgtccggggcattcaggtggaagaacatacggttgagcaccaaaaacaccacgcctaccagcacggcggagaagaacgccacgataatcgaggggtggaagatgtcgaaaatcggctccttggagagaatcgcgaacatcaggcacgggctcgatacgaagaaggagaaccggttgagcaccatctgagcggacggcccgccgattcgcattcgtgcggcaacatatcccaccgcgattacgatgccgataacgcagaagccttgcatggcgctgattagacctggcataatcctccctttcgccaccccagtgtggcacataaaaatgtattcggccgcaaaatctcatgtagtgagtgtgctgggcccgccgcccacgcggtacgctgttcacatgacgcttgaattgaaccgcaccgcatccactgccgagcagctgaacagcctgctcacccagatcatggagaacttctccgtgtccgaccacgagggccccctcaccgacgaggtcgaggccttccttaacgagcaagagcacctgaccgtccgccgtcacggcgacacagtggtggccagcaccgacttcggcaagccgagccgtgtgatcttggccgggcacctcgatactgtgccggtcatcgacaatttcccaccaaagtggctggagcccggcgattcgctgattcgcgaagaaatcgcccacgctcatcccgaagaccgcgtgctgtggggccgcggtgccaccgatatgaaggcctccgacgcggtgatgctctacctcgccgccacgctcgacggccgcacgccggaaaccaccccgaaagtcgacctcacctacgtcttctacgaccatgaggaagtcgtcgccgaaaagaatggcctacgcaaagtcgtcgaggcccatcccgattggatcaccggcgatttcgccatcatcggcgagcccaccaacagcggcatcgagggcggttgcaacggtacgattcgcttcgacgtcgtaacccacggcgtggccgcgcactccgcccgtgcatggatgggggagaacgccatccacaaggcggccgacattctgaaccgactcaacgcctacgagccggccaccgtgaacgtggacgggctcgattatcgcgagggcctcaacgccacgctgatctccggcggcaaaggcacgaacgtcattccggatgaatgccgcgtacacgtcaactaccgcttcgccccggacaagtcgttggccgaggccaaggctctgatgatgggcgcggacgccggtgccgaactcggcaatggcgagcatgtggctaccggcggcgtgttcgagggctacggcatcgaaatgaaggacgaaagcccctccgcgtgcccgggcctgaacgccccgctcgcccaggatctggtccggctggttaaggagcgcactggccgcgacccgctggccaagctcggctggaccgacgtggcacgcttctctcagctcggtatcccggccgtcaacctcggtgccggcgatccgctgctggctcacaagcacgacgagcaggtgcccgaatccgacctgaccgccatggccgcaatccttaccgactggctggtctgacacctctctagctcccctccctgaggggagctgtcaccgcgggggaggggagccgagagaacgtcagcctcgccgggccacgcccgcacaaaatatgtggcatactaaagggtggtggttctgcataaccatcagcgtgcgagatggcgtcgatccccttgcggctcttgagaatgagacaacgcaagcgccggtgtccgccacccgcaggacagacttgagacgaagttgcctttacgcggcgcgttttcgcgcggccacggtgagagcgtggtgtgagacaagcgtataggcctggaaataggcgtcgtgatgcagcgcgccgcgaggagcattgtgcccactgacaaccgtgaaggtttcgtcaacgacggaaccgataattcaaccgtatccaatgccgattcggctgcagccgtgaacgctgcgcctgccgccgcctcccagcccgccgaacctgtccgccgtcgtcgtggcggccggcgcgtggtccgcggcactggtgctgccggcgcttctttggaactgcaagtgcaggaacgcgccccgctgttcgaagcccccgcgcttcccgatgccggcactgcggccgattccaagtcagccgattccagcgattccgatgaatccagcgattcccaggattccgccgaacgcccaacccgccgccgtacgcgccgcgccgtttccacagtggtcgactcggatagcgaggatgatcgtcctcgtcgttcgcgccgcactgtcagtgccgatgatttcgatgacgatgacgccccacgttcccgccgccgttcggttgtggacgatgacgattacgacgaggaccgcccggttcgccgccgctctcgctcccgccagtccgacgatgatgactacgaggatcggccggttcgctcccgctctcgccgtgcgtctatggatatggatgatgatgacgaggaccgtccggttcgccgtcgttctcgccgtgcagttgcggatacgcacgaggacaccccggatgagcgcctgttcgacgcggtcgaatccctgccctctggccacgaggccgtgcgccgcggcaagccgatgacgtccctgctcttccaggaaccggtactgcccgccgctgtggatgcgcacgataccgctgacactcgtgatgacgatgttgacgacgacgaacgtccgtcgcgtcgctcccgccgctcgcgcagccacgatgatgacgacgcgcagccgcgcagccgccgccgtgacgaccgtgacgatcgtggccgcaatgccgccgaccgtgatgcgtctcgtgacgtttcccgcaacgctgccgccggtgacgccaatgccagcgccaacgcggaccatgatgatttcgattccgatgacgcttccgactctcgccgttcccgtcgctcccgccgcctgaacgcccaggagcgccgtgcagccgccgaagtcgagcagattgaggaagacctcgagctggacgatatcgcctactcgccgattgccgaagaggagggcgacgaagaatccgacgccacccgcacccgttcgcgccgtcgccgccgtcgcggctcacgcggcgaaaccggtgccaacggcgagcacgataccgccgagaacgatgccgaagatacgcgttcccgccgtcgtgacgatcgcgatgatcatgaccgtgatcgcgatgaggacgatgaggagcagaccgttactcgccgtcgccgtcgccgtcgtggcggcaagaacggcgagggcaccgacgaccagagtcagaacagcgaacagccgctggtccgacgctcccgcaagcagcagtacatcgacgagatcactgatgtggagggctccactcgtctcgaggccaagaagcagcgccgccgtgacaaccgccgtgagcgcagccgccagagccagctcatggaacaggatttcctcgcacgccgcgagaacgtggaccgcctgatggtggtgcgtgagaaggaacatcacacccagatttccgtggtggaagacaatgttctggtcgaacattacgtctccgacattcaggaagtacagaccgtcggcaacatctaccttggccgcgtgcagaacgtgctgcccagcatggaggccgcatttgtggacatcggccaggcccgcaacggcgtgctctacgccggcgaggtcaactgggatgccgctcgtctcgaaggccagccgcgccgcatcgagctggcgttcaagtccggcgacccggtgctcgtgcaggtcactaaggacccgatcggccacaagggtgcccgcctgacctctcaggtcacgctcgccggccgcttcctggtgctcgtgccatccggcggcatgaccggcgtgagccgcaagctttcggagcgcgaacgcagccgtctgaagaacatcgtctccaagatcgccccgaaagacatgggcgtgatcatccgtaccgcagccgagggcgcatccgaagacgccatcgtcaaggatctcgaatcactggtccgccagtgggagcgcatcaacgccaagcgcgaggaattctggcacggcaagcgcccgaagctcctgcagggcgagcccgacgtggccatccgcgtggtgcgcgacatcttcaacgacgacttcagcaagctcatcgtggaaggtgacaaggtctacgaccgtatcgaggaataccttgacaccatggcccccgacttgaaggacaagctggagaagtgggacccggccgagcatgaaggcaaggacgtgttcgacaagtggtccatcgactcccagctgcgtaagggcatggagcgtcaggtctacctgccgtccggcggctcgattgtcatcgatcgcaccgaagccatgaccaccattgacgtgaacaccggccgctttatcggcaagggcaagtccttggaagagacggtgacgcgttgcaacctggaggcgtctgaagagatcgcccgccagctgcgcctgcgcgatatcggtggcatggtgatgatcgactatgtggatatggtcatgcccgccaaccgcgatctggtgctgcgccgcttggtcgaatgcttggcacgcgaccgcaccaagcatcaggtggccgaagtcacctcgcttggtttggtgcagatgacccgcaagcgcatcggccagggtctggtcgaggcgttctccgaggaatgcccgacctgcaagggccgtggtttcatcctgcatgatcagccgaccgtttcggccgactacgacgatccctacgcgcttcgcggtggcgacccgttcgtcaaaaccaacaagcacggtcgcggcaccgctcccgctcccgaaccggctggttccagcgccgacgtcaaagccaaactggctcagattgccgccgctgccgtcgctgccaacaacacggcggaagagtaagcggaagagtaacaggtgtgtcgtgcttgacacgcgggcaaaaatcatttgatttagtccgcatggtggtgtagattcgaaattcggtgtctgaccgcaagctcggtgcgtgttaggcaaggtagctttccaaaacataaaaggaacgataatgtacgcgattgtgaaggccggtggccatcaggaaaaggtcgaggttggcgacgtcatcctcgtgaaccgtctcgacgctaagaagggcgataccgtggaattcccggtctccctcgttgtcgatggtgacaaggtcacccttgccgccgccgatctggccaaggtgtccgtcaaggctgaggttgtgaacgacgaagccaagggcccgaagattagcatccagaagtacaagaacaagactggtgttgctcgccgtaagggtcatcgccagaagctgactatcgtcaagatcacggcgattgcctgagttatagaaaggaccatgaatcatggcacataagaagggtgcgtccagctctcgcaacggtcgcgattctaacccgcaatacctcggcgtgaagaagttcggcggcgaagccgtcgtggccggcaacatcatcgttcgccagcgtggcaccaacttccacccgggccacaacgtcggcatgggcaaggatcacacgctgttcgccctcaccgatggttccgtgaagttcggtgtgcgtcgcgaccgcaaggttgtcgacgtcatcgcctgagcgatatagcgtcaagcttttttcaagccgcgcccgtaaggacgcggcttttttgtaaggtaatcaatatgagtgattttgtggatcgagtaactgtccatgtcaagggcggcgatgggggcaacggttcggccggcatccgtcgtgagaaatacaagccgttggccggcccgaacggcggcaatggcggcgacggtggttccgtggtgttcgtggccgaccgtaacgccaccagcctgctcgactatcgtttcatgccgcatcgtgtcgccggcagcggcaccatgggtttgggcgacaataaggacggctccaagggcgaggacctgattctgcccgtgccctgcggcaccgtcgtctttgaggcgcgcggcgaacagggcaaagccaagcatcccggcgcacagctcgccgacctgcgccacgagggcgaccgctgcgtcgtcgcccaaggcggtgccggcggcctcggcaacatcgccctggctaacaagacccgccgcgcccccggcttcgccctgctcggcgaactcggtgaagagcgcgacgtgattttggaattgaagtccatcgccgacgtggcgttggtcggtttcccctcggccggaaagtcgtccctgattgcggcgatgagttccgccaagccgaagatcgccgactacccgttcaccacgctggtgccgaatctcggcgtcgttatcgccggcgactctcgatacaccatcgccgacgtgccgggcctgattccgggcgcctccgaaggcaagggcctgggactggagttcctgcgccacatcgaacgtaccgaaatcatcgcccatgtgatcgattgcgccacgcttgaaccggaccgcgacccgatgtccgactaccacgcgctggaaaacgagttggcgctctacgccgacaagctcgagctgccgttgggtgccatcccgattcccgaacgcccgcgcatcgtgattctgaacaagatcgatgtgcccgaggccaaggaattggctgagttcgtgcgtccggagttcgagaaactcgggctgaaggtctttgagatctccactgcctcgcacgagggtctaaaggagctcaacttcgcgttgtctgcgctggtgcacgagatgcgtgaggaagtggccaaccgcgagcaggccgaagaggaggctcgcgtggtcatcaagccattggagaccaagggccgccgtccgcgtcgtgctgacgagggcggcagtgcgcttgagttcacggtcgagcgccgcgaactcggcaatggcgaagtgttcttcgaggtgcgtggcgtcaagccggagcgctgggtcatgcagaccaacttcgacaacgacgaggccgtgggctacctggctgaccgcttggccaagctgggcgtggaggacgagctgcgccgcaagggtgctcaccccggcgacgaagtgcgcatcggtcgtggtgcccgtatggtcgaattcgattgggatccgaccatctccgctggtgccgaaatgctcgacggctccaacctcggtgcccgaggcaaggatctgcgtctcgaagagctggacccgcgcacgcaccgccgctccaacgccgaacgtcgtgcccaataccacgagatgatggacgcccgtgccgccgtgcgcgacgcgatgatggccgaacgcaaggccggccactgggccgacccgaccgttgacgacgatcgccatgacgaaaccagcctgttcggccacggtgagtccagcgaagatggtgaaaccgaggaataaatgagcactccgagtcaggccgaggtgcggcgcatgatcgccgcagccggaaccattgtcgtgaaagtcggctccagctcgctgacccagccgagcggtcacctcgacccggacaagctcgacgcgttggccgcggccttggctcaggtccgattgatgggcggacgtgtggtgctggtctcgtccggtgctatcgccgccggtttcgggcctctgggctttgactcgcggccggtggacgtggccactcagcaggccaccgcagccgtcggccaagggctactgatggcccgctacgagactgcgttcggtcgattcggtattcgcgtcggccagattctgatcactgccgaagatacgattcgtgccacccagtaccgcaatgtggaacgcacgctggaccgtctgcttgacctcggcgtggtgccgatcatcaacgaaaacgattcgttggcctcgaacgagattcgcttcggcgacaacgatcgactctccgcgttggtggccaacctggtgcgggccgaagccttggtgctactgaccgacgtggacgcgctgtacactgcgccgccctcgcagcccggctcccgccgtgtggaatatgtgcccaacgtgattgatgcgctgggcgacatccaagtctccggctccggctccaaggtcggcaccggcggcatggtcaccaaactcgaggccgcgcgcgtggcggccgtctcgggcatccccacggtactcacctgcgcctcgaacgcgggccctgcgatgatgggcgatccggtgggcaccgtgttcgcaccggttaaggcccgcggctcctcacgccgtctgtggatcggcttcgccgccgacccgcgcggcacgattgtggtcgatgcgggtgccggccaggcgattcgcggcgggcgtgcctcgctgctggcggccggcgcgctcgaagtacatggcgatttttccgccggcgatccggtctggatcgatgccgaaagcggtgaacacctggcccgaggcctcgccggcttcgattccgaagaaattccgcagatgctcgggcgtaacaccgcccaactcaagcgtttcctcggcccccagtacgcccacccactggttcatcgcgacaatctcgtgctcgtgtgactgatggaatctgtcacacgacagattccatcaccatagtgcggctctggcgatttttcgtgctgtaggtttagcatgggagccatgactatggcgcaatggcagactctttccgaccgtatcaacactgtggcaccgagcgctacgctcgccgtcgattccaaggccaaggccatgaaggccgccggacttgacgttgtcggcttcggcgcaggtgaaccgaatttcccgacccccgcaaacgtggtcaaggctgcggcagatgcctgccttgacccgaagaattacaagtacacgcctacgccgggcctgcccgagctgcgcgaagcgattgcggctaagatgctgcgcgattccggctatgaggtcaatgccgatcaggtcgtggtgaccaacggcggcaagcaggccgtgtatgaatccttccagatcttgctcaacgatggcgatgaggtcatcattcccgctccgtactggaccagctaccccgaggctgtgaagcttgccggtggtgtgccggtcgaagtattcgccggtgccgacgtgaacttcgagccctcgcttgaggcgctggaagcggcccgtaccgagcatacgaaggcaatcatcgtcaactccccgaacaacccgaccggagccgtctggaagccggaaaccgtggaagcgatcggtcgttgggccgtcgagcaccacatttgggttatctccgacgagatctacgagcacctgaactatgacgatgcgcacaccacctacatcggtgccgccgtgccggaatgccgcgggcagttgctggtgctgaacggcgtggccaagacctatgcgatgccgggctggcgtgtcggctggatggtcgctccgcttgaggtggccaaggccgccaccaagctgcaggggcatatgacctccaatgtggccaacatctcccagcgtgctgctttggctgctgtggccggcccgctggatgaggtgcacgagatgcgtaaggccttcgacgcgcgccgccgtgcgattgtgaccgccttgaacgatatcgagggcgtcaactgcccgactccgaccggcgcgttctacgcttttgcggacatcgccgctttgcttggcaagccgctgggtcccaagggcacagtgtccgatacgtccgctgactttgccgctgcactgttggatgaggcccacgtggccgccgtccccggcgaggcctttggtgctcccggttacctgcgtttctcctacgcactggccgacgaagacctagccgaaggcatgcgtcgattcaaggaatgggctaactgagaagagtcgcgtgctacgcgcgcgacacgcgatttgcgataatccaccggagccgttactataacgacttggcggtttcgccgtggcgaagcgttctctacggaacgcacgccgaggtggattttcacctagggaagtggcgcaattggtagcgcaacggtctccaaaaccgtaggttgtgggttcgagtcccgccttccctgccaagtttctaataatcaagcagctgacgcgaggtacggaatggctaagacgagcaagagtgaaaaggcagtcaagccgaatgtcttcatgcgtatcggtctgttcatcaagcagatcatcgacgagcttcgcaaggtcgtgacccctaccgccaaggaactgttcttctggtctctggccgtattcatcttcgtgctgctgctgatggccctcgtgactggcatggacttcggtctaagcaaggccacgctgtgggtgttcggctgatccgcacaacctaaggtgaataacaacgcatgagtgatgaactgaatctcgagaacctcgacgccgtcccggctgaggagcctgttgtcgaggcttccgaagctgctgccgatgaggcagctgccccggtcgaaccggtcgctgacctttccgcagaatctgacgcatccgtcgacaatgcagatgttgagtccgacgctccggcggcgactgaatccgctcccgttgcttccactcagaccgagaccgtttctctggatgaggacgaggaagaagtcaacgaatccgagcaggccgaggagaccgatgccggtcagcaggccgttgacgaattctccaagtccctgcgttcccttgatggcaagtggtacgtgctgcacacctactccggctacgagaagcgcgtgaagaccaacatcgagtcccgcgtcgcctccttcggcatggaagaccagatcttccaggtcgaggtgccgatggaagaagtcgagaagcacaccgagaagggcaagaaggtcatcacccgcgtgcgtgttcctggctacgtgctgattcgtatgtggccggatgagaacgcccgccgtatcgttcgtgagaccgaaggcgtgaccggcttcgttggcccgaccaaggatccggcgccgctctcccgcaaggaagtcgtggcgatgatggctccgatgattgcttccgaggcactcaaggccgccggcgacaagcccgccgccgccaagaagcgcaaggtcgaagtctcctacgccgttggcgatcaggtcaccgtcaccgatgggcctttcgccaccatggccgccgttgtttccgacgtggagcccaccactcagaagctcaccgtgctcgtgtccatcttcggccgtgatacgccggtggagcttggcttccaccaggttcagaagctagattaactcccaaactttgcagagcccgaccatcgtggtcgggctttttgtgttgtccgggtggatttgcataataggaaagcttgtgtctggagaggagactcgctagcacagcacagcaatataagttgcgggaggagaccgaccacaggccgattgcctgcagcatgcacggataaataatgagtcaagaccgagcatgatggcagacagccgaacctgaggacggcgaccattcgaaccgcgttatagaaagaagaaccataatatggctcccaagaagaaagtctcggcgctgatcaagctccagatccaggctggcaaggccaacccggccccgccgctgggcccggctctgggttcgcatggcgtgaacatcatggacttctgcaaggcatacaatgcccagacgcaggacaagatgggtcaggtcatccctgtcgagatcaccgtttacgaagatcgttccttcaccttcgtgctcaagaccccgccggctgcagctctgctgaagaaggccgctggcgttgagaagggcaccgagaacccgctgacccacaaggtcggctctgtcaccaaggcgcaggttcgcgaaatcgccgagatcaagatggaagatctgtctgctcgcgatatcgaggccggcatgaagatcatcgagggcaccgctcgctcgatgggcatcacggttacggactgataaggagaaggacagatggtaaagcgttccaagaagtaccgcgaagccgctgagcgcgtcgatcgcaacaacctctacaccgccaacgaggccatcgctctgctcaagagcatgccctcctacaacttcgaccagaccgtcgaggctgtgttccgtctgagcgttgacccgcgtaaggccgaccagctcgtgcgtggtaccgtcaacctgcctcacggcactggtaagaccgccaaggtcctcgtgttcgcccgtggcccgaaggccaccgaggctaccgaggctggcgccgacatcgtcggtgatgacgacctgatcgcaaaggttcagggcggcttcctcgacttcgacgccgtggttgctactccggacatgatgggcaaggtcggccgtctgggccgtgtgctcggtccgcgtggcctgatgccgaaccccaagaccggcaccgtgaccatggatgtcaccaaggctgtcaaggacatcaagggcggcaagatcgagttccgtgtcgacaagaacggcaacctgagcttcctcatcggcaagatgagcttcgatgagtccgctctggacgagaacttcaaggctgtggccgacgaagtcaagcgtctgaagccgtccaccgtgaagggccgttacctgaccaaggcaaccatcacctccacgatgaacccgggcgttccggttgacccgaacaccctggcctgaggctagcgagcttcaatagctactgaaagggacttcccgtaaagggaagtccctttttgcatatgcgatgaccggttgcgagaaggtgaacctggatggtcacgcaatcgaattcttgcaacacgccggtgaacacatgaatttgttacgcatcggcaatgcaaaacggattattctgatatcagaacagcgcaaataggctgtttgcgacacgccgagggaaccgtgtgattgcaacgattccttgggtttttgcgtgccttgatttgcgtgaatccggacatgcgtgtaagttattcacctgttgccgctcagcgcggcgggttccttcctctggttggtttcccgtctggctg

SEQ ID NO: 904 - DNA, 41491 bp, Unknown
  gut microbiota DNA sequence
cccgtctgggctggaagcgggacgattggccggtgcctcacgacctgcgtcacaccgccgcctcgttggccgtgcatgcgggcgcgaacgtcaaggccctgcagaggatgctgggccacaagaacgcgagcatgacgctggacgtgtacgcggatctgttcgacagcgaccttatggacgtggcccgtctgctcgatgccgccgtgcaggtggagacgggcgtggaagaatgtgggcaaaatgtgggcaaaaacgttttgaagcccgcctgaaacccttgaaaacgttggaatcacgccattcctgcgaatggtggtttcttcgcaagttgaaggacgcgctgagctgagagtggatgcgttcttggctcccctcagagaggggagccaagtctgttacttcagcatggagcggcacatggagcggtattcgttgacgtagccgccgccgaagaagacacagtggccggcgatggggtagagctgccagagcgtgatacgctcctgccatccggccttcaacggatgcacggactggtagccctcggtgatttcgctcagatagctcatgccgaacaggtgcagcatagccagatcctcctcgcgatgaccgccatgtgccgccgggtcgatgagcacagcctcgggctgcccggaatcggcggtccacatcacattgccgctccacagatcaccgtggatgcgcgccggcttgtcggacgcggctcggcccatcagatccggcaacgcttcaatcacgcgctcggtcagttcgacatcgcgcttatccagctcgccacgcctcacaccaaggttgaccatcgggcgcagacgtccatcagcgaaatagctgatcgggtcggtccactcgccggtatccattttcaccgggtcctgcaatggtccgaaatagcatgtgccgttatatccgtcaggcgcagacccgaaatacttggcacccgcatcatgcatacgggccagagccgcgccaaaagctcgtgccgcctgaggcgtgggggacgcgctacccacacgttcgatatccagataatccttgccccagccgtatacctgcaccacgcgcgggccgccttgcgcatgagccgctcccaaccattcgagtcctcgaccctcgcattcgaagaatccttccggtgcgaatgccctgcttttgcgatacgtggccataatgctcccttcgtcgcttacgtactatatccactttcattgtagaagccgtggatgttaccgattcttagtgttgttctacacccccttgggtagggtgttcatcgtcataacacatcaaatacttagaaatcacgaggggttatgaattttttccaagcgatcattctcggcatcgttcaggcgctgaccgaatatctcccagtgtcctccagcgcgcatatccgtattttcggcgatttgatgctgggctctgatcccggtgcggcgtttaccgccatcatccaaatcggcaccgaacttgcggtgattctgtatttccgtcacgacatcatcaatatccttactcactggttcagctgcctgttcggcaagaacggcaaggattggaaggcccgcatgggccgcggcgacaattacgccacactcggctggaacattatcgtcggctcgattccgattatcatcctcggcttcactctgcagaacgtcatcgaaacctcgttgcgcaacctgtggattacggtaaccgtgctgttggtattcggcattctgctgtggatggtggatgccaaggctcgccagaacaaaaccatgaatgatatgacgtatcgtgacgcgttcctcttcggtttgggccagtccatggcgctgattcctggtgtgtcccgctccggcggcaccatcaccgtcggtcgcgcactgggctacacgcgtgaggccgctgtacgtctgagcttcctgatggccatccccgcggtgttcggctcaggtttgctcgaagccatcaaggccgtgaagaactacaaaaccgatgcgatgttccccggctgggggccgaccctcgtagccatggtcatcagcttcgtactcggctacatcgtgatcatcggattcctgaagttcgtatcgaacttctcctataaggccttcgccatctaccgcatcggtttggctgtggtcgtcgccttgctgctgattgtgggcgtgctgccggccatcgatccctccgtggcggctgcggcataagacgggtcgataggcgactcaatattaatggtgctcccgccggcgggagctgtcagcgaagctgactgagggtggtcactggaatatgccagcagaaccaccctcagtctcgctacgcgagccagctcccgacattttgtgcgacgtgcacatggtgcactgctatgaacagcccacagggctgttcatccagcgggagcacaccatatatgggctaattgcccatctggcgcagaaacgcttctgcttctttgaccagttgttcagcctggggcgctcccaatgaagcctccgcctcggctttctgctgcaagtcgtagtcgtgctccaaatgctccacataatcatgaagctggtcattgcaacgaaccagtatcgatgcctgcgccttccactgttcggctttctgcttcagatctgccgtatcgaagatgaagccgatatacttgcccaacgcatccagcaatcgtatagtgccggcagaacattcgtcgctgcccaaatattgggggatggacacccacatcgaggaatgagcaaaaccttgttgtgcggcagctacatccagaacagtaggaatgcccaccgggccgttatacgaccggtctccttcgcattgacagtctccgtcgctgacggcgatgggcaacggacgggtatgcgggcaatcggagaacatcgaacctaacgtaatgatccgattgacatccagctcatcggcaatggccagactctggctacagtattccttccaccgatagttcggttcgggggcgatctgcgcatagatacgcttgcctgcgtccaacgtgatgtcgtagaacgtggtctgtggccagataagattggtgcgacccgaaacatggcacagcataggacgggcaacctgatagtcatagaaatcatcacatctaatatgacgaatctcgcgggactcatatcgcttgaccagatggcgcaccgcgttcgtcgccgcctgacaggcatcattccatccctcgaatgcggcgatcaatactgcgccggtgtccttcgctgcttcactcatacctctagagtaactggaattcattgcccgaagcgcacgctttagccataagcgagagtatgcaattacaggcgacacgccgcagctggacgaactacacgcatgtgagtatagtaaacactcgtgcttcggtagggagacctcgccaaggaaacacacgcggacatagcttagttggtaaagcgcaaccttgccaaggttgagaccgcgggttcgagtcccgttgtccgctctaggtccgtgagttgacagaccttacggtgggttagccaagcggttaggcagcggcctgcaaagccgtatagacgagttcgactctcgtacccacctctcagaccagcgaagcaattcaatgggatgaaatatgacccgggcggttggcgcagtggtagcgcacttccctgacacggaaggggtcacaagttcgaatcttgtatcgcccacgaaagtcgaagcaattcgactggatataactgaagaaccgagtattcgggcgattggcgcagcggctagcgcacttcgttcacaccgaaggggtcgtaggttcgattcctacatcgcccactggattccgcttctcacggcggattcctttgcggacatagcttagttggtaaagcgcaaccttgccaaggttgagaccgcgggttcgagtcccgttgtccgctccacaacgaaacctcgcttcggcgaggttttttcgtattggttcagatgctggtggtatttgtcgcacgcccaacctatcgtgtcctacgttgattaaccagtccaggcctgcacattagtaccgtgggccccgatagcaaaggacaaatcatggcgcaagctaccatctccataaccgtcaacggcgaagcgaaggaggtggaagcaaccaccaccggcgtagaactgttcgcggaagacaagaacatcatcgcggtcaagatcaacggcgagaaccgtgacctgtacacgccgctgaacgatggcgataccgtcgaccccatcgccctcgactccgaagacggcctcgcaatcatgcgtcactcggccacccacgtcatggcccaggccgtgcaggaagtctacccgaacgccaagctcggcgtcggccccgtcatcaaggacggcttctactacgacttccaggtcgaccagcccttcaccccgaacgacctcaaggacatcgagaagcgcatgcagcgcatcatcaagtcctcccagtccttccgccgtcgttccgtgaccgaggaagaggctctgaaggaagaggccgaccagccctttaagatcgaactgatcgaagacaaggaagcacacctcgacccggccgccgccaccgagatctccgaaaaggagctcagcttctacgacaacgtagaccgtgatggcaatgtggtttggaaggacctgtgccgcggcccgcacctgccgaacacccgctacatcaaggccttcaagatcgagcgttccgccgccgcctactggcgtggttccgagaagaacccgaccatgcagcgcgtctacggcaccgcatgggccaccaaggaagacctcaaggcctaccagacccgcctggaagaagccgccaagcgcgatcaccgcaagctcggcgccgagatggacctgttctccttcccggatgaaattggccccggcctggccgtgttccacccgaagggtgccgccgtgatcaacgctatggaggactactcccgtgagatgcaccgcaagcaccactacagcttcgtgcagaccccgcacatcaccaagggcggcctgtacgagacctccggccacctgcactggtacaaggacggcatgtacccgcccatgcacctcgacgaggagaaggacgcggacggcaacatcaccaagccgggcgccgactactacctcaagccgatgaactgcccgatgcacaacctcatcttcaagtcgcgtcagcgctcctaccgtgagctgccgctgcgcctcttcgagttcggcaccgtgtaccgctacgagaagtccggcgaggtccacggcctgacccgcgtgcgcggcctcacccaggacgactcccacatctactgcacccgcgagcagatgaaggacgagctcaccagcctgctcaccttcgtgctgaacctgctcaaggactttggcctgaccgacttctacctcgagctgtccaccaaggacccgaacaagtacgtcggctccgacgagatctgggaggaggccaccaacacgctcgccgaggtcgccaaggaatccaacctcgagctcgtcgacgatccgtgcggcgccgccttctacggcccgaagatctctgtgcaggcccgcgacgccatcggccgcacctggcaggtctcgaccatccagctcgacttcaacctgccggagcgcttccagctcgagtacatcgcgaaggacggcacccaccagcgcccggtgatgattcaccgcgccctgttcggctccatcgaacgcttcttcgccgtgctgctcgagcactacgcaggtgccttcccggcgtggctggcccccgtgcaggtgctcggcgtgccggttgccgacgagtttgccccgcatctggccggcttcgtcaagtcccttgaagatgagatggtccgttgcgagatcgactactccgacgatcgcttcggcaagaagattcgcaacgcctccaagtccaaggtgccgttcatcctcatcgtcggtgaggaagacatgaacaacaacgcggtcagcttccgcttccgcgacggcagccagctcaacggtgtgccggtggacactgctcgcgagcagattctcaccgtcatcaagaagcgcgtccaggtgaactccgccgacgacttcaacgctgctgtggctgagtgatgtgaatggtactggctcccctctctgaggggagccaagaaagggcgcgaaaatgactgacgtgcgtgtcgataatccggcggactttccgcctcaggaggacacggtcgaacgactgtggactccgcagcgcatgacctatgtgctgcgcaacagcgaggatcgcccaaccaagcccaagacgaaggaatgcccgttctgcgccggacccaaaaaatccgacgaagacggcctcatcgcctggcgtggcacgcacgtgttcgccatcatgaacctctacccatacaatgtcgggcatctcatgatttgcccgtaccgtcacgtcggattcatcaccgaactcgacgatgccgaactgttcgaattcgagaaggccaccaccctcgccatgaaggtgatggagaccgtctcccgtccggacggatacaacatcggcatcaatcagggcgaggtcgcgggtgccggagtcgccgcgcacctgcaccagcatgtggtgccgcgttggaatggcgatgcgaacttcatgcccatcgtcgcccagacgcgtaccatgccgattctgctgtccgaccagcgagacgcctatgcccaggcattcgaacagctggccccgcagtatcatttgccgcttgcctgaccgggtgcggcacccgcgcaaccggttttatcggtacgcgcaataagacaatcatcggaaacattacgggtatgtctgattaacggcctacaatcgtttcgtttgacatcatccgtttcaataattgctaggagcattatgtcaggtcattccaagtgggcgaccaccaagcacaagaaggccgccatcgacgccaagcgcggcaagctcttcgccaagctcatcaagaacatcgaaatcgccgcccgcctcggcggcggcgacccggacggcaacccgtccctgtacgatgccatctacaaggccaagaaggcctccatgccggccgacaacatcgctcgcgccgtcaagcgtggtgccggtgctgaagatggtgccgccaactacgaagacatcgtctacgagggctacgctcctgccggcgttggcctcatcatcgaatgcctgaccgacaaccgcaaccgtgcggccgccgaagtccgttccaccctgaccaagggcaacggctctctggccacctccggctccgtgtccttcaacttcgagcgcaagggccagattgtggtgccgtccgagggcgtggacttcgacaagctgttcgaaaccgccgccgaagccggtgccgaggacgttaccgatgacggtgaagtgttcaccgttgtgaccggtccgtccgacctgttcaccgtgcgcaaggctctgcaggaagccggcttcgactacgattccgccgaccaggtcatgcagccgaagaacgaggtcgagttgagccttgaggatgcccgcaaggtgtccaagctcatcgacaacctcgatgacctcgacgatgtgcagaacatctactccaactggaccgcttccgacgaggtgatggcccagctcgacgaggagtaatcctcgtgattatccttggcgtcgaccccgggctcacacgttgcggggtcggcgtgatcgaagccggcgagcaccgccggctttcgtttattcacgtggacgtggtgcggtcctcaccggatatcacccaggatctgcgtctactggccatctacaacggcctgtccgagaaaatggaccgattcgcgccggacgcggtatctatcgagcgtgtgttcgcccaatccaaccgcaacaccgtactcggtaccgcacaggccgccggcctcgccatgctcgccgccgcgcaacgcaatattcccgtggcgttgcatacgcctaccgaagccaagctggctatcaccggtaacgggcaggcgcagaagattcaggtggagcgtatggtgacacgtattttgaacctcaccaaaatgccgactcccgccgatgccgccgatgccttggctttggccatttgccatgcgctgcgcccggcaggcgcattgcagggcggcgaacgcgaacaacatctgaccgccgcgcaacgccagtgggctgaggccgcacagaactccacgcgccgccgcatcaaccacgaccgaggcatgtagtatactttcgaacagttgttcgagtcttgaatcctggagcgctgaaggagtacctgtatgatcggcatgctgaccgggcgggttgaatcggtcgaaaccgataccgcattgattgatgttgggggagtgggctacgaagtgcgcatgtccgccaccgacctgagccgtctgcacgccgggcaagacacccgcgtcttcacctatatgaacctctctcaggatgccattaccctgcatggattcctggatcgggacgccaagaaaaccttcctacaactcatcaaggtctccggcattgggcctaaagtggcccaatcgttactctccacactgacgccgagtcagttggcccacgccatcgccgacaacgacgccaccgcgctggccaaggctccggggctgggtaagaagggcgcacagaagatcatcctcgagcttaagggctctattgatttgagtcagatcgagggtgcttccgctcaggcggcaacatccaagtctccggtggataccggtacggaacaggttgtcgaaggactgatttcgcttggctggcgtcagcaggacgcccagcaggccgttgccgaggcttgcgccgaaaacgacattcccacgccgcttgccaccgacgatgtgccgcgtgtgctacgtctggctttggcgctgatggataggggccgctgatgagcgagacaacggattacggagcctccaacaccggtgccaacgaagagtcgctgcgcatggtctcctcccagccgatcggcaacgagccggtcagcgacgaggagctgcgcccccatgttctcggaggctttatcggacagccacggctcaaggcccagctgcaactgttcctggacgcggcccgcaaacgcgatgtgccaccggaccatattctgctcgccggccctcctggcttgggcaaaaccacgttggccatgatcgttgccaatgagcttgaagtgccgattcgcgtgacttccggccctgcggttcagcatgccggtgatcttgcttcgattctgagctccctcgacgtcggcgaagtgctgttcatcgacgagatccatcgtctgccgcgcgccgccgaagagctgctgtatatcgcgatggaggacttccgcgtcgatgtgatggtcggcaaaggcccgggcgcaagctccatcccgctgaccctgccgcgattcaccgtcatcggtgctaccacgcgcgaaggtatgctgccaagcccgttgcgcgcacgcttcggcttcaccgcacatctcgacttctatccgcacgaggagctggaaaagctcatcgaacgttcggccaacgtactgggcgtaaaccttgatacgggttccgctcatgagcttgcgttgcgttcgcgcggcacgccgcgtatcgccaaccgattgctacgccgtgtacgcgactgggccatcgtccacgacctgattgtggtgcggccggacgacgtcaaggaggcgctggccctgtaccagatcgactccgaaggcctcgaccggctggacatcgccgtgctcaatgccatcgtgcgcaacttcaacggtggacccgtgggcctgaacaatctggcggccatggtgggcgaggaatcggaaaccgtggaaaccgtgtgcgagccgtatctcgtgcgcgaaggttttatgattcgcacgcccaaaggccgtgtggctaccgagaaggcatggcagcatttggggattacgcccaaagatgatgtcagcaagctcttctagactttctcctgtttgcacactcggcagcgtttcgtcaatgtcgctcgtttgaaggagttgtttcgtggaacagtacattatgctcatcgtgatcgtcgtcgtgttcggcggcatgatgtggtggcagtccaagaaggccaagcagcaacagcaggagaagcaggacttccgtcgcaatctgcagcccggcaccgaggtcatcaccatcggccaggtgatcggcaaggtcgtcgaagtcgacgagcagtatgaggagatcgtcatcgactccgaaggctccaagctgcgtttcggcttcaatgccatcgcccgtgagtacatccgcccggcctatgtgtccgatgatgaggtcgacgagaacggcaacccgctgcccgacgaagacaccgaggctccggctaacgatgaggctggtcaggttccgatcgaggcgtccgtcgtgtccgaggaagacaccgctgacgagaccggtgacgacaacgaaaccaagacgaagtaagctgttcgattcggtagcaccatccgcgtatcgcatcgcaaaggcataaaaggggcgagcactatggcacagtcggacatcaccatcgacgcattgagcaaggtagggcaacaggacgccgaatatctggtgtccttggtgcgttccgtaccggggtttcccaaggaaggcatcatcttccgtgatttcatgccagtgctcgccgaccccaagggcttgaagattctgctcaaagcacttgaagaggccctgccggtgtccccgagcgaattcgactccattgccggtctcgaatcgcgcgggttcctgttcggcccggccatggccgcccatttgggcaagggtttcatcgccgtgcgtaaggccggcaagttgccgcctgaaaccatcggtgaatcctatgacctcgaatacggcacggccagtgtcgaaatcgaaaccgacgccgtacaggcagggaagcgagtgctcatcgtcgatgacctcatcgccacgggcggcaccgccaaagccgccaccgaccttatcgaaaaggccggtggcaccgtggtgggcttcagtttcgtgatgcggctcgatggcctcgacggtctggataagctcgacggcaagcccagcagctcgctgatcgcgatgccggcctgagatttcgtctcacccaacgtacagtcagttttcaaggtccggcatgtactgtgtacagttacatgccggaccaattacatagtcagggaaggatcgatggatctttacgaataccaggcgcgtcagctgctcgaggaacaggacattcccaccccggacgccatctttgcccagaactcccatgaagtcgctgaagcggcggacaaaatcggctatccctgcgtaatcaaggcgcaggtcaagatcggtcatcgtggtcaggccggcggcgtcaagatcgcccataaccgcgacgaggcgattcttgaatccgagtccatcctgccgatgaccatccacggacacaaggtttccggcgtgcttgtggccgaagccaagaacatcctgcacgaatactacgtgtccatctccgtggaccgcacctcgcgcgacttcgacgtgctggccaccgccaacggcggcaccgaagtcgaggaaatcgccaaggaacatccggaggccgtcaagcgcctgcacatcgatgcgctcggtgacttcgacctggccgctgccaccgaaatggcacagagcatcggcttctaccacgcggacgtcgatcaggccgcacagattctgctcaagatgtggcgctgcttcaaagacaacgacgccacgctcgtggaaatcaatccgctcgccaagatcggcgacccggatgacgaatccaccaagcagctgagcgccttggacgccaagatctccttggatgacaacgcctccttccgccatgacggctgggcgcgtttcgtggatcccatcgttcccgaccccttcgaacagcgcgcccgcgaacacggcctgcactacgtgcacctgcacggcgaggtcggtgtgatcggcaacggtgcaggactcgtcatgagttccctggatgccgtctccggcgctggcgaggaacagggcaccaacatcaagcccgccaacttcctggacatcggcggcggcgcctccgcagccgtcatggccgaaagcctggagatcgtactgtccgaccctcaggtcgaatccgtgttcatcaatgtctatggcggcatcacctcctgcgtggaagtcgccaacggcatcctcgaagcggtcgccaagctcggcggttccaagccgatcgttgtgcgcttcgatggcaacgccgccgccgagggtctgcatatcctcgcctccgccaataacccgaatatccatgtgtccgaaaccatggaaggcgcggcagccaaggccgcgcagctcgccggtgaggcgacccagtccaaggaggttcgctgatgctgttcatcgaagacggcgctcccgttatcgtccagggcatgaccggccatcagggcatgacccatacggctcgcatgctcaaggccggcaccaatatcgtcggcggcgtgaacccgcgcaaggccggcacatccgtcaccttccccggtgccaagaacggtgccgacgcggacatccccgtgttcgccacctgcggcgaagcacgtgaagccaccggcgccaaggccagcgtggtgttcgtgccgccgaagttcgccaagtccgccgtggtcgaagccgtcgaagccggcatcgaactcatcgtggtcatcactgaaggcattccggtggccgattccgcatacttcgtcgaactggcgctcaagaagggcgtgcgcatcatcggaccgaactgccctggtctcatcacgctcggcaaccccggcgtcaatctgggcatcatccccgacggcatcgtcggccgcggcccgctcggactggtctccaaatccggcaccctcacctaccagctcatgggcgaattgtccgatatcggcttcaccgcatgtctcggcgccggcggcgacccgatcgtcggcacgacgctgctggaagccctgcaggcattcgaagccgaccccgacaccaaggctgtcatgatgatcggcgaaatcggcggcttcgccgaacaggacgccgccgcatgggccaaggagcacatgaccaagccggttgtcgcctacatcgccggtttcaccgcccccgaaggcaagcagatgggccacgccggcgccatcgtctccggaggcaagggcaccgcccaggacaagaagaacgcgctcgaggcggcgggcatccccgtgggcaagaccccgggccaggccgccgaaatcatgcgtgacgtactcgccaaggccaacatcgactgatcggttccaaccaatcgtgatgaaagccgtgattcgccaatgggtgcggggagccatagtcgccctcgcatccatggccatctatgccgttgcattaggctgctatacagcgctgatgttattggtcgtctctatggaagagggcggcgacaatctcaccgtcggcacaacctcgctgacacaggccgttgtgcttctgagtgagggatcgggctttagaaccgattcgttcaccctcaccattacgccattgctgttgaccatactgctgatatggctgatcaatgcactcatcatgcgaatcaaagcatacgggccgcatgcgtatgttgccggattgattgtttggctcgggttgaacgaggcattccggcaatccgtgcacctaggtcttgtcgatgaccagtggctggtgttgctgaaagcagccatcgtattctcgatcggtttcctatgcgcagccgtaccggaatcagccaaaatgcgagcattcagggactggactcgcaagcaggtgccggcggacatacgccactgcctgaaaatcggcgtcgccttggccgtcgcgatactgagcatatatctggcaattggattgattaccgtcatcgtatggtcggtacgcaaccatgccgctgtcgtatcgttgttcgaattgtccgggatggaaaccggttcacgaattctcaccaccgtcgccatgctgatctggctacccaacgtcatgctctgggctgtttcctggctcttcggcggcggattcgccatcggtgatttggccagtttcacattatggctcggccaatccaaagagcttcctgcaattccggtattcggtattctgcccgaaccggtcagcagtgaactatggcgtaccgttgccttgaacgcgcctctcgccatcgctgcgctcgtgggcctgctggctgtattcctaccgcaaggattcgcctgcagaccgttgaatgtacggaatacgtccacccgcggcccggtactggtttcgctgatctactccgccggggcattctgcctgagcgcgatgctgatctcactggcatccacattgctgttcgctctgtccaatggatcgcttggcgatcatcgtcttgctcacataggcgtcgacgtcatggcctccaccagagtcgtcggtcattcgaccgcactgggacttaccgcggcatggctgctcgcgctgattggcatagcgctcgtttttccgatagtctggttggttgagagaatcaaggattcccgcaccaccgccacgacctcgaagaccgccaccgttcatcaggcgcggttcctagcgtcacaaccacaagaatccaaggaggaacaggatgacaaacacgaaccgaccgatacgtcgagcactggtctcggtctttcataaggaaggcatcgaagtactcgcggaagcgttcgtgaaggccggcaccgaagttgtttccactggttcgaccgccaagaagcttgccgaactgggcgtcaaggtaaccgaggtgtccgatgtcaccggattccccgaatgcctcgacggccgcgtcaagacgctgcacccgtacattcacgccggcattctggctgatatgaccaaccccgagcacgccaagcagctcgaggagttcggcatcaagccgttcgacctggtggtcgtcaacctgtacccgttcgccgacaccgtgcgctccggcgccaacgaggccgataccatcgagaagatcgacatcggcggtccctccatggtgcgcggcgcggccaagaaccacgccaccgtggccatcgtcaccgacccggccgattatgcactggtcgcctcccgcgtggccgacggcaccggcttctccttggacgagcgcaagtggcttgccgccaaggccttcgcgcacaccgccgcctatgacgccaccatcaacgagtggaccgccaagcactggcccaagccggcctctctggacgccgtcgaggtggacaaggacgatcagggcactgaagtcgattccgccaagttcccggcccagttcacccgcacctgggatcgtgcgcacaccctgcgctacggcgagaactcccaccagcaggccgccctctacatcgacccgctcaaccagaccggtttcgcccacgccgagcagctcggcggcaagccgatgagctacaacaactacgtggacgcggccgccgcctggcgcaccgtatgggatatggctcccgccattgccgtggccgtagtcaagcacaacaatccgtgcggtctggccatcggcgcgaccgcggccgaggcccacaagaaggctcacgcctgcgacccgatgagcgcctacggcggtgtgatcgcctgcaactccaaggtcacccttgagatggccgaaagcgtgcgcccgattttcaccgaagtcatcgtcgcccccgactatgagccggccgcgctcgaactgctgcagaccaagaagaagaacctgcgcatcctcgaggtggccgagccgccgaagggtcacgaggccatccgccagatcgatggcggcctgcttgtgcaggacactgatctgatcaacgccgtcggcgacgatccggacgcctggaagctcgtggccggcgaggccgccgacgctgacacgctgaaggacctcgtgttcgcatggcgtgcaatccgctgcgtgaagtccaacgccatcctgctggcccacgaccaggccacggttggcatcggcatgggccaagtcaaccgcgtggactcctgccatttggccgtcgagcgcgccaacacgctggccgatggtgccgatcgcgccaccggtgcggtcgcggcatccgatgcgttcttcccgttcgccgatggtgcccaggtgcttatcgacgcgggcgtcaaggccatcgtgcagcctggcggctccatccgcgatgaggaggtcatcgaagcggccaagaaggccggcgtgaccatgtacctcaccggcacccgccacttcttccactgatcgggactctctgaggggagcagctcagccaaaacgcacaaaggtgggattccgcctgacccgtcaacgggtccaagcggaatcccacctttgctattcgcctgctattgtggtcacgtaaccgttcgacagaaggaatcgcaacatgcacaaccatccctatgtatccgaagcacatgagggcaagccatggtttgaatggtgcgtactcggcgtcgtcgccgtcatcacactgctggttgctttcggatatacgatggccgccacggtcatacttgccgtgacggccatcatcaccgggcttgttcgcctgattcttcaggacagaagcccatggaaagtgcgctcagtggcgttcgactccttcatcggcatcgccttgggaatcggcctgctgattacctacttcagcttctttggactcttcggcaacatctttttccgctgaatcgccatcagacgaggcggcctgatcgaagaattcgccatcgtcgagcgtgtccgcgtttgcatcggcatccgtctgcggaagatcggcggcagccggcactttgggagtggtcatcatctgcgcgatgatcatgaccaacgccaccacagcggcggccaagaccgggctaatccagaatacccacagctgctgcagcggattttgcgtaagaccctcattcatcgcggccagtgcgatgccggtggaacgggcgggattgagaccggcaccggtaaccgggtagctgatggcggtggccagaccataggcaagacccatggcaatgacatgacggtccgaggactcgtcgtgatcacccagagaagacatggcggtggcaacgacaatcagagaggcaacgacctcgacgacaatcgccagcgtaatcgagaacgtaatgccatactgggtcagcagcgagtaagacacggagccgttttcgaaaccgttaacggccggagtcagccacactttggcagctacctgctcggatgtgggcagcagcttgaccacggcgaagccggcggcgatggcaccgatgacctgagcgatcacatagaggatgccatccaggattttcgtcttggaaaccagcacagaggctacggtgatggccggattcagctggccaccggacacgcgggagaagatggcggtgactgcggcatatgccaagccggtagccaacgcgaagaacacgatattgatgccatacacggccgaaccccatgtggagaaggcgtaaatggcaaagcacagcaggaagctgccggccaattcggcgcacacgcgcagagccagcggctgttgcttggtttcttccatgattgttcattccttttcatctgttggaaaacgggcgaacccgcacaaacggttgccagtctagcagcagtcctacgttgcggtatgatatataggttggaattggctgggattccagtccgccaactctgaagtatgtatacaaatcgacagtctctgcgatgacagaatctgtccggccacgttgggagaacgatgccaaacgcatattcccgcgctgcgaaagcgcaagacgattccaattccattcgactccagaagctgcttgcccaagcgggattcggttcccgccgcaagtgcgaggacatgatcaccgaaggccgtgtcgaggtcgacggtgaactggtcaccgagctcggaactcgcgttgaccctcataagcagcaggtgcgcgtagacggttcgcgcgtacgcgtcaatccgaaccacgtcactctggcgctgaacaagccccgcaaggtgctctccgccatggacgacccgaagggccgctacacgctgcgcgacatcgtgggcgacaagtacgagcgcatcttccacatgggccgtctcgactacgattccgagggtcttatcctcatgacgaacgacggcgagctctcgcagcacgtcatgcaccccaagtacgaggtcgagaagacctacgtcgctacgctggaaggcaagatctccggcaccgtgtgccgtcgactcgtgaccaccggcgtgcagctcgacgacggctggatcaagctcgaccactgcgcgatcatcgactcctcgcgtgaccacacgatggtcaaggtcgtgctgcactccggcaagaaccgcatcgtgcgacgtatcttcggctcaatcggcttcccggtcaagcgcttggtgcgcacccagatcggcccgatcaagctcggtgatttgaagcccggttcctaccgcgtgctgtcccagacggaagtccgttcgctgtccaaggaggttggtctgtgattcgcgttgccatcgacggccccgccggcgtgggcaagtcgtccacgtccaaggcgctggccaagtatttcggatacgcttaccttgacacgggcgcgatgtatcgtgcctgcgcttggtggtgtctgaagcaggacatcgatctggacgccgaaaccgtggatgagcgtgtcatcaccgaagcggtgggcgagttcttcaccggcgaccatttcgatatctccgtggacccggacaacccccgcgtattcgccgacgacgaggacatctccgaggccattcgttcctccgaagtctccagccatgtctccaaggtgtcgaacgtcatcccggtgcgcaacgtgctcatcgccgcccagcgcgcctacatcgcccgcgaagcgtcggccgactccttctccgggggtttgggcatcgtggccgagggccgcgatatcaccaccgtggtgtccccggacgccgaggtgcgcgtgctgctgaccgcccgtgaggaggtccgtcaggcccgtcgcaccggccaagccgtcaagggcgtgggtgctgaggatgtggctgcgcgcgacaaggccgattccaaggtcaccagcttcctgaccgccgccgatggcgttactaccatcgacaattccgatttggacttcgcccacacgctcgatctgctcatcggtctggtcgaggacgccatcgagaaccaggagtacgagcagtatgccgccaatctcgaaggctatgagctggacgaaggcgatgaggatctgatttccggccgcggtttcacggaaggcgcgcgcaaggccggccccaagccggtgggtgtgctggctgttgtaggccgtccgaacgtgggcaaatcatccctggtcaaccgtatcctcggccgccgtgccgccgttgtggaagacacgccgggcgttacgcgagaccgtgtgagctatgacgcggaatgggccggcaccgactttaagctggtggacacgggcggctgggaagccgacgtggaaggcattgaatccgccatcgcctcacaggcacaggttgccgtgaccttggccgatgctgtggtattcgttgtcgatggtcaagtgggcatgaccaccaccgatgagcgcatcgtcaagatgctgcgtgccgccggcaagccggtcgtgctggccgtcaacaagatcgacgaccaggccagcgaataccttgccgccgaattctggaagctcggcctcggcgaaccatactcgatttccgccatgcacggcaggggagtgggcgacctgctggacgtcgcgctcgacaagctcaagcaggccgagaagacttccggctacctcacgccttccggcctgcgccgcgtggctctggtgggccgcccgaacgtgggcaagtcgtctctgctcaatcagctggcgcgcgaagaacgtgccgtggtcaacgatttggccggcactacgcgcgaccccgtcgacgaaatcgtcaacatcgatggcgaggactggctgttcatcgacacggccggcatcaagcgacgccagcacaagctcacaggcgcggaatattattcctctctgcgcacgcaggccgccatcgagcgctgtgaattggcgctgatcctgtttgatgcttcgcagccggtatccgatcaggatttgaaggtcatgtccacagccgtggatgcgggccgtgcgatcgtgctcgtgttcaataagtgggatgcgatggacgagttcgacaagcagcgtctcgaacgcctgtggaacaccgaattcgaccgtgtgatgtgggccgagcgtgtgaatctgtccgccaagaccggctggcacaccaaccgtctgacgcgagccatggataaggccttggaatcctgggatcagcgtattcctacaggcaagctcaacgccttcctcggcaaaattcaggccgcccacccgcacccgttgcgtggtggcaagcagccgcgaatcctcttcgccacgcaggcatccacgcgcccgccgcgtttcgtgatcttcgccaccggcttcctcgagcacggctaccgccgctacatcgagcgttccctgcgcgaggaattcggcttcgaaggcacgccgattcagatctccgtgaacatccgcgagaagaagaagcggaagtgacacgcgcgtaatttgccagatttcaaatatctggtaaattatctactcggtgcttttgcaccatcgggccgtagcgcagtttggtagcgcacttgactgggggtcaaggggtcgcgggttcaaatcccgccggcccgaccgattagccccggaattctgccacttttgagtggttgtcttccggggcttttccgttttcagacaacatgacgacggacttacctttgtaagccattcgtaatggattaaacacggacttcatcttggcgtgttattggaattatcaccgacaattcaccgcctccgcacccccgtcgtatgcgtttgccccaaacaggggctagactggttcctattgatttgacgaaagggacccgaattgacagaaataaacgataaggcccaactggatatcgccgccgccggcgacaccgacgccgttacctcggacacccccgaagaaaccgtaaacacccccgaagtggatgagactttcgagctttcggccaccaagatgcgagagcatggcatgagcgaaaccgccatcaaccagttccgccatttgtatgacgtgtggcgccatgaagaagcctccagctggattcgtgaggacgacatcgagccgcttggccacgtgcccagcttccacgacgtctatgagaccattaaccacgacaaggccgcggacgccttcgccaagaccgcattcctcaagctcaatggcggtctgggcacctccatgggattagacaaggccaagtcgctgttgccggtgcgtaggcacaaggccaagcagatgcgcttcatcgacatcatcatcggtcaggtgcttaccgctcgcacacgcctgaacgtcgaactgccgctgacgttcatgaactccttccacacttcggcggacacgatgaaggtgctcaagcatcatcgcaagttcagccagcatgacgtgccgatggaaatcatccagcatcaggagcccaagctcgtggccgccaccggcgaacctgtgagctgccctgcgaacccggagctggaatggtgcccgcccggccacggcgacctgttctccaccatctgggaatctggtctgcttgacgtattggaggagcgcggcttcaagtatctgttcatctccaattccgacaatctcggtgcacgcccctcgcgtacgttggcccagcacttcgaaaacacaggtgccccgtttatggctgaagtggccatccgcaccaaggccgatcgcaagggcggccatattgtacgagacaaggccactggtcgcctaatactgcgtgaaatgagccaggtccatccggacgataaggaagcggcccaagacatcaccaagcatccttacttcaacaccaactcaatctgggttcgcatcgacgctttgaaagacaagctcgccgaatgcgatggtgtgttgccgttgccggtgattcgtaacaaaaagaccgtgaatcccacggacccggattccgaacaggtgattcagctggaaaccgccatgggcgccgcaatcggtctgttcaacggttctatctgcgtccaagtggatcgtatgcgcttccttccggtgaaaaccaccaatgatttgttcattatgcgttccgatcgattccacctgacggacacgtatgagatggaagacggcaattacatcttcccgaacgtcgaacttgatccgcgatactacaagaacatccacgatttcgacgaacggttcccctacgccgtgccatctttggccgcagccaactcggtttccattcagggcgactggacattcggacgtgacgtcatgatgttcgccgacgccaaactggaagataaaggcgagccaagctatgtgccgaacggcgaatacgttggtccgcaaggcatcgaaccggacgattgggtgtgatttacaacacggtcgaacgataaaaaagatattatttttgtgaaatggcgctcaagtgcggaaaaagcctctaagatagagtgagtgtggggaaactcatacgcacttataacgaaacagtaactatacgtgaggactaatggcagagggcacaagcggacgtcggcgtttttccgacaaatggggcaagcacgagctggacgtactggctgtgttgtcatccgcgttcccgcaatggctcacatcccgccaaattgcgcagcgcgtcaaggcttacgccgactcgtatggagagctggcagatcaggccgccaaggccgcgttcgccaagcagttccagcgtgatcgcgccaagctcgccgctatgggcatcgccatcgaatcacggcagcctgagtattcgtccaagtcggaaggccaggacttcgcgtcctaccgtctgcagttgggcgacgaaccgcgcgtccgtctgatgttcgagccggaagatatgccggtgcttgccgccgccaactatctggctcgttcgatgtcgatttcctccgagccggatcagtcccagctcgcccaacatgcgtcgcgcaccacgccgcgtgtgccgcagacccctattcccggtctcggtttggattcgattgcgcctggcttgggcacgcagcccattccggactcgctggtcaaggttatcgattcgcgtcgctttgccgccaccgttgatgtggacggcgaacacctgaacgtggcctacaccgattccgacgatttggccatgtttgtgctggagcatccgggtgccacgattgtcagcccgcaggaggctgtggacgcctatcatcgccgcctgcacgccgccagccgattcactttggccgacgaatccgccagccctgtaagcgcctcggtggtttccccgtcgattagtcgcgatgttcgtgagccgggtgatcccgagtcgatcaaggcccagaacaagaagaacggatccgctttccaaacgggcagcgaggtggatcgtcgcctgcgtctgatgctgttcctctccgctcacttgggtgaggaattctcgatgagcgagctggccgagcgctttatcggcaaaccaaagaacgacgacgagctcaagaaattcgtcaacatcattcataaggacatcaacaccctgaccaccgtttccgacgatggtgagatggctggcagccagttcttcgatatcgactggccgctgctggatgccgagggtattgtttccgccaccaattcgttgggccttgaacgtcttgccggcatttcgccgcaatacctcagcatgctcaccgcctcggtcagctacttggcgcattcgccgttactgccggacaagcagcgtgggcaggccgaatccctgtatgagcgtttgcgccgccatgtcagcccgggccagaccccgtggctgagcctgaccggctatgagctggagccccgaagcttctccatcgtcaagcgcgcgatcaacaccgattcgctgttggacatggagtactccgacggtaccggtagtacccgtcgcaagctggtggcccccgccaagattttcatcgatgaaggcgtgtattatgccgccgtctacacggatgtcggttccgccgcccccaaggacaagaaggcctacgtctccaaagacaagaccatcgacaaggcgaacggcaagccgcgcatctggcaggtgctgcgcttggcccgtatcgaaaaggcggaactggtcaagcccaccaagcagatcaacattccgaacatgccggtgagcgaattgcgcaagtggagtttcgacaacggcactgacgcggtgttcatcaccgatcagcgcgatctggcattcatcaagacattgccgggcgctaccgtcgaacaatgcggtgccggtgaaaaggtgcatctgaccgtttcctccgactcttggttcgtggccttctgcatcgcacacgcgcgtcatatcacggcggtcgccccggaaacgttgcgcaccatgatcgtggcacgcgccgaacgcgaactgagcgtcagcgagaacaagtaaggagcctttcatgccttggtggatatggctgattctggccctgttcatgctggccatgattgttgccggactcatctatgcagcccttcatgggctccgtgccctgaaagacatgtccgacatcggtggccaactcggtgaacgtgtggccgcgatgggggagcccggcacttctgccgacaccagcgagccgcctctgttcactcagccgctcagcgtggcacagaatcgttatgccgaggcccatgcggacgtgattcgcagcaaggccgccaagcgcgagcgccgcacccaggcatgggcccgctggaagcgattcaacaactaacggaaagcagcaatggcacgtcaccaacaccataagggcaatgccgattcccagacgctgagcccttcgcagcggtacgcatcattccagaaagtccaacgccatcgggcgtccgcagcagcgcgattcgccgaatccctgcctttcgaactggacgatttccagaccgaagccaatgacgcgctcgaagccggcagcaacgtactggtcgcggccccaaccggtgccggcaaaaccgtagtggcggattttgccatttacctcgcccaggaacgcaacgtcaaagccttctacaccacaccgatcaaggcgctgagcaatcagaaataccatgatctggtcgacgtgtacggcccggacaaggtaggcctgctcaccggcgacacctcgatcaactccgaggcggacatcgtggtcatgaccaccgaagtgctgcgcaacatgctctacgagcgttccaccacgctgaacgcactacgctacgtgattctcgacgaagtgcactatctggccgaccgattccgcgggcccgtgtgggaggaagtcatcatccacctgcccaagacggtcaagatcgtcggcctgtccgccaccgtgtccaacgtggaggatttctccaactggattgcctcggtgcgaggcgacaccaaactggtgatcagcgaacaccgccccgtgcctttggaacagcacgtcatcgtgcaggcggacgaacacaccgagcccgaggtgctggatctctatcgccgcgacggcaacggcgagcaggccaccaagctcaacgccgaactcatcaaccggctcgaccagttggaccgcaaggccgcacgccggcgcggcgaggaacgtcccgataagcgcaagggcttcggcagaggccgcggcggcaaaggcgccaagggccatgccccgaaagcggaacgccacaccccgcgccgctgggccgtggtggacgagcttaacttcctgggaatgttgcccggcatctacttcatcttctcgcgcaacggctgtgaccaggccgtggaacagtgtatcaatgctggactggagctcaccaccgatgaggaagtgaccaagattcgccgcatcgtggatgagatggtggaggggcaactcactcaggaagacctgaaagccctgcagttctccaagttccgctttgcgttggaagaaggcttcgcttcgcatcatgccggcatgattgccctgttccgccagatagtcgaacgattgttcgaagaaggtctggtcaaaatggtgttcgccacggaaacactggccttgggcatcaatatgccggcccgctgcgtggtggtagagaaactcgagaagttcgacggtaccggtcatgtgggcctgacgcccggcgaattcacgcagctcaccggtcgtgccggtcggcgcggcatcgacaccatcggccacgccatcgtggtcgaccatcacggttttgtacccgccacggccgccgcgctgtcatccaagcgtgtctacccgctgcactcgagcttccgacccacgttcaacatggccgtgaacctgctcaactccagcgactacgagaccgcgcgcgttaccctggaccagtcgtttgcccagtgggaggccaacgaatcggcctggcagctggaatcgcagatcaacacactgaagaacgcactggccggatacgaacaggcgttcgcatgcgaacacggcgacttcaaacagttcatgaccctgcgtatggagctgagcgacatcgaaaaggaaggccgccgcaaactgaagcacgaagtgttcctgaccgatcaggagcgttcacgcgccttccagaaccttgaccagcgcattcgcgatttgcgcaaggcggaacacgagcatccatgccgcaactgcccggacctccagcaacacctcaagtggggccaccgctgggcccgcgagacccgcgaactgcagcgcgtcaccgatcgctacgactcccgtaccgggtccgtggcacgtcagttcgattgcatctgcgatattctcaccgggcttggttacctcgaacgtcatgtcaatgcggccggccacattgacatgacgttgaccgaaaaaggctcgctgctgcgccgcatctacagtgaacatgacctggaactgtgcgaggcgctgctcgccggcacgttcgacaagctcgacgccaacggactggccgctgtgctctcttcactggtatacgaggccagacgcgggggagacagcgaaccgaggcactacccgggcggcatctccgggcccatcgccatcgcttcgtccaagctcaagggcatttgtgaagacatcgatatcctgtgcgaggatcacggtctggacgagatgcagcggccggacttcggtattctcgacgtcatgtatgaatgggcggatggcggttcgctgggatcgtgcctgtacggcaccgacatgaccggcggcgacttcgtgcgcactgccaaacggctggctgacgtgctgcagcagatcgctgtcgcccagccgctgccgttcgacgggggagagcggctggcaggcctcgcccacgaagcggccgaccgggtcaatcgtggcgtggtggcctactccggcgtggactgacgggggccgtttgatgggagtttgtcagccggcgtcggaagcttggaatagcggccaagtccgaactgttgcgtaaattagtagggttaaagatctttcaaggaggatgccgatatggcagaacgtagcctcaggggcatgagcatcggagcgaaatcgctggagtccgacgacaacgtcgatttcgccgcacgaaacgatgtggcgtatgtatgcccgaagggccaccgcaccatcctgccgtttgccgagggtgccgaaatcccggacgagtgggagtgccgttgtggttccgtggcccaccgtgagggcgacgccgaccgtgagggcgacgaaatcagcaaacccacccgcacccactgggacatgctgctggaacgccgtagcgaagaggaactggccaccctgctcgaaaagcgcctgcaaatgcaccgtgacggttggattcctgactacgagtgatctcctactgaacaacacgtgaacttgatgcccagtcatcccgactgggcataatcattgttggaacaagtcgcatatcgtttgacgaccattcaaagcagtcgacatgaacaaaggggagtggaatctcaatggcacagcatccgatgaaagtggtcctgttggacctcgacggcacgcttaccaagtccgacggcggcatcatcgcctccgtcgtcaagacgttcgaggaattgggtcgcccggttcccgacgatgccgagctgcatcgtttcattggtccggccatcatcgaatcgctgcgacgcaaccatgtgccggaggatgagcttgaccgggcggtcaccatctaccgcagctactatgcggatcgcgccgtgttcgatgatccgaacgagcccggcaacaaagttcccggccgcttggtgaacgtcgtgtttcccggtatccgcgaacagctgctcaagctgcgtgccgacggctattatctggcgttggccagctgcaagcccgagtaccaatgcgttccgatctgtgagcatttccatctgaccgagctgttggacggcatctatggcgcatccagggataactctcgtttggacaaggatcaggtgattcggtactgcttcgacataatcggttttgatgctgcagcgggggacaaggccgtgatgatcggcgaccgctacaccgacatcgacggcgcccacgcctgcaatctggacgccattggctgccgctggggctacgctccggccggtgagatggaagaacacggtgcctacgaaatcatcgagaagcccgagcagatcgaagaagccgtaaaccgttatttccaaacacactgaaacacaacggcgaggacttcttcatgatgggatgcgatggagcctgcgccgcgggcttcgacctggttttcatcggtttgccattgctgtcgctgtatgagattcccatgctgatatggttcatttggcgagcattccactggaaacgagatgacaaggattggctgaaaggcacggcgattcttgcaattgcggtggtcgctccggtgctcctttggctgtcggcctggtatgctccggtgctcctttggctgtcggccttggtatgcgtggactagttgatacaggcgaccgaatccttgtcaaggataactaatctgacataacgtacattatcggctaatagtatgtggtgattttagccgaaccagtagtatctagctgcggattagcctcgccgcagagaatcggctacttcgcaacatcatccttattccggtgagaagcaacgcccaaacgcttgtccatttcggtttccgaagcgttgcgtgcctgcagatacatggcgatgagttccagcagcaccagcgcgaatatgatgattgctccgggcaattgcgcgtggtcgtagaacgcgagcatgcgagcatccatcagatccgctgtaaacgtcaacacgggaaacgggatcagcgccgccgcaaacgacatgaaatgcgttttcaccatcgaccagtcgaccggatcgaccggcggtcgccggcgtttcggcgtgaacagatgacctcggctgaccgttatagtgatgatggacacagcaaagatgacggcgaccatccacagaacgcccggcaacaatccgacaacaatcccgttcacccggtcctccaatcagtcataataatcaccgcaacatataaaaacataagatggcaggcaacaaaagcaacacatacaacaaagcgacctgccgaccaaagccggcaagtcgccaacaaccatacatgtatcaggcggttgcgcgttgcaagcgctgtgcctcgagcttcttgcgcatcctcatggcagtcagttcatcaatcggacggcccgtggcaatcgtcagcggcttggcctcaagatcaacatattcttcctgttccaaggccgtctcaatctggtgccacaacgaacccaccgacacggcgaacactgccttaccgctttgcaacagttcgagcatctgttcgctggttgtgcattcatgtacgttttgaccatcgcacatgatggtcacattggccagctgatcggtgctgcgttgagtcaagaatccgatggccgccgttacgttctgcagattcacaccggcatcaagcaacttcttggatacagcgagaatcaccacatccttaaacgagtatagtcgtcgtgaaccggagccatgagacggcgtgatggacggctcaacaatctgcttgcgtgcccaataatcgagctgtcggtacgtgatgccggccaccttggaggccacagtgccacggtagccgcgcttgatctcctcagtatcgacgttggagaacaactccccctgaatcgcgtcagcgttcagattctgacggtcctcaagcgaaacatgaagatgcagcccggtctgtcccatggcactcccctaactcatgcgtgtctcgcatatgactcacactggtgtaatcacatgattgcaatttctgcaatcagtctaaccccgtgctgggtgtggactattgggaaataatggcagatttcgtgaagaacacgaggcggaatttaccgatcatgatttcgtcgccgttcttcagcgtcgcctgatcaacacgctgacggttcacgtaggtgccgttcagacttcctgcgtcaaccacaaagaactgaccgttgaccctgcggaacacggcatgctgacgggatacggtggagtcgtcgagcagaatatcagctcgcggatcacggccgacggtgatttcatcctcgtcaagcaagtaacgagaacctgagaccgctcccctggcggaaatcagcaatgccgttccctcggacaatctggtgatggtgtccagatcctcttgagtcagcggtcgatcgccggtggtggtaatgggcagtacattaatcgcgggcaggccgataatggtggtttcgcctgcgctaggaatcgggttggtcataatcccctattctaccgtctttgcatactggttttgcgtagcttcgcgtacttcgtcgataatgatgctgtcagaaggctgtacattgacgttggacccgtatttcacctggagctgagcgcccacaccgccggcgatatcgactgcgttggacagttcctgcggattgccaatggccttcaccgtgtatgtgggcttgatggtggtgccatccacgatcaaaccttcctcggcgtcctgaatgtaggtggaggtgatgacgcgcacgttattgatggcgattacctcggcaccggcattgcgaagttcctcgataaggttgaacatgattgaggcgtccactttagtcgtcaagcctcgtccgattcggatggtcacgccttggccctttgccgggagtctgccggagatcaagccgctggtctcctcgttttgcttggcgatcttacgcgcctgctcctgctcgttagccgccgatttcagcgagttgagctggctgttcaactgggttttacgctgctcgagattggagatttgcgtattcgactcgttcagcagccttaccagttcactctcgtccatcgtttcgtacgtggatttagtgttattgatctggctcatgtaggcgaaacccaacaacgcgcacatcagagcgatgagaatcgaggatagtaaccgtgatttgttgctggcacggttgagatccttccggggcttcttacgcaccgtgggaaacgacccggtttccatccggtcgttgaccttgtcttgtgcatgctggtcgcgcattttctccagcatgttgtctgattgtgctttacgtgccatacgtcagtacccttgtcagcctcggaagatgaagcgtctgatcgcggacacgttggagaagatgcggatgccgagtacgacgatgacggctgtctgcagctgcgaaccgacgccgagctggttgccgaggaacacgagcagtgttgccgtcaccacgttggcgaggaaggagatcacaaacacgcggtcggagaagctgcgctcgaaataggctcgcgcggcacccagcagggcgtcaagagcagcgaccaccataatcggcagataaggctgcacgatgatcggaatgtccggcttgacgaacacgccgatgacgacgccgatgattagtcccagaacggctgccattattcattcctttccgcgtacttcacttcgccagtgactgctgcctcaagtgtaatcgaattggatttgctcacctgcgggtagataccggcttccttgaaggaatcgtaaagacttgcaagtttcttcttccccatcgcttcggccaaggcgctcttatcgcctatggcttcaatggtataggggctttgtatcgcggtcatgccgatgagaatatgcccgccggccttgcgtatcgaggtttgcgcgccgagcctattaccgttgatggcaatggcttcggctccgttttggaacatcagggagaccagttgctgcagatccagatcggtgatgactcggatgttcgtggaggtgccgactctcgtcgaggaggattgatccgactggcttgccgcgattggatcggccagcgtcatggtgattccttcgccttcgaccaccgtggcaccattgaccatttcgtcttggataagcgtatcgcttttcacgctgccggatattttcttggactgttcgtcaacttgggagcgcaaattattgacgtccgtggtgagttcgtctatttgcgagttgcgattctccaattgcgtggccaaagtctgccgtacctgcttacgcggatcggattgcaactgttgcacgaataggctgcaggcaaagccaacgccgacgcagatgatgaatacgacgatgcgattaaaccagatggagaaggtcgaacgatgctcatggaccagtcgtgagtcggagaacatcggatccatcggacgattgacaagatcatcgatgagctgaagcgaatcgtcgttggttttacggcgacgtctggtgcggatggcggcggcgtcatccggggaaagcgcatgatgtgattccgcgcctcggactgagtgggagaacacggcgcggcgtcgtaccggctcattctccttgggtacggggaatgagaccggggccgtggcctcaagcgccatacttctcccccagttccttgcgtagcaatccgacgccctgcttggtatagatatatccggcgagccaatacatggcgatgccccagatgccggcggccagcgcggcgatgtagagcaagtggaaaaacgtactggtgcccaaatcggcgaaaatcagaccgacgatggaaatcatcagcagcgcggtaccggccttgcccacgaaatgcacgggcagcggaccataaccgtactgggcaagccatagcacctgaatcgccatccacagatccctcagtcccacgataatcagcatccaccatgggatgatgccggcgacgctgagagccagaatcgagcagaaaatgagcagtcggtcggcgatcggatcaagaatctgaccgatcttgctcacttggttgaatctgcgcgcgatgatgccgtcaagtccgtctgaagccgaggaaatggcgatcagtgctagcgccgcaatcatctcgtgcttggagatcagcacgctgatgaaaggaatcgagatgattcgcagcgcgctgatcaaattgggcacagtgaaatagatgtcacgtgcttccggactgtatctggcgttgactttctggttggtcatatcgactaacagtctacatgcgggaggcttgcagagcggtaacgatgatgccgcgtgcgccgacttcgtacaaatcatccatcagctggttgaccttggccttgggaaccatgactcgcacggcgttccactgtttgtcgtgcagcggggaaatcgtcgggctttcaaagccaggggtcacggccacggcggcggcgaccttgctgatcggaatgtcatagtccatgagcacatactgatgtgcagtgagcacgccttgcagacggcgggtcagcacggccagacgtgggtcctgctcgttcagacgcggcgaacgaatcaggcaagcttcggagtgcatgagcggttcggcaaacacgcgcaggccggcgttgcgcagggtggtaccggtggagaccacgtcggcgatgaggtcggccacgcccagctgcacggaggattcgaccgcaccgtccagatggatggtctcggcctggatgccgtgctcgaccagatagtcgtgtacgagcttatcgaatgtggtggccacgcgcttgccctgaacatcctccagggtggtgatcggggattcgttcggtgcggcgaaacggaaggtcgaggcaccaaagccgagcggcatgtgctcgagcgcggcggtaccggagttcttgagtagatcctggccggtgacgccgacgtcgatggcgccgcggcccacgtatacggcgatatcgagcggacgcaggtagaacaactcgatgccattgtcgggatcttgcacgaccagctggcgagggttggtgcgcagacggtagccggcctcggccagcatgttccacgcgggttcggatagcatgcccttgttgggcactgcgattctcagcatttgcgttcctctcacaggtgcttgtagacgtcttcgagcgtcaggccgtgcttgatcatcatgacctggacgtggtagagcagctggctcatctcctcggcggtgcggtccgcaccctcgtattcggcggccatccaggtctcgccggcctcttcgatgatcttcttgccgatgaagtgggtgcccttgtcgagctcgtcgacagtcagggagccttcggggcgggtctgggccttttcggacagttcggcgaacagggattcaaacgtcttcatgtgattcagattcttttcttgcggttatggatgaaaggtggattgcggttcaggcttggagctcaggccttgaacgcggcctcggccttggtgcggatgtcgtcgatggcttgggcgggattctcggcgccgtacacggcggaaccggcaacgagcacgtcggcaccggcctcggccacgatgtgcgcggtcttggggctcacaccgccatcgacctggatgcgggtcttcaagccacggcgggtgatctcatcgcgcaggcggcggaccttggccatctggttgtcgaggaacttctggccgccgaagccgggttcaacggtcatgatgaggaccatgtcgaactcgtcgaggatatcgaagatcggctcgaccggttcggccggacgcacggcgaagcaggccttgcagcccatctcgcgcagctgtcgggccagacgcacaggggcgtgggtggcacccatgtggaaggagacggaggcggcgccgagcttggcgtattcgggagcccaacgatccgggtcctcgatcatgaggtgcacgtcgaccggcagatcggtgacctgacagatgcggccgacgatcggctcgcccagggtcaggttcggcacgaaatgatgatccatgacatcgacgtggaccaagtcggcgttggcgatggccttgagatcacgttcgaggttgcagaagtcagcggacaggatgctgggtgcgattgcgatattgctcatggtttcctaccttatctgtgcaatgggacttggagccccgtgtttcgcgctgtttcggcgctgtttatcgtggtgtcacttagtgcgattggtttgctttttctggcgaagttgttcctcttcgatgctctggcgttcgagctcgtcggcggtgaccgccgcaagcccgcgcgcctgcgccttggggtccggaccgtactggtagagcacgacgaacaggatgcagccgagcacgaagacgatgatcgcggtccacacgttggtcctcaggcccaggatcaccgtggaatagttgatgcgcacgttctcgatccaggtgcggcccaggccgtaccacatcaggtacatggcgaactgctggccggccttgagccggtcggcaagcttgtggccgaggtagatgatgagcgcggcgccaatgaggttccagatcatctcgtacaggaacgtcgggtggaacagcgtggtcctgtagtccgggcattgcgcgccggaatagcagatttcggatttgccgatggcgtccgcgtcgttgagcttcaggccccacggcaacgtggtgggccagccgtagagctcctggttgaaccagttgccgagtcggccgatggcctgggccacgggcagcgcgggggcgatggcatcggcgaagatcgcgaacggatagtgcttgtgacggcaccacaggaacgccaccaaggtgccgacggagatgccgccgaagatggccatgccgccttcccacaccttgaggatgttgaccaagttgccggtgggcgggaagtagtcggccggcgtggtgatgcagtggtaaaggcgcgcgcccaccagcgcgcagggcacggtgacgagcgtggtatcgagaatctggtcgaaggtgccgccgtaccgcttccaacgtgtggcgaggatccatacggccacgcagatgccgatcaggatgcagatcgcgtacatgtggatagtgaacgggccgatctcgaacttggagaaggtcggcgagggaatataagccagattcatcgtgcctctacttgctggtgctcatggtgtgtccacgcgcgggttgtgcttgacgctctgtgactaccctaccgtgtcacggcacaacccgcgtgaggcgcaccgggtgtttaccgggcgttgtggatgccttcggccagttcctcgctcttggcggcgagcagcttcaagccttccttcgggtcgcgtgcggtcttgttgtcgtccgcgagcagggtgtgcacgagcgcggagccgacgatgacgccgtccgcgtaggagccgaccttggcgccctgttcggcggtggacacgccgatgcccacgcacacgttctcggcaccggcctgacgggtacgttccacgaggagttcgggcgaggcgtcgatggtggcgcgttcgccggtgacgcccatgcgggcggctgcgtacacgaagccacgtgcgttgcgggccacggtttcgaggcgctcggtggacgagtccggggagaccaggaagatgcggtcgagtccgtggcggtcggaggcttcgatccactcccccgcctcgtccgggataaggtccggggtgatgagaccggcgccgccggcgttctcgaagtcgcgggcgaagcgctcgacgccgtagtggtacacgaggttccagtagctcatgatgagcggcacgccgccggcgttggccacggtttcgacggcctcgaacacgcgcttgatggtctcgccgttgttcagggcgatggaggcggcagcctggatgaccgggccgtccatgaccgggtcggagtacggcaggccgatttccacggcgtcgacgccgtgctcgaccatcgtcttgaaggcgtcaagcgagacgtccgggttagggaagccgtagggcaggtagccgatgaaggcgggcttgttctcggccttgaacttggtgaacatagcgcccgacttgctgggcttgtggctgatgcccagcggctggccggacggcgtggttgcttcgttggtcataatcaaaaatctcctcttcttgttcaggcgacagtattgccgtgggtgccggtcacatcgagcgcggcggcctggtcgtcggtcaggtagccgaaccacttgccggcggtggccatgtccttgtcgcctcggccggagatgttcacgatcatcacggccttgtcatagcccttggccttcagatcggcggcggctttgtacgcgccggccacggcgtgcgagctttcgatggcggggatgatgccctcggtctggctcaggtcgcggaaggcgttcatggcctcctcgtcggtggcccagctgtagttcacgcggccgatgtccttgagccatgcgtgctcggggcccacggaagcgtagtcgaggcctgcggagatcgagtaggtgtcgagcgtctggccttcgtcggtttccagcaggtagctcttggcgccctggaacatgccgagctggccggtgccgggggcgaagcggatggcgtgcttgccggattcggggccgttgccgccggcttcgtagccgtagaggttcacgcgctcgtcgtccaggaaggcgttcatcacgccgatggcgttggagccgccgcccacgcaggcgcagatcgcgtccggatggtcgatgccgtaccagtcctggagctgctgcttggcttcctcgccgatgatcttctggaagtcgcgcaccatggccgggaacgggtgcgggcccgcgacggtgccgagcaggtagtgcgtgtccttgacgttggtgacccagtcgcgcagggcttcgttgatggcgtccttcaggatcttgtcgccaagggtcacctcgaccacttcggcgccgagcatacgcatgcgggccacgttgagggcctgacggcgggcgtcgatctggcccatgtagatgcggcacttgaggccgagcatggcgcacacggtggcggtggccacgccgtgctggccggcgccggtctcggcgatcacgcgggtcttgcccatgcgcttgacgagcagggcctggccgagcgcgttgttgatcttgtgcgcgccggtgtggttcaagtcctcgcgcttgaggaagatacgggcgtcgagaccagtcttctctttgacaagtgcggagaagcgcggggcttcggtcagcgggctcgggcgccccacgtaacgctgctggagcgtcatgaattccttgtggaattcggggtcggccttggcttgcgtgtacacgcgctcaagctcgtcgagggcggtgatgagggcctcgggcacatagcggccaccgaactggccccaatacggtccctgatgttcgctgagcggggtcgtttcggatgctttcactcgtgctcctgcctttactagtcgttccactgcaagttcatgattgtcggcggtggccacgccctcgccgaccagtaccgcgtccgctcccgcgcgggcgtagtcttcgacctcgaccgcgccgaatacgccggattccgccaccttgatgacgtcatcgggcagatcggccgcgagttcgttgtatttgttcacgtccaccttgaggttcttcaggttgcgcgcgttgatgccgatcaccttggcaccggccttgcgggcgcgttcgatctcttcgcgggtgtgcgtctccaccagcacggtcatgccgagctcgtgcgccaggtcgagcaggtgcttgagctgggcgtcgtccaatgcggcgacgatgagcagcaccaggtcggcgccgtgggcgcgggcctcgaagatctggtagtcggtgacgatgaagtccttgcgcagcactggaatgtgcacggcggcgcggaccttgtcgaaatcgtcaaggctgccgaggaatttgcggccttcggtgagcacggagatggcgcttgcgccgcccttctcgtactcgcgggccagcgcggccgggtccgggatgtcggacaggtggcccttggacggagacgcgcgcttgatctcggcgatcacggggatgccgtcggcgcgcttaagccatcgtgtcgcgtcaatcggagccggggccgccagcgtggccttcttcacatcctcaagcgatacggtgagctcacgggtgcgctgatcctccagcgctcccgccaccagttcgtccaaaaccgacatggtcctccctttgttggtgttcggtcatgcgccactctaggtcacgtcctgtcccgattgccgaacccgtcctacattttgggctttcgcaggcgattccggcttaggcagaacattggcataaactggcacgcatgtgcagacgtttcgcgctcgacttggaatgggacgccgtggctggaccgcacaatcgacggcgcatccttgctcgccggcgtgcggaactcaggcactgcgttatcccgccgcttgcaatttcacgaggtcgccccgctgcagggcgacggcaaacgcctgattcagccgttggattcgaccgagcccatgcgcctgttttgacggaacatctttgacgagagatcgtcactgaatcaatgcttgctatatatgtatcacagtgtcataactatgaaattatattgtggaattgtggtacatgaagttcgcatgacaacgatgtcaccgttggtaggcggaccagtaggtgccgttgctgccggtggtggtgctgaactgccgatgtggttcagtccaccagaccgcgcagcagcgcgatttcgtcgcggtgcgtggtcggcgtctgctccttggtttcgagaatcatcgggagcttggccatggtcggatcgttgaccagtcgcgtgaagaacgggatgccgagctgcccttcgccgatgttggcgtgacggtccttatgcgagccgaggccgaactgcgaatcgttcacatgaatcgccttgacccttgccaagccgatcacctcatttaactggcgcatcacaccgtcgtagtcattctccaaatcgtaaccggcatccaacgcatggcaggtgtcgaacgtgacgccgacgttcgccttattctccacgccatccatgatcgtggcgagctcatcgaaattgcggccacattccgtgcctttgccggccatggtctccagaagcaccatgacgccatccgcacgctcgaacacctgattcagtccctcgctgatcagccggcagcctgtctcggagccttggcccacatgcgcgccgggatgaatgttgatatacacctcctggccggcctcgcggatggcggtcagcagctcgatgtcctcggccaacgcctcgatcgcgaatgcgcgcttggcctcatccttgccagccagattgtagacgtacggcgcgtggacgaccaacggcccatagccctcagccttcagacgcgcaccgaacgccgccgcaccggccgggtcgagcgccttcgaacgcttgccgtacggggaacgcgggaagaacgcgaacgcggtgccgccctcctcatgggagcgttccagcagcgcattccatccgccggccgtcgacagatgcgatccgatatacagttccgtcattccaaattcctcgtgttccactcgctgttcgtgttaccgctatcatatggtaggaggcatcgagcgccgcccgcacaaccgacatgagacacaactgttcacccgaccaaaggagacccgagcatggcggcagccggcacacccaaggacgataccggcctggaacggaagatggagtcgcgccacctgacgatgatctccctgggcggtgtgattggcaccggtctgttcgtcagctccggctatacgattcatcaggcggggccgttgggcgcgatcctcgcttacgcggtcggctccctgc

SEQ ID NO: 905 - DNA, 30525 bp, Unknown
  gut microbiota DNA sequence
ggcaccccggaggagatcgtcccggcccgcgtgttcaccggcaaccgtccgaccacctccatcttcggcgtggccctgaccccgttcgcagtcggcgagctcatcgccctgtacgagcacatcaccttcgtcgaaggcaccgtctggggcctcgactcctacgatcagtggggcgtcgagctcggcaagcagcttgccaagcagatcaccccggccatctcccaggacgacgacgccctcgccgcccaggacgcctccacccagagcctgatcaagttctaccgcaagaaccgcgagttctgattcgctttgctcggtcagaattcgtgattcgcgcgaccgcggctgtgctgtctggtgggcagtctggcgactgcccacgtcgcgaattctgattcgcttttctagctcccctcaatactgaggggagctgtcagcgaagctgactgagagggagttatggaacgctccgtatgctcccccctcaactatgactgttgccggcggcgaaactactggaataatcaccgtccatcggactctcaccttcttcaagccgtgcgctgaaacgccaaatcaataccatcgtcggtatccatgcgaccagcaggagggacggaaagtattcgaatccgccatccgtgctgcctcggccaaactgatgcgttaataacggagagagacgacgacacgccgatactgtccgcaataatccgtaaaatagtcgattgctgtgtcgagaagtgggccgccgcataagcccgcgtctccatgggtccagtccgaacggccgcaaggcctgactttcggcggatcggcaggcttcccaagggcaaacccgagggataacgagaacaggccaacgtacgcgatgcgcaatcgcgtggatggccccagatctgtggctgatatgcggcagcactgaaggaaaacaatggttaacgctgttgaggcttttgacgccaagcacatgaagccggccgaggaaatcccggccttccgtcccggcgacaccgtcgacgtgaacgtgaagatccaggaaggcaacaactcccgtatccagaccttcaccggcgtggtgatcgctcgtaagggcgctggcgtgcgtgagaccttcgtggtccgcaagatcagcttcggcactggtgtggagcgtcgcttcccggtgcactccccgtccatcgactccatcaagctcgtgcgtaagggccgtgtgcgccgcgccaagctgtactaccttcgcgctctgcgcggtaaggccgctcgtattgccgagcgccgcgacaactccgctaagtgagtcgattcgcgggtgcaatcgtgagcctgatgatacaggtgcgcgaataaaccgtgaaattcagcccggaaccgtttcggtttcgggctgttttcgtattttccacgtatgatggacgggcgccggcacccctcatatccggcagcatgaatcgcgaggagatggtatgcaggacgatcaggataacggcgaattcccggtttccgacaatccggagagcaaccagacctcgtatgatgacgaggccgatgcccgcgattcccgcacgttccaagtcgctgaccacggcatcgccctgtccccggttcccccggcaccggcgcgcccggcacacgccgcttcttccgctggcgcgggtgcagccgctggcgcgaatgccgcggcagcatcatcgtcagatgatgaccacttcaccctacgtgactttttcctgtggtgcggcgttcccgtgcttatcgtgctgctgattcgcattttcgccgtcggcttttacgagattccttcgcgctcgatgatggataccacggtgcccggcgatcgcgtggtgaccagcaagctcacccccaagatcttcgatctgcagcgcggcgacgtcgtggtattcaaagatcccaacaactggttgaacgaggagcagagcagtgctcccggtggcgggtacctcatcaagcgactgatcggcctgcccggtgacgtggtcgaatgcaagggcgcgggccagccggtgaccatcaacggcgtggccatcaatgagacctcctacattcgccccggcgtggacccgagcgccttcccgttctcggtaaccgtgaccgagggccgcgtgttcgtcatgggcgacaatcgcgccaattccgccgactcccgctatcatcaggatgacggcgatcgcggcttggttcccatctccgatgtggtcggagtcggaatcgcgaaatactggccgcttgaccggcttggtgcgattgatgaccaccacgaagtcttcaaggacgtgcctgacgcttccggctcgaattcctgagtcttttttgaaccgtgtgagtctttgaactgattgagttccgggccgtctgaaccctgaaccatatgaatcctggaccgtctgaatcctaaccattgtgagacgatgggagccgcgcatgattaccccgacacttgacttggaacgcagccttgcggcccagggctatgaccttatcgctggattcgatgaagtcggccgcggcgcgctcgccggcccggtgatggtcgggtgcgccgccatttgggcccgtgatttggagccgttggatggcgatgatgccgtcgaactgtccgggcggacctacctcggcgtgccggacggcgtggccgactccaaaatgctcaccgaacataggcgcgaggcgattttcgacgaactgcgcgactggtgcgcggcctacgccgtaggccaggccagcaacaccgagatcgacgaatggggcatcacctacgcgcttggcgtggccgccctgcgcgcgctcagccaagtcgaacgcgaacttggcttacgacttggaggggaatcgacgataaaaaaggcttcgggggagtctgcggggaagattgtggaaggtcgtccgggaggctccgtaggggaatccattggaaattgcgagggaagcgttcgcgctctgcccaaagtcgccggaattctcgacgggccgagcgattacatcaccaaggcgctcaacacgttcgacgcgccggacgtgccgattccagccgacataacgaccaaagtcaaaggcgaccagcattgcgccaccgtcgccaccgcggcggtcatcgccaaagtgacccgagaccggctgatggtcgacctcgcgcaaagcaacccacgttacgccgcctacgaatgggctcataacaagggctatggttccgccgcacaccgtaccgccatcgccgaacacgggccgactccgctccatcgtgtctcatggcacctgacctgagccgcgtgcgacacgacagtgtgagcgctaacgcaaaactgttgtggacgcgctaaagtcagtattgattaaggtacaagactggccgtgcatggatgccggccgccagcggggaggttaggcaatatggtgaccagccgcaagccaagcaaacgtccgtccatgttcgaagtggccaagctcgccggagtcagccaccaaaccgtctcccgtgtgatcaatgactcgccggacgtttccgacgccacccgtgcgcgagtccaggccgccattgaccaactcggctaccgcccctccaactccgcgcgcgcactggcttcccgccgttcgcgcaccatagggctgatcgccggaggcctcaaattcttcggcccgatttcctccatctcctccatcgaatccatggcccgcgagcacggtctgttcatgagcgtgatgatggtccacgaggccttgtgcgcgcaggccgacttcgacaacctgtgcgacaccttcaacgagcagaacgtcgacgccttcatcttcctgaccccgaccgacgtgatgttcgccgccgcctgccgtgcacgagtcactcagccgcgcgtcatcgtcaccgccacccacggccaaatgaccgtgcgtgagggattgggccttatctccaccgaaaacaagcgtcgcactgcgctggtcggtatcgaccagtggggtgcaatggccaaagtggtggccttgctgggcgaatacgggcacaaatcggctctgtattttgccggtcccaacgaatggcgcgacgcccacacccgactggatgcgtggcgcaagctcgccgcctcccgatccatcgattcacagatcgtgcgctgccatacgtgggatgcctctgaggcatatgcgcacatgaatcatctcattgatgagtatgggcgtcgaggcgcggcgttgcccaccgcggtcgtcgccgcgaacgacaatcaggccgtcggcatcatgcgcgcgttgcatgagcatgggcttcggattccgcaagacatcagcgtggtcggattcgacgacatgtctggcgtggataacatgtacccaccgctgaccaccgtgcatcccgatttcgaggggctcggcgtggccgccatgcgcgagacgctgcgcttgctgggggagggcggcgagccgaccttcctgaccacccagcacggcatggggctgattcccgccgaggtgcgtgctcggcggtccttgggaccggctcctcggcggtaaattggcgctgttatcaaaccgttatgatgcgtgacacggtataagttgtgtcgaatgcaggttgtcggtacaatgttttttggaaattgtgagcgctaacaccctccccaaggaaggggataacaacgccggcgctccaaggcaaaggaaagatatggcagcaaccgacaacgcggccgagcaggtcgcccacatcgccgagaagattcgcgctggcaagaccacgctgggcatcgaattcggctccacccgcatcaaggccgtcctcatcgacgacaacttccagaccatcgcctccggcgactacagctgggcttcccatctggaagatggtctgtggagctacaccaccgaggagatttggggcggtttgcagtccgcttacgcctccatggccaacgacgtcgagaccgcctatggcgagaagctcacgcacgtcggccacatcggcttctccgccatgatgcacggttacctcgcattcgacgaggccggcgaactgctggtgccgttccgcacctggcagaacaccaacacctccgaagctcacaagaagctctccgagctgttccagtacaacatccccgagcgttggtccatcgctcacctgtaccaggccgtgctcaacaaggaagagcacgtctccaaggtggcttacttcaccacactcgccggttacgtgcactggaagctcaccggtaagaaggtcctcggcgtgggcgatgcctccggcatgttcccgattgacccgaccactcacacttacgaaaccgcattcattgagaagttcgacgctctgcctgaggtcgcagcccagccgtggaagctggagaacctgcttcctgagccgctcgtggccggcactccggctggcgagctgaccgaggaaggtgccaagctgctcgatccgtccggtgccctgaagcccggcatcgtgctcgccccgcctgagggcgacgccggtactggcatggtagccaccaactccgtgcgcgtacgcactggtaacgtctccgccggcacctccatcttcgccatggtggttctggagcacaagctcaaggccctccaccctgaggttgacttggtcaccaccccggccggcgatctggccggtatgagccacgccaacaacttcacctccgacctcaacgcttgggtcggcctgttcggccagttcgccaaggctatcggccagccggttgacgcaggtatgctgtacggcaccctgttccgcgcggccatcgccgacgacgtggacgccaactgcggcggcctgctgaactacccgttccgttccggcgaattcctggccggtctgcctgaaggtcgcccgctgttcgcccgcagccccgaagccaacatgaccctcggcaacttcatgcgcgcccagctgttctccgcgttctccccggtcaagatcggcatggacgtgatgaccaagcaggagcgcgtgcaggtcgactctctcgtgggccacggcggcatcttcgccactccgaaggtggctcagaagattctcgctgctgccttcaacaccccgatcaaggtcatgtccaccgccgccgaaggtggcgcctggggcatggccgtgctcgccaactacctgtggaacaccaacgaggatcacagcaacctcgctgacttccttgacggttgcgtgttcaaggacgcccagtccaccactgagaagccggtggcttccgatgtggttggtttcgaggacttcttcgcccgcttcaccaagggcctgcccatcgagcacgccgccatcgaaaccatcaacctcgaagataagtaagcctttctgacctccctctattgagggaggtccttgagattttgaaaaaacgtccatccatcacagtggaaaggaaaaccaataatggcaactttggctgattacggccccgaggttcgcgccgaggtcaagcaggttcgtgaggtcgtctccaacctgcaccagcagctgatcaagtggaacctggtcgtgtggaccgcgggcaacgtttcccagcgtctgcacaccgccgacctgttcgtcatcaagccctccggcctgcgctacgagtacctgaccccgtcctccatggtcgtgtgcgaccttgacggcaacgtggtcgacggcaccgaagccccgtcctcggacaccgcttcccacgcctacatctaccgcaacatgcccgacgtctacggtgtcgtgcacacccactccacctacgccaccgcttgggctgccactggtcagaacatcccgtgcggcctgacgatgatgggtgacgagttcggcggcccggtgccggtcggcccgttccgtctgatcggctccgaggcgatcggcaagggtgtcgtcgagaccctcaagaagtacccgaagtccccggccgtcctcatgcagaaccatggccccttcaccatcggcaaggatgctgaaggcgccgtcaaggccgctgccatgaccgaggaagtcgctcacaccatgtgggccgcccgtcagctcggtgacatcatcgagatcgaccaggccgacatcgataagctcaacgaccgctaccagaacgtctacggtcagcactgatttgatggagtgtccgccgcgttacggaaggcccgacgtaccttcgtacgccttcgccttccgcgccttgcggacacacacatcaaatcagcgctgactccgccagcacggtggtgtcttggctcccctctctgaggggagctgtcagcgatagctgactgaggggagcctcggtcggcgaatgaaacttaaacaaacccccataaacaaagaagtaaaggaagtaaccctatggttatggaaaatcccttcgagggcaaggaaatctggttcggcgttggttcgcaggacctgtacggcgaagaagccctgcgccaggtcgccattcactccgctgaaatggtcgactacctgaacaacaccggcaagattccggccaagatcgtcctcaagcccaccctgaagtcctccgacggtgtcaaggagttcatggtcgaggcttccgccaacccgaacgtcatcggcgtcatcacctggtgccacaccttctccccggccaagatgtggattcgcggcctcgaagtgctgaccaagccgctgctgcagctggccacccagcaccacaaggaaatcccgtgggagaccatcgacatggacttcatgaacctgaaccaggccgcccacggcgaccgtgagttcggttacatcgtctcccgcctcggcatcaagcgcaaggttgtcgtcggccactacaccgatcccgaggtcgccgagaagctcggcacctgggcccgcgcctgcgccggctgggatgcctccaacaacatgaaggtcatgcgctggggcgacaacatgcgtaacgtcgccgtcaccgagggcgacaagaccgaggctgagcgcgtgttcggcgcctccatcaacacttgggccgtcaacgagctcgtcgctgcgtacgacgccgtcaaggacgaccaggtcaaggagatcatcgaggactacaaggccaagtacgacgtcgacccggctctgctggacgccaagtacgactccctgttcatcgccgccaaggaagaggccgcgatggtcaacatgatgcgcgccaacggctgcaccgccggcgtcgacaacttcgaggacctcggcgctctgccgcagctgccgggcgttggcccgcagcgcttcccgtccgagtacggctggggcttctccgctgaaggcgactggaagaccgccgtcctcgtgcgcatcggtgccgtcatgggctacggccttgagggtggcgcctccctcatggaggactactcctacaacttcaccgagggtgacgagctcgacatgggctcccacatgctcgaggtttccccgtccatcggcaccatcgccaagccgaagctggagatccacccgctgggcatcggcggcaaggccgacccggtccgcctggtcttctccggcaagtccgccaaggacgccgtcgtggtctccatgtccgacgttcgcgaacgcttccgcctgctcatggacgtcgtcgacgtcgttgagccgcagggctccctcaaggagcttccgtgcgcccgcgccgtctgggagccgaagccgagcctgaagaccgctgttgagtgctggatcaccgccggtggttctcaccacacctgcatgaccacctccgttggtcgtgaggcttgggaagacttcgcccgcatcgccggtgttgagctcgccgtcatcgacgagaacaccaccgctcgccagttcgagaaggaactggagctgtccgagatgtaccaccgtctcaacaaccagcactgattggcggagcgtataccgcctttcctcaggttcgacgtaccttcgtgcgccttcgccttcggacggcggtctccgcacgcgccaatcagcgttggcaagccagcaccgatgactaaatcagtctgctgactgctaccgctgaaaaagggctgttccgggaaaccggagcagccccttttgttgttatcggcaactccccacaaacgcatcaaaaatcgtctgcgagcgtggatctaccttgtagagaaactcgggatgccactgcacggcccacaggaagtggcttgccggccggtacagggcctcgatcacgccgtcgggcgcgacggccatgacctcgagtccagcagcaggctcacgaaccgcctggtggtgatagctattcaccgcaatctcagtctgccctgcgaacaatgaagccaggggagtgccgggcaccaaggaaacgttatgtccgaacgcatcgtacggcggattcatatggtgttcgatatcgctcggatgctggcttggcagatcctgccacaacgtgccgcgcagcgctgcgttgatgaactgaatgccacggcagatgcccagaatcggcttgtcccaagccattacagctggcagcagaatcgattccattcggtcgcgctcaggagagagcacctcgctacggccggtggcggaggccgctgcaccaaccatcggtcccacatccggcccgcccgtaaacagaaacgcgtcaaaccgttcggcgcattgcgcaagaatgtcggtgtcatcggtcagcggcaacatgacgggcgtaccgccggcccgcattatcgcctccatatatccgggcagcatccacagactatcgcgcccgtaatccatcagcggagtcaccgcaatgagcggtcgattcgtagtcatgcctgcctcttttcgcccaggtgttgttttcgtcgttctgccgcgaatcgcttgattcagtggccgataatgccgccactgtaccgaaccaatgtaaccggtcggccaacattatttcgttagccagccgcgacgagatcgcacaatgtgccaatgatgggggcattcggtgtgaccttgtcaatgttcgggccattgcactttcagcggggaaagcatgccccgtccgcgcatcatgatgaacgagtaaggttgacggggagggagaatcacatgaaccaggcatgcgtacgcaacgacaccatcgacgcgggcaaccatcatggccgaccgcaataccggtcgttcctgcgatttctgacatcgcaggaacgcaacgtcatttggctgttgctggccattgcttttcttccggtggacggcaccacgcttggcctgtacgcgccgttctggtcgccaatcagtccggcgctgttcgccgtgtactgcctatgcaattggcggcaactgcgcatcgcagccaaccggtacctgccaatgttcctcctaccggtggtctgtataatcctgtccatcccgggatggctgaagttcggcatccacctcaacgccgcgttcatgagcatcaccggattgctgggcgtgctcgccactttgggtgcgatcgcccttgcgttcgacatcaaacgcattccgtggcgtacgccattgcggattctcatcgcatcatactgggtttccttcggagtgggcgtcgtgcaatggctgtccatccgtctgcgcgccaaaccgttgaccgactatttctcgcacctcatgtaccggcaatacatcagcgacaactcggtgtggggcggcggccgtccgcagttcctgttcgccgagcccagctatatcggcatgcacctgttcggcatactgcttccgctcatgtggctcatgcgcgggcgcgaccgcatctacgccaaacggctgcgtgacctcatcgtcacgtatgccgtcggcgcggtgctcatgcaagccggcaccagaatcgtcatcgattccgtcgtggcgttgctgatcgcccttgtggcgcgcaccgattggcatgacggcgcacgccgcgtccggggcatgctgcagattctcggcgcatgcgcactgggcctgctgggtgtgctggcggattccagactctccgccatcgcggagaacggggccgagggagacggatcgttcttcgcgcggatctaccaaagcctcgatccgatatgcggattgctcacccatccgtggacgctgctcaccggttatggcgcgggcaacatcatcaatgcggtgtgggccggcgcggccaaagccggacggctgctggacggtcttggcatgaacggcggcatggtcacgggattcgcggccggcgtgaacgcggacacggtgtggacgatgtgcgcgtataccagcgtcatcgccgaatacgggctgatcgggctggccatgctggtcggagcctcgatggtctgcatgacgcgcgggaggacggtatgccgtggcggtgcggatggcgcatcgtccgacgggctggcgcacggtgtttgtgtcaccgacgttgccgacgttgctgatgttgccgggggcaatagtggtgatggcgttgccggcgcgggttcgggcgaatccggcgtctggcacaagaccgtcatctgctggctcgtcctggtcgcatacctgtacatccaatgcgagaactatgcgttcgccgctctgccgctcctcgtgttcgccgcctcgaaggtgaggcgcgagcgctgattcctctcgggccgacgcatcgacgcggcccgagatggaccaaaatccagaataaacgacatttgccgctgttccgtttttcgcccaaggcgtatctcttcccgtatcttgaggtgcgtcatgtattgtcgcggctaactaaccggcgaaacgcggcatgtttcgcattttgggcgaaaagcccaaggcccacaggaggtattgatgacgttcgttgcacggtcggtgcgctatgtgctcagaaaacgagtgcgaaccatagtgctcctcataatactgaccatcataacggcgagcatgctatccacgatcgcggtttctcgggcggctcaacaggccgccggacgaatcgagaaggaagcggtcggtggattcgtgctgtccagcaacctgcagggcagcatgctcacgcctcgcggaggcggcatggtgcgtcccgccgacgtgcgcaggatcgcccaactgcccggggtcgattcgtatatggtccgtcagaacgccaccgccgatctcgtgggggcgaatgtggcgaaggtccccggcggcgatgattacgatgcgaccaaggagcagcaattcggcaacgccgccaacgtcataggcacgaatgattcggcgaaactcaacgtgttcacgtcgcgcacgctcggcatggccgaaggacggcatctgaaggcctccgacaagtacacgtcgatgatccatgaggatctcgccaaagccaacgggctcaaagtcggagacacgctcacgctcaaggccaacgcctacgacgccgacaacgaatcacattcgacggcgaccgtcaagaccaccatcgtgggcatattcaagggcgacagcgccagaaaggtatccagccgagcggaactcaccgccaacaccatctacaccgatctggataccacacgcgacctgtaccagtacaaggacggcaaggaaatataccaggacgccaccttcgtgctgtccaagggcgttgacgtggagaagaccatggatgccgcgaagaaactcccggtggattggaacaactatcagatcacacgcaacgaccagtattcgtcgagcatgctgcatgccgcccgcggcgtgcgctccatgatgcgcggcgccctgatcggcgtgaccgtctcggcggtgctcgtgctcagtctcatgctgctgctgtggatgaacgaccgccgtcaggagatgggcatactggtgtcccttggcgtcggcaagccctccctggtcgcccaatacctcaccgagatggtgctgatcggtctgccgtcccttgccctcggctggctgtgcgcgcagggaatggcccaatggctcggcaccacggcgctccattccgtgaacgcctccgcggcgaaggagctgagcagcatggggcaggtcggcggcgaccttgaatccagcatgtcggtgcgcaccctggattcgctcacggtgtcggtcgacgggaccgccatgctgtacgtggcgctcggcctgttggcggtgatgctggtgtgcgtcgcggtggcgtgcatgccgatgctgcgcaaatcgccgcgagacctgtcggagattcgatgatgagcatgaatgtgtggaagcgtgccacgttggcgatcgtacgcaagccggtacgcagcggcatcatcggtctgctgatgctgatggtcttcacgagcctggtggcgcaggtcggagtctcgacggccctgcgtaccatgtccgacggcatcggcgcgggcatgggcatagggtttaccgtcagcgccggcgagaatcccatcagcgccgaggaggcgagccggttctcgcgtatccccggtgtgacgaagaccgcctatgcgacgaagaccttggcgcaggtggatggcgcgcgcccggtcatgcctcggcagggcccccgattggactccgatctggccatgcaggtcagcgtgctgggcaccaccgattcctcattgtccgaggaattccagagcggcctgtaccgcctggagcagggccgccatatctcgggcgacggcgacgatgtgctggtccaccgcgacttcgcgctgcagaacggcctatcggtcggctcgacattccgtctccggcaggaggggcgcaacgccacggtgcgtgtggccgggatcttctccggcaacgtgcaggcccaaagccccctgccctcggacacttccgagaacctcatctattcgggcaggcgagtgacctccgctctgaccggaaacgaccggatcggcatgatccgatgcctgtcggataatccgcaggacctgtccgcggcggtcagtcaggccaagaccatggccggtggcaagtacgacgtcaccgacgattcggcccggctctccggcgtcctgcaatccgtgcagacggtgcgtaatctggtgcgcatggtgctgctgtccgtctgcctcgcggacgtactggtgctggcgatggcgctggtcttctggattcgctcacgcatccatgagataggcacgcttctggccctcggcatcgacaagatgcggatcgtcgcacaactcgccatcgaaaccggactcatggcggcggtcgccgccctgtgttcgctgggcaccggcgccatgctgtcgggatacgtgtcttcccgactgttgcgcgattcgggcgtcgcgccgttggaatcgttgcacgtggaggccttgccgcctgagcagacggtgctcatcctgctgctcggatgcgcggtcatcgccgtggcccttgccgtgtcatgcgccgccgtgctgtccaaatccccgaaatccattctttcctctatgcgttaggagtcaccaatcatgtctaactgtctgcaactggaccatgtcgattacgcctacggcgcggcgaagatccttgttctctcggatgtcagcgcggatttcgaatccgggaagatgtatgcgatcaccggcccgtccggcgccggcaagagcacgctgctgtctctgctggccggcctggacgccccctcccggggagtggtccgcttcgagggggaggacatcgccgcatcgggctatgcgaagcaccgtcgggagcacgtgtccctggtgttccaggaccataacctgatcgactacctcacccccgaagagaacctgcggctggtcagcaccaaggccgatatgaagatcctcgaggaactgggtttgagccgtgaggaatccaagcgcaacatcatgcacctgtcgggcggccagcgtcaacgggtggcggtcggccgcgcgctggtcgccccgggccgcgcgatcctcgcggacgagccgacgggcagcctcgacccggagatgaccgacgaggtgattcatctgctgcagcatgccgcccatcagctcggcaaatgcgtgatcgtggtgacgcattccaagcgcgtcgccaactccgccgatgtcgtgctgcgtctcaggagcaagaaactgacccgggcgtgacccacctgggccgggcggcaccccggcgacgacccgcatggaatcatcgtcataatgacgcctgcgatccctggacatgagaaaccgcacctccgatcatcgaatctggattactccagtccaacaatcggggtgcggttcaaaaggccctttttttgtgtcggattacgaaccgcgcgtctcaccgcttgccgttgtagatctcgttgtcgatcacatcggcgaacacgcgattgacggccgggcgcaccactttcagcgacggtgtcaggcacttgttctcctgcgtgaactgcgtgtccagcacggcgaacttgcgtacggattcggcgcgcgagaccgtcgcattcgccttgtccacgtactgctgaatctcctcgcgcaccgcggcgttcgtggcgagccggtcgaccggcgtctccgtggacaggccgtgcgcgggcagccacaatgccagcgactccggatcgagcgtcaccaacgcgccgatgaacgggcgctggtcgcccaccaccacgcagtgctccacgatcgggcacttggcgatctcttcctccagcggaatgggggagacgttcttgccgccggcagtaataataatgtccttgatgcggccggtgatgacgatgtggccctcatcatcgatctcggccaagtcgccggtcctgagccagccgtcggcggtgaatgcctcggccgtcttctccggcagattgtggtagccgcggaacacgttcgggcccttgacctgcagttcgccttcgtcggaaatgcgaatcgaggagccgggcgcgggctggcctacggtgccgatcacattgtcggtcacgcgcgtggcggcgaacggggcggcggtttcggtcatgccgtaaccctgaatcatcggcagaccgatgccgttgtagaaatgcgctagatcgagcgacagcggtgcgccgccgcaggccacgtacttgatcttcgggcccagagcgccgcgcaccgtgcggtagacgagcgtttcgtacttggcgcgctcggcgatttcggcaaatgtgtgctgctcgccggcctgctccttgcggctccagacgcgcgcggcctcggcggctttgacaaacaggcggcccttccagccggcaccggccttatgcgaggcggcgttgtataccttctcgaacacgcgtggcacgccaagcaggtaggtcggttcaaacgaacgcaggtccggcagcagggttttggtgtccggcagatagccgaccacgccgtcatcggaggcgatggaggcgtactggatgaatcgtgcgaagcagtgggccagcggcaggaagagcagcaggcgcggatggtcgtcaagcaccacttcatgcaacgcctgcgaggcggagatggtgatggacacgaagttcttgtgggtcagttcggcacccttcgggttgccggtggagcccgaagtgtagacgatggtggccagatcgtcggcgcgcacggtggccacgcgctcgttcagttcctcgtccgaaacagccacgcccagaccttcgagcgcgcccagcgcgttgccctcgatcatgagaatctgcttcaaggcaggacagtggtccttgaccgagtcgagccggtcgaagcgctcgcggttgtcggcaaaggccagcttgaccgccgaatcgttcatgatgcgctgggcttgcggggcggagtcggtgtcgtagatcggcacgcttaccgcgcccactgcggccagtgcgaaatcgagaatgccccattcgagacgggtggaggaaaagatggtcaccgcgtcgcccttggcgatgccgagcgcgatcaggcccttggcggccgagaccacgcgctcgtggaattcgccggtggtgacgttctgccagcggccggggccgattttcttggcggcgattaccgtgtccgcgccggtgcgggcaaggcgatcggtaagtagggagtagatggtctggttgtcgcggatttcgatggattcgccaggcgtggtgtagtggtcaagcataagcgggccgtgtccttacgtgcgttgcgtgatggctgttgacaaaatcgagccattctgacaagttaggttacgctggcgtaaggttgcgcgcgttgtgggcaatggagaagttgtctgtctggttttgtggattgtatacaacgccgtgtctaaccggtttgctctacggttatgacaccgtgtccatttcgggagccatcgacttcctgcaggacaagtacgcgctgagcccggccctgcagggtctggtcatcagctccatcatgatcggcggcgtgatcggcgccggcttctccggcttcctgtccgataagtacggccgccgccgaagcactggtcgccgcgcaaaaagcagcactaggccgcgtttgctgcgtctattggcgaattgatcatatgggtcgtctgcgtgcagacgacccttttgcgttccgtcggcttctgacaccgtagaaacgtgctttctcggcttcgaggggctgattttgccttatctggaagtctacttccacttcgaggggctgatgcccaagtagacacggccctaaaacggcggaatgacgttgacgtgtagccgtttatacttccgattacatggatgaggagcccctcgaagcggagatagacttccggcaaatgcgaaatcagccccttgaaacggaagtaggcctccggcaaacgcaaaaatgagcctcctcgaaacggataaatgcacgtattgggtgtagtggatgcttcagcccctgatatcgaagcatatttttttggttggcgcgtctagcatgcgcactccgcaatcgataattctgtggcctctctcactttaaaagtctggcgtgtgcgagggcgttcgcttaaggtgaatgggattgcgcggaatgtggagcgcaggtacacatgacgagggcacaccgcaacaacacggcaaggggaagcggaccatgttcgacaaacgactgttccaattggcgcctggcttgaaaaaactcatagctggcaaagtggccctgatgtgggtaggtctgcttgccaacattggttttatgctgtcgctggtaatgctgctgaacagcttactgaccgctgtggcaccgccgctgctccaatgcggcggcacttcgcaaggcgcggcctgccccgtgccgttgtctgatcggcacggcgcggatgtgctgcccatggctggcgacgtcatgatttacgtgctgcttgcgctggtctgtatagcggtccgttacacggccaccacgcacgccacccgtctcggcaccgaagccgccgaacgagtcaagctcgctttgcgctccaagctgtaccgcaaaatggtggcactcggcccgtcctacaaaacccgcatcaagacctcggatgtggtgcaatccgccggcgaaggtgttgaacagattcaaagcttctttgaactgttcctgccgcagctcttctatgcgattcttgcgccaatcaccttgttcgtggccattgcgccgattaacgtgcccgccgctgccgtcatgctggtctgcgcgccgttcatcatcatcgtgaccggcatcgtctccatgaccgccgcccgcgccttcaagaagtactgggtgcgctacaccgatatgggcgccgcgttcctcgacaatctccaaggccttgagaccctgaaaaacttcgacgccgacgagcgcgccgccatcgagatggacaagaaagccgaaggcttccgcgtcatgaccatgcgcgtgctgcagatccagctgcgctcgctgaccgccatggacatagtggcctacggcggtgctgcggccggcatcggtgtggcgttatggcaatacgcgcatattggcgatgcttttgccaatggtgcgtccggctggtcgccaatcgcactggcctcacatctgcctggtgtgcttgcctacgcggcatacggcctgcactatctcatcccgttcggggtgggctacccgctgtctcttaccggtctgctgttcattgtgctgctgtccgccgaattctttattcccatgcgtcagcttggctcgttcttccacgtggcgatgaacggcatgacctccaccaagcgcatcttcgctctgctggacaccccggagcccgagcatggcacggcgaccctgccggccaacgattccgattccgctgacgacggtctgacggtccgcttcgaccacgtcggctattcctatgatgatgccgggcacggcgactccaagtccgcatccgcaaagaccgataagcaaggtgaaaccagccccaattccgccgtcgctcctgcgctcaccaacatcaccttcgccgcacggcccggtcagttcaccgccattgttggcatctccggttccggcaagtccacggccgcctcgctgctcgccggtacactggccggttaccgaggttcgctcacgctgaacggtgtcgaggtatccgatttgtcaggcgaaacactggccggagccgtcactgtgattggtgccagcagccatctgtttgcgggcgcattgcgcgagaatcttctgatggccttgcccgatgacgagattcctgattcgccggattccgtggactcccgtctgtggtccgcgctcgagcaggcgcgcattgccgacttcgtgcacgcacagccgaacggactgggcatgccgattgagtccgatgccgccaacctgtccggcggccaacgccagcgcatcgccatcgcccgcgcgctcctgcatgattcgccggtatttgtgttcgatgaggcgaccagcagcgttgacatggaatccgaagagctgatcctggatacaattcgcgaattggcgcaatcccgcggcaagacggttattatgatcacccatcgcatggccaacgccgaacacgctgatcaagtggtggtgctcgaacacggcaagtcggttgagaggggcacccataccgagctgatgacggcggacggcgtctacgccaagctgtttaccacgcaggcagatattgagaacttcggagaaggccatgctcggcgtgtgctgcaggttggttcccgcaagcaggagctgtccgacgacagtcggactgagggtggcgcagcgcgcgtaagcgcagaggcgggtatgacggttgaccgcctgcagtcagctttgccgacggcttccgttggcgggagtgagcaggcctcggctgagactccggctggtgttgcaaatagcgattcgtcttccaaaatgagcacattccaagtgatcaggcgactgcttaaggaagcccgacctctggcaggactgatggcagcggcctccaccgccggcaccatcggccatctttcggccactttcctgcccgtgttcggcattatcgcggcatttgcacttaccggtaatccggtgtggggcatgggtgttgcgcccgccgtcatcatgatgattatctgtgctcttctgcgtggcatcacccgatacattgaacaatatctgaaccacaatgtggcattccatctgctcgcactcttccgttccaaggcgttcgccgcgttgcgcagactggcgccggccaagctcgcgggcaaaggtaagggcaaccttatcgccatgctgaccaccgatgtggaactgcttgagatcttctttgcccacaccatcagtccggtggccatcgcggtaacctccaccatcatctacacgattgtggccgccaccctaagcccatggatggcgctggcgttgattgccgcccacctggttatcggcatccttgtgccgcgattctttgccaccggcgtacgtaaccttggccctgccatccgtggcgctgccggagaactcgacgatgtgatactcgatgacatgcgcggcctggacgaaatcatccgatttggtcgcggcgaggaacgtgcgcaggccatcgaggaccgtacccatgcgttgtggaaggatcacgccaaactcagcaaggtcaacggccgtttcaccggaatcagcggactcttggtggctgtgctcacagcggcttcggtcgccgtggctattgcctgtgccggcgcgaacccgcagagcattccggctctgattgccgccttcgtgctgttcgccggctcgttcggaccgactttggcgctcgccgccttgcccgctaacctgactcagaccttcgcgtccgctagccgactgttcggactgatggacgaggtgcccgctgtgaccgagaacggcactgttgtgccgcaggagtatatgggcatgcgtcttgatgacgtcacctttgcatatgcgggggagcgcgaagtcctgtccgacttctcgcttgacgtgccgcagcatggcgtgctgggtatccaggggccgtccggccgaggcaagtccaccatgctcaagctgctgctgcgctactgggatccgcagcgcggtcaggtgacgttgtccggcacgccgttgcccgaggtcgatgtgcatgctcgccgacgtattcaggccatgatgagccaggaaacccacctgtttgatggctctatccgagacaatctgctgattgctttgcctgagtccgaggttgaagctgcaaatgttgcaggcaatggggaagtgggtgccaagaccgttgattcccgacagcagcggttggcggcgcaatcggcagagggcgatgccgttcaggtggcagcatctgacggtctcgacgctcgtttgcgtcaggctctcgccaaggcctccgtgcttgatctcattgattccctgcccgatggccttgatactcaggtaggcgagttgggcgaccgtctatccgaaggtgaacgccagcgtatcggtttggctcgtgtgttcctgcgcaatgctgatctggtgcttttcgacgagccgaccagccgtttggatgctttgaacgaggctattattctacgttccattcacgctatggccgtgggtgagcagcatgcagacaaggagcgcggcgcggctgtggtgctggtctcccaccgcgaatccgccatgcgcattgctgatgcggtactcaatctgtaactgcctgtaactacgcgggaattacatcgcattgcgttacgttaccgcgttgcactgcggttcctcgcgggtggcggcgatgccatctccggtcgtcattgcgttgctgcgtttgtgttgcgatatgtgatgcggcaacgcagcaatgcggcaatgcaatgtgatgtggcaacgtggcaacgtagcgatgcaataacgcgacaacgtgacaacgtagcgatgcaataacgcggcaacatggcaacatggcaatgcagtaacgcaacgcagcattcacgccttgatcaaagtgccgatgatgagcgccttctgcagccctgggcggaacaggtcgtgaaattcatgcgacatttcggtttcgagtttgaccgatgcatggatgtcgtcagtgcgaaggcgtgcctgttcggtgccgatgatgtgctcgagcaccgcgaatccctcttcggttttgccggcttgaatgaggaatcgtgggctttccggtgctcgcaccatggagagcaggaacgcggcggccggaatcgcacccagcctcagcatccaacgccaaccggcgttgacatcccagcttctggaaccgtaggaggcgatgatgtagttgatgacattggtcaggaagatgccgcataccgcgaggagctgataggaaaaggcaagcagaccgcggatattgaccggcgcttaaggccagaccgaacgtatatttgcccgatccgtgagtacgtatggttgttcccaagggattgcgctgcttggaagcagcttgaaacaggcccgccatgtgcttttcctctcaatacagctatggggggtgcctgttcatactagtcagattcttgtcatatggcgttgaatatctacaaatgtgggcactggtgaggcggctgagtggtggaatcgcgccgtggtgtgtgggtgttggggactcacgagcatgctgcgcgttatttggtggtgtgctgagagtcgggacctactcacgttgggggaggggatgaagagcctctgagacaagtcgctgttcgactggagatttgctcacgtggaaagcatggaaaaggcgaaaaaatcaggcgtgtcgggtgatttgacaaattggtacacaggtgtatcatcttaggtattggtacacggatgtaccaaagaaaacaccccaaggaaaggtggccagaggagacttcgcaagcggccaaacgaattgaaatccaacgtagcagtcgattcgtttttggcaatcggaaggcagtcaaagacagccggaagataaccgagaagtaaccggacgaaaaccggaagccagtcggaagaaagccaaccacccgcaagccaactccaacggctcaggaggagataacatgcgcaacaccaagaaggtcatcgcagcaacggccgccgtggccacgctcgtcggtctcgccgcctgtggcagcagcagcgacaacagcgccaacaagggtgacgccgacaaggccgaactcgtgttctggggctgggattccggcaactccatgaaggaaatccttgccgacttcgagaaggccaaccccggcatcaccgttaagttcaacaacaccggcaccgccgagaagacttccaccgcgctctccaacgccatcgccgcaggcaacggcgcccctgacgtcgtgatgctcgaagatccgaccgtcacccagttcgccgtcaccgagggcctcgtggacctgagcgaattcggcgccgacaaactcgccgatgacttcgccgccggcccgtggaacaagctccagtacaacaacaagccgtacgccctgccgattgattccggccccgagatgttcttctacaacaaggcagtgttcgacaaggccggcgtggacggcgagtccatcaagacctgggacgactactacgaggccgccaagaagatccgtgccaccggctcctacatcaccaatctggccggtacctccaacgactatcagccgttcacagcccagatctggcaggccggcgcccagccgtggaaggtcgatggcgagaacatcaccatcaacatgaccaaggacgagggcatgcagcgctatatccaattcgtccagaagctcatcgacgaagacctcgtggacaccaagaccccgaactggtccgacgattggaaccgcgagctcaacgatggcaccctcgcctccctgaccatcggcgcttggatgccgatcaacctcatgggcggcgcccccgatcaggctggcaactggcgtgtcgcccagctgccgcagtgggaggaaggcaaggaagtctccgccgaagacggtggctccgcacttgccatcaccgcgcagtccaagaaccaggccgctgcctacaagctcgttgagtacatgacttatggcgagggcgctcagaccatggccgacactggtaccttcccggccctgaagaagatcctccagtccgactccttcaccgacccgaccgccgagtcccacaagaagaccaacgactacttcggtggtcagaacgtcaacgaagtcctttccgccgcggctcagcgatcgaccgagaagttccagtacctgccgtacaacccgtacgcccagaacgcttacggcgacgaagtctccaaggcttactccggcgacatcaccctggagaaggcgcttgaaaactatgccaacaagctcgccgagcaaggcaagcagcagggctacaacgtcaccgtcaagtgacgcaatccgatttattgccggtacatccggcactgaccaacaatcaaaacctgcggctaggccactctccttccgcctagccgcccgatctcccaaagcggggatgctccccagtgtccccgctttgccatgccctcacctgacgtgaccgttccaatcgagcgaaccctctgttagcgggcgcagcacagcaatccgtatcccaagaaagcaatcgattatgtccgatcaaacaatggccgcagccccgcagccagcggtgggaattctgcctgagaaggcggatctgcacacggccgaggctcgcgtcaacaagcacaaggccgactggcgtggatggaagttcatgtggccgttcgccgtggtgttcgtcttcgtgttcatcatcccgattgtgtacgccatttacatctccttcttcaagaagcagatggtcggcggcaccaagttcgtcggcttcgagaactacgcccgactgattcaggatccgcagttctggagctcggtgggccgcgtcactatcttcaccgtattccaggtgccgatcatgctgtttctggccgcagccatggccctcgctttggattcgatgaagctgcacggtaccaagttcttccgtatctccacgttcttgccttacgcggtgcccgcagtggtctccaccatgatttggggcttcgtgtatggcgccaaatacggtctggtcggctccctcaacgacttcctcggcaccaacatcgatgtgctcaaccccgacgtgctgcttgcatccatcgcgaacatcaacacgtgggaatacgccggctacaacatgctgatcttctacagctccctgagcaccattccgcacagcctgtatgaggccgccagcatcgacggcgcttcggagtggcagattgttaagaagatcaagctgccggagctgaagggctcgctggccatcacggtgatcttctcgatcatcggcagcttccagctgttcaacgagccgagcattttgcagaacatggttccgggcaacgcgatcaccacgtactacacgccgaacatgtacgcctacaacctgagcttcaccggcaaccagagcaactatgccgcagctctggccatcgtgatggccatcatcaccatggccattgcgtatgtcgtccagcttaagagtatgaaggagcagatgaagtaattatgagcactgcaaccatgacttcaacaacaaccatgaccccggccgatctcaaggctcaggaaaaggccgccaagaaggccgagaaggagcgtcagaagcgcatcgacgccgacgagaaggccgagcgcaagcgcgccgccaagaccggtttctccaacccggcgaacccgacccgctcgatggccttgaccatcgtgtgcgcgattttcgcggtctactgcctcttcccgtttgtctacttgatgatcaacgccacgaagacgcaggccgatttcacctcgacgttcggtctggggttcggcaagacgttcgctttgttcgacaacatcgcgaccgtgttcacctaccaggacggtatcttcggccgctggttcgtcaacacgattctgtatgtggtggtcggcgccggcggtgccaccttgctggccatcatgggcggctatgcgctggccaagttccgcttccccggccgcaagctgtgcttcgtgatcatcatcggcgccatttcggtgccgggtatcgcgctggccgtgccgcagttcctgctgttcgccaagatgggcctcacgaacaccccgtggtcgatgattatcccgagtttggtatccacgttcggtctgtatctgatgtggatcttctccgatcaggccgtgccggatgagctgcttgaggccgcgcgcgtggatggtgccggcgagttccgcaccttcttccagatttccctgccgctgctggcacccggcatcgtgaccactgcattgttcgccattgtggcgacgtggaacaactacttcctgccgttgatcatgttgaaggattccaactggtatccgttgacgatcggtctgaaccagtggaaggaccaggcttcaaccgcaggcggtcaagctatccaaaacctcgtgattaccggttcgctgatcacgatcatccctctggtgattgcgttcctgtgcctgcagaagtactggcagtccggcctcgctgcaggcgccgtcaaggagtagttgctactctttgacggttctcctcagtccgcttcgcagatagctcccctcagagaggggagctgaagaaatggggtcttgtctcccttttctgaggagagctgtcgaacgcagtgagactgaggggcaaagcccaaaactggcaaacacagcaccggccataagccgatacaataaaggacttgattgatatgactactcgcagagcattccgttggccgtctttgttgacgccgaatggtcgtggcatcgcgttcggcggtgactacaatccggatcagtggccggaggagacgctggacgaggacatccacctgatgacccaggctggcgtcaacactgtggccctcgccatcttcagctgggacaagatcgaaccgcgcgagggcgagttcacgttcgagtggcttgaccacgtgatcgacaagctcggcgcggcgggcatcgccgtggacctggcctcggccactgccacggccccgttgtggctgtacgagcgtcatcctgaggtgctgccaatcgatcggtacggccatgtggtcaacgcgggctcacgtcagtcgtggcagcccacaagcccggtgttcaaggaatacgcgttgcgcctgtgccgcaaacttgccgaacactacaaggacaacccgtatgtggccgcctggcacatgggcaacgaatacggctggaacaaccgctacgactactccgacaacgccttggccgcgttccgcacgtggtgcgaggccaaatacgggaccgtcgacgcgttgaacgaagcgtggggcacggccttctggtcccagcacgtgaacagcttcgacgaggtgttgctgcctcgccacatgggcggcgacagcatggtcaacccgccccagcagttggattacgagcggttcggcaacgacatgctgctcgacttctacaaggccgaacgcgacgcaatcgaagaaatctgccccggcaagccgttcaccacgaacttcatggtctccaccgaccaatgcaccatggactacgcgcaatgggcaaacgaagtggacttcgtgtccaacgatcactacttccatgaaggcgaatcccatctggacgaactcgcctgctcggacgcgctcatggactcgctcgcgctcggcaagccgtggtacgtgatggagcactccacctcagccgtgcagtggaagccccttaacacgcgcaagcgcgccggcgagctcatgcgcgactccttggcccacgtggccatgggtgccgacgccatcaacttcttccaatggaggcaatccgcatcgggtgccgaggcgttccactccgcgatggtgccccacgcgggctccgatacgaaactgtttcgaggtgtgtgcgaactcggcgccgcgctgaagacgctgtccgacgcgggtgtgcaagacacggaactgaagcgcgcggacacggcgattctgttcagtgcggaatccgaatgggccactcgctccgagaccctgcccagcatgaaactcaatcactggcatgacgtacgcgactggtatcgcggatatctcgatgccggagcgcgcgcggacgtggtcccgctcgcctacgattggagcggctaccagactatcgtgctgcccaccgtgatcgccctgtccgacgaggatacccgtcgcatcgcggactttgccgaaaacggcggtacggtcatcgtcggctatgccaccggcctgatcgacgaacacttccacatcggtctcggcggataccccggcgccggcaacggacttctgcgcgacatgctcggcatccgctccgaagaattcaacatcctcggagaagaagccgaagacgaaccggccgaaatcggtttgtcgaatggactcacgacacgtctgtggcagaatgacgtgacctcggtcgctccagacactcgcgtgcttgccacgtacgtgggtacagccgctgctgactgggagctcgacggcgtccccgccatcaccagtcacccccacggccaaggcgccgccatctacgtgggctgcgatcttggccgccacgacatcacccacttgctcaaggaactcaacacaacagccccctccgacgaaagggctcccgaccaaaggccgggtgggggagagatcaacgccgcaactacgaccgcagcagccacgactcatgacccccgcatcctgcacaccatccgccaatcctcagacggtaccatccgcttcgatttctatctgaaccgttcgaagcagcccgttgccgtcaacggtgtggaaggtgatcccatcatcgcccaccgttgcgagactgacgccgttggatatacgctgaaccgcaacgccattcttatcgctaaaacgtcctgctaaaccgcgctagaatggcaatgttgtccggatagaggagtgtggcatgagcgacgagaaaacagccaagcgtcgagtgacgctacgcgatgtcgctcaggccgccggtgtatcgctcaaaactgcgtcgaacgtgatcaatggctccgggcgtatgaccgatgaaacccgtacaaaggttgaaacagtcattaaggacctcggctaccgagtcaacgtggccgcccgcaacctcaaccgcgatcacaccggtttcatcacccttgccgtgccttcgctgattccgccatatctggccgagttagccaaccgcaccatcgaggccgcccgtcagcgcgactactccgtatacgtcaccacgtatgcagagggctcggccaaaggagcgcgtgacctgctcaagaacttcaactccaccgtgtcagacggcatgattctctccatgagcgaggtggaggatatttcgcccgaagacctgaaggtcgatttcccgctggttattgtcggtgcccgaaccacatggggtgttgccgaccacgtgactccggacgatgttgccgccgcagcaacagcggcaggctacctatacgatcgaggttcttctcgcctcgctgtagtgggcgcacgagacgactataacgcggccgctttgttgcaggctgtggaaggcaacgcacaactgcgtttgcgtggtgtcattgaagaaacgcgccgccgtgggcttgagctggatcctcatctgattggcaacaccgatcaggattggaccatcggcgctggcgctcgcgtgactcagcgactgattgattccggcgtgccattcgacggtgtgatcgcactgaacgatcagttggccatcggcgcattgaccgctctgcgcaccgctggttatgaggtgcccgcgcaggtgcaggtcatcggcttcgacaacaacgaggaagccccctacctgcagattccgctgaccaccatggattcccgccttgactggacagctcccacggcagtgaatcgcatcctcggacgcatcgatggcagcatcaccaaacccgaactgctcaccaccgaatcccaagtcatcgcccgcgcctccacgcgctgacgctaatctggctcccctccctggggggagctgtcaccgaaggtgactgaggggagccttgcggaacattgtcatctcccgtcgtaactcgtaattgtcactcgtttgagtggccccatgtgtcatcggaggtagccgttcactccgctccgagttcgtgcatctctctccccccccc

SEQ ID NO: 906 - DNA, 14224 bp, Unknown
  gut microbiota DNA sequence
cgtcggagcttttggggataaacaaaaccgccgccccggatggctccgaagacggcggtcaagtggtagcggggcatggatttgaaccatggacctctgggttatgagcccagcgagctaccgagctgctccaccccgcgtcggcttgtctctcagacagctctatctacaataggtgcagattccagaaagtcaacatcggcgtgtcgcgtcatcttcccgcggttttaaaacgtgaattggctcatgcagcgaggggtttggggcggagtcggagtcggggtaataacgcgccataaatggccgttataggaatgccctgaaccgttatcccgaatattgacataataggaacatgcctatcaagatccccagtggcctgccggccagagatatcctcgattcggagcgcatcttcgctctggagaagcccgaggcggagcgtcagcgcgtccgcccgctcaaactggtgatcctgaacttgatgcctaagaaaatcgagactgaaacacagctgctgcgtctgatttccaagtcgccgctgcaggtcgaaatcgacttcatgaagacctccacgcatgaggccacgcacgtttccgccgatcatctcgtcaagttctacgaaaacctcgatgcgttcaaagacaactattacgacggttttgtggtcaccggcgcgcctgtagagcatatgccgttcgaagatgtggactactgggacgagttcaagacgattctcgactgggcctccacccatgtgttctccaccatatacctgtgctggggtgcgatgggcgcactgtactaccgctacggcatccacaaggtggattaccccgagaagattttcggcgtattcccgcagtacctgcaggatgaatactgcttcctgaccaatggcttcgacgagattgatctgcagccgcactcccgcctcgccggcgtgaacgaaaacgaggtacgtgccaaccatgaccttcagatcttgacttgggggccgcagtccggcccgggcctgatcgccacgcgtgacttctccgaagtgttcgcgctcggccattgggagtacggcaagtacacgctcgccgaagaatacgagcgcgatatggccaagggcatgaccaacgtgcccttcccgaagaactacttcccgcatgacgatccgaagctggaaccgttgttcgcctggcgcgcccacgccaatctgctgtggcgcaactggctcaactgggtgtaccagaccacgccgtatgacctgaccgaggtgccgcagctcagggctgagaagaagctcggtactgatcgttcgattcggcatgagccgggcgggccgcgccaggatgatttcaagccgtttgtgcatgacgggtatggggtgattcagggctgagcctacgatctcccctcagtcgcctacgacgacagctcccctcgacggggagctcctttgcttctccttcacggctcggcccatcagagggagctactgttggaggttgcgttcgtagcgtggacggttgttcgtccacgatgtggacggcttgatgaacgtaatgccacacatccgcgtaatgcgaccaatagtgcacaacgttcgcgaaacgcccgggaaaaccttgcagcagtagggatttcaggagactcgccggtataatattgacattgtctagacgcaggcaaataatcactcttcagtcattcggagccgaatgcccagcgcagactccgtgtccatgcccggcagactccacaccgaggagacaaaaaaagacgaaagtaacgagcacgtcacatttgcctgcccggtgggtttaaactgacacctgacattgaagaagcaggaggcgtgatatggtcggttcgctcagcgcaggattgctgttggctgacgaggcaggcgctcatctgccctcggttgatgacttccttcccccggagattctgttccagggaactccgtttgccatcaaccgcattattttgattcgtatcgtggcaaccatcgtgctgttggtggtgctcggcgtgaccgcaaagcgcgccaagctcatccccggccgttggcagggcgtagtcgagtacggtctcgacttcgtgcgtgacaaggtcgtgtatgacgtgatgggtgaggcccgtggcaagcgctacgtgccgatgatcaccaccctgttcttcacgatcttcattttcaacctgtgcggcatcattccaggtatgaacatggcggccaacgccacggtggtcatgccgctcgtgttcgctgtctggacactgatccagtactggatcgccgccatccgctcgcagggcctcggccactatctgcgccacgagctgttcacccccggtgtgccgtggccggtctatttcctgctggctccgatcaacctgcttgagctgttgatcatccgcccggcctccctgaccatccgtctgttcgccaacatggtttccggccaccttatggtcgccacctgcctggcgttcgcacagttctggatggttgacgcggtcaacaagctgcagggcatcccggtgggtgcgctgtggttcgccggtggtttcgccatgacctgcttcgaggcgttcgtcgccttcctgcaagcctacgtcttcgcgattctttccaccgtgtacatcaacctgagcttcccggaagagtgacgggcgactaacccgccgcttccggtccccggtctgggaaaatcgcagaccgaccaaaccccaagatttataacgtcgccaagtacgttagaaaggaaacacaatggatatcatcaccctcgcagaggtcgccggcaacctgtccgtcatcggttacggtatcggtactcttggccctggcattggtctgggcatcctcttcggcaaggccatggaatccaccgctcgtcagcctgagatgtccggcaagatccagaccatcatgttcatcggcctggctctggtcgaggtgctggcactgatcggcttcgtcgccgccctgatcatctgatctgcgcagatcaacagacgaaaaccgattatgtccatcactgaaaggagggcttgatgacacaagcagcaagcgggattgacctgttcattcctgaggtttatgacatcgtatggtcgctgatcattcttgtcatcgttgcggtgttcttctacaagttcttcatgccgaagttcaatgcgatcttcgacgagcgcgccgccaagattcagggcaacatcgccaaggcggagcaggctaggaaggacgccgacgaggccaaggccaagtatgaggcccagctgagcaccgcccgtgtggacgccgccaagattcgcgacgacgcccgtgcggaagcgtcccacatcatcgccgacgctcgttcccgcgccgagtccgatgcggcccagatcaccgcatccgcacagcgctcgatcgaatcccagcaccagcaggccatcgtctcgctcaagggcgaggtcggcgcacttgccaccgccctggccggcaagatcctcggtgccaagctggaagacaacgacgtgcagtcctcgatgatcgattcgatgatcgacgacctgggcgccaagaagtgaccgtgaccatccgtaaccagaaagggaggtgaccatgcgaggagaggcatcacgtattgcagaccgcgagtcgcgtgattcgctggccccgaaactgcgcgacacccgtgaggacgcgtggcggatcggcaacgaactgttcacgatcaccaaggtgctcgatgacagcattcagctggagcgcgcactgaccgacccgtcccgcccggttgccgacaaggtggccgtcctgaaggaactgctcggtgacaacgcgcatccgatgaccatggagatcatgactgacttggtctcccgccgttggagccgtgcgcgcgacatcgccaacgcagtggaagacttcggcgtggacgccatgatgtactacgcggacgccactgacgccacgctgcaggtatccatcgagctgtccgagctgcattccgcactgctgaacctgccggtcgtacgcgccaagctgtacgactaccaggccaccagcgaggcccgtgtgaagctgttccgcgaggtgttctctggcaagaccctgaacaaggtcaccatgaggctcgccgaacacgccacttgcaacctgcgccgccgccgctacttggagaccatccagtggctgatcaacaagttctcccgccacatgggcgagtcgatggtcaccgtgaccaccgccaccccgctgaagaaggagcagatcaagcgactggtcgaggtctactccgccaaggtgggccgtcaggtgcacatcaactcggtggtcgacccgaccgtgctgggtggcatgcgcatccaggtgggcgacgaagtcacggacaacaccgtggtcgcacagctgcagaacttgcatcgcaaggtgcagacggaggcgactccggcctgaccggccgagccaatccgtccaacaccacacacaagcaaagacttgactgaacaataaccaatagaaggagtgatcatggcagaactgaccatcgatcccgcctcgattcgcaaggccctcgacgacttcgtgtcgtcgtacaagccgagcgacacccccacccaggaagtgggctatgtcgccacggccggtgacggcattgcacacgtgacgggattgcctggttgcatggccaatgagctgctgacgttcgaagacggcacgctcggcctggcgttcaaccttgacgcccgtgagatcggcgtggtgatcctcggcgatttcgctggaattgaggaaggccaggaagtgcgacgcaccggcgaagtgctttccgtgcccgtcggcgacggctatctcggccgcgtcgtggacccgctgggcaagccgctcgacggcctcggcgagatccagggcattgagggtcgtcgtatcctcgaagcccaggcccccgacgtgatgcaccgccacccggtcgacgagccgctgtccaccggcctcaaggccatcgacgcgatgaccccgatcggccgcggccagcgccagctcatcatcggcgaccgccagaccggtaagaccgccatcgcgatcgataccatcatcaaccagaaggccaactgggaatccggcgacccgaagaagcaggtccgctgcatctacgtggccatcggccagaagggctccaccatcgcctcggtgaagcagagcctggaagacgccggcgccatggagtacaccaccatcgtggcctccccggcagccgattccgctggcttcaagtacatcgccccgtacaccggctcggccatcggccagcactggatgtacaacggcaagcatgtgctcatcgtcttcgatgacttgtccaagcaggcagaggcctatcgttcgatttccctgctgctgcgccgcccgccggggcgtgaagcctacccgggtgatgtgttctacctgcactcccgcctgctcgaacgttgcgccaaggtctccgatgacctgggcggcggttcgatgacgggtctgccgatcgtcgagaccaaggcgaacgatgtgtccgcctacatcccgaccaacgtgatctccatcactgacggccagatcttcctgcagtccgatctgttcaacgccaaccagcgccccgccgtggacgtcggtatctccgtctctcgagtcggtggcgccgcacagaccaaggctctgaagaaggtctccggtacgctgaagatctccctggcacagtaccgttcgctggaatccttcgccatgttcgcctccgatctggatgcggcttccaaggcccagttgacccgtggtgcccacctgaccgagctgttgaagcagccgcagttccacccgtactcgccggaacaggaagtcgtgtccgtatggaccggcacccacggcaagctcgacgacctcgacctgaaggacgtccttccgttcgagcagggactgctggactacatcgaccacaacaccgatatcctcaagaccattcgcgagaccgaggaattcaccgccgacaccgaggctgccctcgataaggccgtggacgagttccgttcgacgttcgtctcttccgccggcaagccgctggtcgagaagaagccggacgttgacaaggccgcgccggtcgatcaggaaaagatcgtggcgggagaaaagtaagccatgggctcgcaactcgcattgaaatcacgcatccgctccaccgagtcgttggcgaagatcttcaacgctcaggagatgatcgcgtcttcgcatatcgccaaggcccgtgatgtggccctgaacgcgaagccgtacaccgatgcgattttcgatgccgtgcaagcgttggtggcccacacccatatcacgcatccgatcgcggtgaaggacgagaagaacccgcgcgtggctgttctcgccctcacctcggatcgtggtatggccggcccgtacacctcttcgattatccgtgaaacggagtcgctgctgtcccgcctcgatgcggcaggcaagcagccggagctgttcgtgtacgggcgtcgcggttcgacgtactacaagtaccgtaatcgtgacatcgcggcgacgtgggaaggcgacaccgaccagcccggcgtggaaattgctgaaacgatctccaacaccttgatggacgcctacatgaagccggctgagaagggtggagtttccgaactctacatcgtctacaccgagttcatcaacatggtggtgcagaaggtgcgcgtgctgcgcatgctgccggttgaaatcgtgaaaaacgagaccaaggtgcccgatcctgatgaagaggcaccggctactgcggatgtcgctccgctgtacactttcgagcccagcctcgaaaaggtactggatgcgattctgccgaagtacattcagtcccgtatccacgagtgcctgctgaccgcggccgcgtcggaaaccgcaagccgccagaacgccatgcacacggcaaccgacaacgcacgaaacctgatcgacgaccttacgcgcaagctcaacgcttcccgccaggcctcgatcacccaggaacttaccgaaatcatcggcagcgctgacgcgctgaccaagaaggaagagtaggaacgcatatggctgacaaccagaccactgcggccgagcctaccaacggtcgcgtcacccgcgtccagggctcggttatcgacgttgaattcccggtgggtcatctgcccgacatctacaacgccctgaaagtaacgatcgtcaacaccagcgccaaggaagaaggcgaggcgaaggagaccgagatcaccctcgaggtcgaacagcacctcggtgattccacggtccgttgcgtcgctctgaagcccaccgacggcctggttcgtggtgcctccgtctccgacaccggcgccccgatctccgtgccggtcggcgacgtgaccaagggccacgtcttcgacgtgtccggtaacatcctcaacaagaagccggatgagaccatcaccgtctccgagcgttggcctatccaccgcaacccgccggccttcgatcagctggagtccaagacccagatgttcgaaacgggcatcaaggtcatcgatctgctgaccccgtacgtgcagggcggcaagatcggtctgttcggtggtgcaggtgtgggcaagaccgtgctgattcaggaaatgattcagcgcgtggcccagaaccacggtggtgtgtccgtgttcgctggcgtcggcgagcgtacccgtgagggtaacgatctgatcggcgaaatggccgaggccggcgtgcttgagaagaccgcactggtcttcggccagatggatgagcagccgggtacccgtctgcgtgtcccgctgaccgcactgaccatggcagagtacttccgtgacgtgcagaaccaggacgtgctgctgttcatcgacaacatcttccgcttcacccaggccggttccgaggtgtccaccctgctgggtcgtatgccttccgccgtggggtaccagccgaacctggccgatgagatgggttccctccaggagcgcatcacctcgacccgtggtcactcgatcacctcgttgcaggccatttacgtgccggccgatgattacaccgacccggccccggccacgaccttcgcccacttggatgcaaccaccgagctttctcgtgacattgcctccaagggtatctacccggctgtggacccgctgagctccacctcgcgaatcctcgatccgcgttacgtgggccaggctcactacgactgcgccaaccgcgtcaaggcgattctgcagcgtaacaaggagctgcaggacatcatcgccctgatcggtatcgacgagctcggcgaagaggacaagaccaccgtgaaccgtgctcgtaagatcgagcagttcctcggccagaacttctatgtggctgagaagttcaccggtcgccccggctcctacgtgccggccgacgagaccatcgaagccttcacccgcatctgcgacggcgtgtacgacgacgtcccggagcaggcgttctccggcatcggcggcatcgacgacctcgaagagaagtggcacaacatgcagaaggaactgggtgcgtgatggctgcggaaaaaaccacgatgaaggtcaacatcgtcgccgctgaccaccctgtgtggcacggcgaggcgacgagcgtgaccattcccgcctctgagggcggcatgggcatcctgcccgaccatgagcctgtgctcacggtgatcaagcagggtacgctcaccgtggttgagcccgatggcgatcgccacatgttcgaggtgaccgacggattcatttccttcgactcgaacaaactcaccgtggcggtcgagcgcggccacgacgtccagtactccggcaccgccgagtgacctgaaccaactccttaaggggctctctggttttccagagagccccttttgctatgtatgccatgtgttgcgctacagtggtggcctatgcgagttattgttgccgactgttcggccgagtattcgggccgcctcaacgcctcactgcccctggccaagcgcgtattgctgatcaaggccgattccagcctgttgattttctccgaattgggctcctacaagccgctgaactggatgaccgcgccctgcacgattcgtgagatcgacccagccgccaaatccgcgcaacattcccgggaaagtgtcgctggtggggctgtggatggtgattctgcgacgcattccccggaaagtgtcgccgctggtgagccggaaaaggtgctacgtgtcagcgccgacaagggttcggacattcttgaagtgacgctgcagcatatctattccgaccaaacctatgatctgggcgaagatccgggtctcatcaaggatggcgtggaagaccatctgcagcgctatctggccgagcaaatcgagcgtatcggcaagggagccaagctggtgcgtcgcgaatacccgaccgccattggcccagtggatattatggccgtgaatgccgagggcgagcatgtggctgtggaaatcaaacgtcacggcggcattgatggcgtcgagcagctgactcgctactgcgaactgctcaatcgagatccgctgctggccccggtgcacggcatcttcgccgcacaaaccatcacgccgcaagcccaggtcttggccaaagaccgcggcttcacctgcctcatcctcgattacgacgatatgaaaggcaccgaggacgacagtctcaggctgttctagatatagcaggggctccctcatcagagggagcccctgctatatcttttagtacgcggcgagaatatcgattacgaagaccaacgtggagttggcgggaatcggaccttgctccttatctccataggcctgatccggcggaatcaccagcagaacctgagagccgacggtctggccgaccagacccttctgccagccctcgataacctgatgctggccgctggaatcgctgaacagatcggcgtcgattgtggaatcgcgatcccaggacgaatcgaactgcttgccattcgtaagccaaccggtgtacttgaccaccacggtgttcttgtcggtcagcttggcgccgttacccttgatcagcgtctgcgagatcagcgaatcaaccgaaccctgaccgttcatgtcgatggacggctcgccgtttttggctcgcgtcaccttcggcagattggccggcacatccttgacttcctcgccagtggccttctccaagtccttggacttggacacaaacgtcatcgccagaatgtaagagtacccggacgaatcctgagcgttgacgccaaagccaatcgtggtgttgatcttggcacccttgatctggttgtagtaggtcgaggagagggtcttggaatccaccttcagcgagcaatccggcgtgttcttggtccaggtgtccatgagctcggttccgtctttaacgttgagcgcgatgccttgggcgcagacgcggtcgccctcctcgatcacgtcgccatcgcccttctgcagcaccacataagagccgtcggacacggtcatcggcgtattaaaggagatggtcggcttctcgccgagcttgcccttggcggtcacgccggcaatttggcccttcttgtcagaagagtcggaagatgaagaggaatcggaagaagaggatttcgagtccgagctcgaactggagcaggcagccagcgacacgcacatcgccagcgagcaggcaagggcaacggccttgccgaggggagataacatagacttaacagacttacgcatgacacatcaccctactggtaaaccttgattttctgcgctcctaggtaataaacaggtgaagattgtagaatggttgagttatgagtgctgaagaacagactacaagaccggataagggcgccaagcgtccatcccgtcatgccaaaatcatgcgtggagtggtgacgcctatcttcggactattggccgtggcggctgtggtgttggggtacatgaatgccacgatgtggaagccctccactgaaatcaccgcttccgcaaccatgagcggctcccggtatgtcgtcactgatccgaatgtgctgaccttgttggatcagaatgccacgataaccgtggactcgggatcctctcaggacgaggcgtgcgtggcgttgggttcgtccaaggatgttgccggatgggtcgcgtccgagaagtcctatacccgcatcaccggattgacatcatggagcgagctgagcacccagaagggaagcagcacgagtcagggagcgcctgccagtgccgatgacgcggtggcgttcaaggattccgatatgtggactgccgtgaaatgcggcaccgggtccatttcgctggagagcaagaagaccggcgcctcgacggtggccattgtggatttgggtgaaaatgccaccaacgccaaggtgcagctgcactgggtgcgctccgaagtgccggactttgcgatgccgttctatctgtccggtggattgctggccgtgctggccgtattgtgcgcctccgtgttcgccatgccgccgcataagcgccgcaagcgcatggtggaaggcacggcaagcgccgtaattgaggaagaggcacccgccagcatcgcagtgtccgggaagccggatggtgcaagtcgacgtaatcgtcgccgtcacgccacacatcggcgttcggaccgtgcgtcctcgcaatcctcgcaatctgaagccaccgaaacaccggttatcatcgacccaagttcacgtaacctggtcgccgaccagcagactggtgccgagagcggcgctgagaccggcttcagcgccggcgataacgaatcgacttcggtaatcacccctgacgaactgcaggcctacttctcccgcttggcccaagaggtcaataccggagacgactcggccgatgacggacaggaggaaagctgatgaacaagcgatggaacaaactgtgtgtggccgccctcgcctgcgtggcgttggtcgtgccgttgaccgcctgtgaaggccggctgccgacgccggctgctgatacctccaccaaggttgcgccggatttgaccgaggcacaggagaagaagattcgcctgaagattctcaagacgatcgatgaagccgatcaggccaagaatcccgatggatatgcggccgttatgggcgggccccagctggacattcgcatcagccagaccacgatcaaccagcgcggcggcggtatgtccaaatacgcgaccattcccaaggacatcgcccagacggtgattcctacggacgacggatggcctcgctcggtgttcaccatcacgaccaccaccgaagatcagcagtccaagcgtttgctggtcttcgatcaggaatccgcccagcagaattacaagctgatggctatggctcgactgtttgagggcgccaagctgccgaagttcgagattccgactattggctcgcagatgggcaccgcaaaggatgagaagctggtggccgctcccgccgatgccttggcccaatacgccgatgtgctgcagaacggctccaagagccaatacgcttccaagttcgcagacgatttgctgcgccaggaactggccaataccacggccaaggtgcaggaaggtatgcaacgcaacaacggtacgcaggagcaaaaattcaccgctgtgcctgaacagatgtgggtgatgcgtgctgcagacggtgccggtgatctggtggttggccgtattaacggcgaatggactcgcaaggcaggggatggccgcgaatcgcggccggcttccgacgacgagaaggcgctgttcaatagcgacaagtacaccagcaccatgaaggtcacgtatgtgaacgtggtggccttgtacattccgttggcaagttccggtgagcaaatcaccgcagtgggcgccgaccgtcagccggtaaaggtcgaagcgctgtaattgttgccgccacccaccgcgcggttaacgcccccaccacgatgtgattcgtccaccacgatgtcgataaaactttacctttcgcataatggtgccgtttggggtcacatcgtggtgggcgttttgctacgtggtgggaattccaccgcgtagtggaagaatccctacgtggtgggaatcggcattacaatcaatgtcagcaaatgtgattgttgttgtacgcgaatcgcgtggaatcgggaggcattatggcagagcagcagttcaatccgggagtctcattggcgggcgccgtcgatttggaggcgctgaagcatcaggtcaaggccgagcccggacaagcgggcggcgcgcctgccgctggtgggtacgtgatcgacaccaccgaaaacaccttccaggcaatggtgcagacttctgcgaccttcccgatcctgctgcttctgtgggtgccgaccgatgaccgcctgttcccgatggcccgtgcgttgggcgacgcggtgaacgccctgaacggccagattcagctctcccgtatcgatatctcgtccaatccctcgattgcccaagcgctgcaggtgcagggcgtgcccgcactgttcgcgttgattgccggccgtccgatgccgctgttgcagggccttccgggtgacgacgagctcaagcaacttactgacgaggtgattccgaagattattgaggccgccgcgcagtctggtgtgaacggtaccgcgccgtactcgggtgatcctgattccgatgccgccaagagcgctggtgccaccggtgccgtcgcgggtgctgagcaggtgccgccggagcatgccgaagcccatcgtttggccgaggagggcgattacgccggtgccgccgccgaatacgagcgcgtgctcggatccgacccgtccgatgcactggccgcccgcgaacgtgcgaaggcgctgttgctggcccgctccggggccgctgatgtacgtgacgtacgtgccgctgccgccgcagcgccggacgatgtggaagcgcagttggccgtggctgatatcgacatgatcggtggccagattcaagacgctttcgaccgtttgctggactttttggccgccgggcacaaggccgatatcgagcaggttcgcaagcgtctgctcgaatacttcgccatccccgaacccaccgacccgcgtctgacccgcgcccgtcgtcgcctagccaccctcatgtactaagtggttttggctcccctctttgagaggggctgtcgtcgtagatgactgaggggagctcacgagcgtactcgattgctcccccccctaaacca

SEQ ID NO: 907 - DNA, 5795 bp, Unknown
  gut microbiota DNA sequence
gtgacggcctcgcccgcagtagcggggacaggatttgaacctgtgacctctgggtatcccagaggtccaaggtccaaacccatgccccggcttattctaagtttagcggcgtgacacatgatgtgtcatgacgaaaaaatgggtagcgcccccgttatggcgtgaggaattgaccggatggctcgcggcactgaaggccggtggccgcagcgagcaaacactattgaccagacggcgaaaaatgacatacacggccgtatgtctgggtgtctcgccgtatgaggtcacctgcgagatgatgacacagtggttcgcctcgcaatcctggaaaccggaaacgcgcaaagcgtaccgcaacacggtgtcgagcttcttcgcatggatgcggcagaccggccggcgcaatgatgacccaagcatggaactgccgaaagtcaaacgcccgagagcgcacccgcgcccgtgcccggacaaggtgatattggccgcgttggggcgtgccagcgagtccgagagaatcatgctgcggctcggtgccgagtgcggtttaaggcgtggcgagataggccgggtgtccagtggcgacgtggttgacgatctcgttggccggtcgctggtggtcaatggcaagggcgacaagcagcgcatagtgccgttgccggatgatttggccgacctgataagcgcgtgcgatgggtacgtgttccccggccggttcggcgggcacgtcgaggaaagctacataggcgacagactgtcgagcctgctcggtgacggatggaccgcgcacagcctgcgccaccggtatgctaccgccacgtggcaagccacgcacgacctgctgctggtgtccaagctgctcggtcacgcgagcgtggaaacgacacaggtgtacgtggcaatgccagacgaacggctgcgcgcgggcatggccgccgtgctgctctcagcctgacagttgcgcccatgtgacggtcttcaacaccgcgagaatcaacgcgcggagcttggtgtcatcgggcgtgctgcctttcagattgccgatgcggtcgtaggccattagtcggcgctccacacgtacacatcgaacgtggttttgtccacgtacatcgcgccggccacgccgctgccggtgggagcaccctgggtgaacacgatgcccggacccgccggaccggctgggccttgcgcgccggtttcgcccttcgggccctgcggtccctcgggtccgcgtgggccctgtggtccctgttcgccgcgtaggctgccgatttttccgaatgccatggttagttcctttcttggttgttggtgtagaggtccatggtgtccaagtcgaggtagatgtcacccggcttgccgtcgatggtcgggaagccgtgcccggtgaggaaccggggcatgctgtcgatcatggttttgatgtcgccggtgacggcctgccatgcggcgaggttgcgtcccggtttgaacgtgcgcgggtccacgtccgtaagttccgcgtattccagcgtgccggccgtgtcgggcacggtgaaccaacgaatagacccgtagggcacttgctcgtcggttttccaacaccagtcgggaccggtgggctggatgtccacggtggcttcgccttcttcgtccagcaccacggtgaacgtgtcgggcaacaccacacttgcgtcgtcggcgtggcgggcggatggttggaacacgaccatgccgacgccggcacgggtgccgccgttggtcggggcgcgtaatcgtatgtgtaccatcgtcatgattgggctactttccggccatgcgcagcggattgtatgccacgccgaaaccaccagcgataagaccgcccacggtggtgatgtaatcacccacggtcgggtcaccgaactgggtgaaaccgaaaccgaccgctacggcgatgagaccggccacatacgcgatggtgcgcacggtgttgttgaacactggtgtgtagcccttctcggcgtccgtgctgccggtggccttgtggtcggccactcccggagtgttcacggggtcgctcatttgcccgtccccttgtccttggtggtgatctggatgtcgagcgcggccaacttgctttccacggccttgcgcacggtgtcggcgatggtgttcgggtccgcgccgatgctcttggccagggcctccaacgcggccgtctgagccttctcgtacgcggtcgtcttggcctgcacgaattggctgatttgatcggcgcgcgccgcccacggggctttattgctgctgtgaatctctttcacgccggcgttcttcaacaccacgacctggtccgggtgtgataggccgacgcggccggtttcggggctccagtagtagcccacgccgctgtcgtcgtcccagataaccagtgctgtgctcatttctgtttctccttgactagatggattggttaacaattgattggcgcggtcgatgacccgttggacgggcagaccgttcggtgcgcggtcggggcatccgtaatggtccgtgccgggtatctcgcggtgcagccacacgttgccgttcaacccgtcgtgccagagcttgccgagcccgtaacggcggctaatgtccgcgcacaactgtgcggacgcctccacgcatgcgtcggtcatgggcacaccggccataccgccttcatgctcgatgctgatggtgctgttgttgctcgaaaaattcgcgtcggaatatgagccgttggcttcgctcacgtactggtgaatctcacccgtgccgccgatgccgtaatgggccgaagcctgcgaactcggccgctggaaaacggcgtcggtgccggagagacggccgaccatgatgtgcagggtgatgtgagtcacccgatgcccgttgcgcccgttgtaatggttcgggctgggcacttgtttgatgttcaatgccattgttgtgtccttttagttgtcgtgtttgaacaagccttcgggcgggttcggcgggggtggtggcgcgcccctgtatatgtggtcgatgagcgcgcggttatgctcccacaacagattcatgtcggccatggtgtccttgagttctgtttgcgcttcgtggagcatgtcggcgctgttttcctcgtgggtggctttgttgttgagccacgccacaacggcctgcacggcagcgccgaacgcgacgccgcacgcgccggctatcgcggtgatgaaatccaccatgtttcctttcaaatgagacgggatcacagggttatgagttcggcgtggtcgacgcaagcaccgatcaaaacggtgtggccaccgtcgattgggtccgacactccacgtctcctcaggcaatgctggtgatgctggcgagaacgccgtccgatgatctcaaccgattcctgagcccaatggtgtacgagctgaccaataatggcgctcaagtcaggttccgcaggaacgatagcaacgcctgggccgccaatcagccgacgaagttctactggctcgccctctggaagtaggtcaccagatggctaggtaagagaacgtgagcggccaggactcggcccagttgtgcgtgtccagacgccagaaacgcacttggaactcggtggcggtgatatcccacactatcgggttgaagattctggctctgtcgtcgccgtcttggttatttctgacgcgggttacgagcacggccttgggtttggtcttgtgcttggcgaacctgaccgaggccgcacccaactgtgatgtctggagggtgacggtgccggactcgtaaccctgtgttatcgcggcgatctgcgattgcaatgagttgatttgcgtgttctgcgcgtatttcacccatgccgaaccgttccaacagtaaggcccgttgttattgccgtctgaggtcacgtagccggtttggccggtggcgcctctcctcgtggcgagactggcgagcgtgcccgccatgacgggctttacgccctcgacggtcgaacgctggtccaccagtttcaacgcggcttccgtggtttccgccgcctttcggaaaccagcggccgcgttcgatactaggtcgccgccttctatgtagctgatgccgtagatgggtgtggttttcattcttggtttccttcccagttcggccggtcgatgccggtcgtgcttgtcggtttgtcgaaaactgtgaaccctgtcaattccgcgaacgtgaacacgcattgcgcgaatgtggccggccagtccgcgaagtcctgccagcgcatgccggtgttcgctgtggagtcgagcgggtacatggtcgcttcatgggtcatgccccgcttgtgggtgaacgtgatacgcccgccgatggtcgtgaacgcgccggagaacgccggtcgcccgtccatgccggtcaacgtgctcaaacgtatgccggtgataagcacgggaccggagggttcgggacggaacaggtgcgggaacgacaccgggtctaggttcgttccaatgaacttaatggactcgttgcgcagccgggtgtcgtgcgtgactatccacgatgccgccgcctgccgttgcgcgtcggacggggcgaacgtgccgcccgtgtgcaaaccgcccgagtcgtcgccggccacggcgtccgaatcggccgtgacgcttttctgcgtgtcagtgagccgtgtgggcagacggctcaaatccgtgtagacggtttccatgtcgtcgtattccaccacgccgtcgttgttcttcgcgcgtttggttttggccacggcctgcgtgaccggctccatgatggacagttccaaatcgccggccacgagattcgctggcaacgtgtcacggtgttggccgtccacgagcacgtacggcatgccatccacgcccacatgcacctgcaccgatccggccaacgacagcgggcggagggtgatggtttcacccttgtaatgctcgtaccatgcgggcgcgggcatgacgtgcgcgtacatgcgcgacaacaagtcaagttgcgacgggtaatcgtcggtcttgtacgtggcgactgccgggggcaattgcaacgattggggttcggctatgggagcgcccgcctgttgggcgcgcttgttgagttccgccaaccgcgcggccggggtgccgacccaatggcgtcccgcgtgcttcgcctcaccactggtggggccttgtgattgcaggcgtttccacatgaccatcaggcttgtggcggtcaaatggatgcgccacctgttgcccaagtcggtgacggtgccgccatggcctatcgtgccgatgaacagggtgggcacgttctcgcccggagcttctggagccgtgggcacgtattgctggtgcagttgggcgatggtgccgcgtatccgctcccatgcgcccatgctgtcgggcagcatgtcccacgtgggttccgcgctgagttgcaccagcacgcgcgagcccgacaatgtgacggccttgccggccaagtcgccagcccggtcgatcaggtcgaacgtgagcaccgccggatcgggttggctcacgggttcgtcggctccccacgaaatcgtgaaatcatccaacgcggcgatgtcctgccgatggtcgttgaccggcttccacctgtcgccggtgtccaagtacatgaatggttgttgtgccatcagcgtcgcaccccctcgtaatcggctaggagtttgcggatggccttggcggtgccgtccgggtccgccacggtgccgtcgatgtgcacctcgtagttgttgaccacggtcgtgcccgccaagcccgcccgtgttccgttgagcatggcggacatgctcgttgacgctagtctggtgt

SEQ ID NO: 908 - DNA, 36703 bp, Unknown
  gut microbiota DNA sequence
aacttacgctgttcccaagcgggcatcggcactacatgaagcagggcagacgggatacgagtggctggccgaacatacgcaatacatctaccggcaacttgggcactaccatttccgttgttagctacacttatcgcgataagtgtagctaacaacgattgaagcgacaccttacaagccatgagaggtagaaccgttccccttctattttgaaaaacttgaataagttagattttttcaaaatagggatgcgtcgaaaagacgcataaacgcacgaaaaatgcgggcatccgatatgcagtgttcattgaatcactgtatatcggatgcccgcaattgtttcagaccaattgaagagccttagctcagcatcagcctcacgccttggcgacctcaacggccagctcggcgccttccttcacttcgaaggaggtagccagcgtctcacgggcgatcagatccttgaactgctcgaccttggccacattggcggccggcacggtcagcaccagggcgatacggtccgcgatgtccagatcggcagccttacgtgcgtcctgcacagaacgaattacgtcgcgggcgtagccttcagccagcaggtcgtcatccagcgcggtgtcgaggatcacgaagccaccggtcggcagagcggcggagaccgaagcggcggccacggtggcgttctcctcctccacacggttgatcagctcgtactcgccttcgaccagcgcaaggtcgccggacagcgtggagaccaccggcgcaccggacgcagcatcgacatgccagtcgccggacttggaggccttgatggcgaactgcacctgcttgccgaggcgcggacccgccgcacgggcattcacacgcagctcgtgaacaatcttcagaccgtgggcggaggcatcctgcagcgtcgagaactcaatattcttgatattaagttcagacttcagcaactcgtcgtatgccttgacggcgtccacgttctcgaccaccacggtgagcttggaaagcggctggcgcacgcggatcttggcggccttgcgcagggacagggtgccggaaacaacctcgcgcaccttctccatcgcatccaccagggccgggtcgtcgaccagcacgcggccgagttcggtgtcttcaccggtcttctcgtccgccacgaacggccaatcggccaggtgcacggattcaccgccggtcaggccgcgccacacggactcggcttccatcggggccagcggcgcaagcacgcgcatgaacgcttcaagcacggtgtacagcgtgttgaacgcggacgcatcctcgttccagaagcggtcacgggtgttgcggatgtaccagttggtgagcacgtcgatgaagtcggagaccgcatcgcaggcgtcggaaatcgcgaactcgttcagcgacttctcggcggccagcaccaggcggcgggtacgggccagcaggtagcggtccatctccggcagaccggcgacctcgtccgcgcgcagctggcgggcgtcgaatccggccccgccgttggccgcgttggcgtacaaggtgaagaagtagtaggagctccacaccggcaacatgacctggcgcacggtgtcgcggatgccatcggcggtgacgatcaggttgccgccgcgcagaatcggcgaagacataaggaaccagcgcatggcgtcggaaccgtacttgtcaaacacgccgttcacgtccggatagttgcgcaagtgcttagacatcttctggccgtcggagccgagcacgatgccgtggcagatcacgttcttgaacgctgggcggtcgaacagggcggtcgccatgacgtgcagcaggtagaaccagccgcgggtctggccgatgtattccacgatatagtcggccgggaagtgctgctcgaacttctccttgttctcgaacgggtagtggaactgcgcgaacgacatggaaccggactcgaaccagcaatcgagcacatcggaaatacggtgcatgtgcgacttgccggtcgggtcgtccgggttgacgcggaccaggttgtcgatccacggacggtgcatgttgatgttgccgtccttgtcgcgcgggtagtcaccgaagtcggccttgagctcttcgagagaaccgtagacgtccacacgcgggtacttcggatcgtcgctcacccacaccgggatcggggaaccccagaagcggttgcgggagatggaccagtcgcgcgcgttggcgagccacttgccgaactggccgtccttgacgttgccagggatccagttgatttgctggttcaattccagtagacgcggcttgatcttggtcacggacacgaaccaggaggagaccggcttgtagatcagcggggtggcgcaacgccagcagtgcgggtaggagtgcacgtagcttttctcctggaagaggatcgcgcggcgctcttccggaatctcggcgagcgggccatcgccggcgcgcaggttgcgcaggatcggcaggttggcgtcgaacacgaaatcaccctcgtagtcggggcactgcgcggtgaagcggcagccatcgtcgagcacgtcggtgctcttgatgccgtgcgcgttcagcgtattcatatcgtcttcaccatagggagcctggtgaaccaggccggtaccttcaacggtgtcgacgtagtcggcggtgaagatcgtgtagccgttcgggccaggcacgtggccttcggattcggcctcgtcacccgcgaagtacgggaagaccgggtagtagcggcggccttccagctcggagcccttgagctcgcgcacgacctcgtagttctcgccgagttccttctcatagtgcggcagcaaatccttgccgaggtagaacttcttgccagcgaacttgccttcggtcgggcggacctcgacgtagtcgatgtcgccgccgaccacgatggcgaagttggtgggcacggtccacggggtggtggtccagaagacggcgtaggcgtcgtcctcatcgcgcatcttcacggccacggacacggtggtgtcctggcggtcctggtacacgtcggcgtccatgcgcagctcgtgcgcactcaacggcgtgcggtccttcgggcagtacggcagcacgcggtagccctggtaggccaggcccttgtcgtagagctgcttgaaggcccacatcacggattccatgtacgggatgttcagggtcttgtagccgtgctcgaagtccacccaacgggcctgacgatgcacgtagttctgccattcgttggtgtacttcagcacggaagcgcggcaggcgtcgttgaacttgtcgatgcccatcttctcgatctggtcgaccgagtcgatgccgagttccttctgcgcctcaagctcggcgggcaggccgtgggtgtcccagccgaacacgcggttgaccttgcggcccttcatggtctggtagcgcgggatcacgtccttggcgtagccggtcagcaggtggccgtagtgcggcagaccgttcgcaaaaggcgggccatcgaagaacacgaattcgttctggctgtggtcgccggaagggttgcgttcaacggacttctggaaggtgtcgtccttgtcccagtagtcgagaacggtctcctccatgtcggggaagctggggttcggcgcgacgtgcgcggtctcgccgccctcgttcgccttgggatatacgttttcgctcaccgtaaatctcctgttagtactgtgcactggtcctacaggagcgtcattgatggcgattgccgggcgccgacgtgtgccggctgggttcacgaatgtcacgtaccgaaccgtggggccgatcgcgtcaatcgcctcgcagccggaactgactgtgttccgcccggaacagccctgtctgccgttcctgcctacgaggacgatgacgggcgctggtatgcgctccgcaccgcggtaccacctcgcttatcgcaccggttgcgccgctccgaactgttgcactcggagccgcgagcctgcgcgaccgcttgtgttcggctgtctcgggccgatcccgtcggttctactgggcgattgccgccgttcttccgaagactccccgctgataacggatcactgcctcacaacggtgcatatcgtaacacgccacgcggtcaaatcgccgcccacggccacggcaccgtcaggagcccgatttagattgggaccggccaccacggaccgagaaaggattgtcggacaatgacgtatgatttcacgtccatcatgaacaggcatggcatggattcgatcgcggtcgacggactgggcaccgacccgggattcgcgccggacccgccacgcgagggtttcgacgtcatccccatgtgggtggcggacatgaacttcccgaccgtgcccacgatcccgcaggccatcatcgaacgggcgaagcatcccgcctacgggtacttctcccccaccgacgactattacagctccatcatcgactggcagtccacgcgcaacggggtcaccggattgacccgggaggcgatcggctacgagaacggggtcctgggcggtgtgatcagtacgctgaccgcgttcgccgcccccggcgacggcgtgctgctgcacagcccgacctacatcgggttcacccggagcatcgaaaacaacggctaccgcatcgtccacagtccgctcacgctggacgagcgcggcgtatggcgcatggattacgaggatatggacaggaagctcaaggagcatcacatccacgtggccgtgttctgcagccctcacaatccttgcgggcgcgtgtgggaacgttgggaaatcgagaaggccatggaagtgtacaaggccaacgattgcgtggtcatttccgacgagatttggtccgatttgactctggggaaccaccagcacatccccacccaatcggtcagcgaggacgcacgcaacaggaccgtggcgttctacgcgcccagcaagaccttcaatctcgccggactggtgggaagctaccacatcatctacaatcccacactccgggaccgcatcgtggccaaaagctcgaaatgccactacaacgacatgaacgtgctttccatgcacgcgctgatcggcgcctaccggcccgaaggccatgagtggctcgacgaactgaaggcggtgctcaccggcaacgtcgattacgcctacgactacatcaccaagcatttccaaggagtgagtctggccaaaccggaaggcacctacatgctgctgctcgactgcgagcagtggtgcgaacgccacggcctgagcctgcccgagttggagaaacgcggctgggatgtgggcgtcgcatggcaggacggcgacatgttccaggccccctacagcatccgcgtcaatctcgcattgcccttgagccgcgtcaaggaggccatgcgccgccttgaccaatacgtattcaacgcgtaaacggcatgcatccgcgattgcggtgtcctggaaagacgaatgccgtcaacgaggttggtgcccgttggcggcattcgtcatacgttggccgaaccgggcgaaacccaagttgccaagttgccgtgcgctatgaggtggatgccgccagcggacgtgtacatctgaccgcccgatatgccggtgccaccgatgcgccgacgctgccggcattcggattggaatggacgcttcccaagcagtacgagaacctgcgcttctacgcccttggccccgaggagacctatcgcgaccgtctgcacggtggcaagctcggcattttcgagcgcaccgcggccgaagacaatgcaccgtatctggtgccgcaggagaccggcaaccatgaagacgtgcgttgggccgaagtgcttgacgcccaaggacacggcatgcgtatcagccaggccggcagcgaacatttcgcggcgagcctgttgccgtacagctcgctcatgctggaagaggcgacccaccagaacgagttgccgccggtccgccacacgttcctgcgcttgttggccgcgcaaatgggcgtgggcggcgacgattcatggggcgcgcccgtccatgagcagtaccagctgcccgccgatcgcgcctacacgctcgacgtgaatctggaactgttctaacagcgataaagaagctccctccacagagggagcttctttatcgcacagagggaacttctttatcgtgctggtacgaaactgtcacgcactactagggtggtggagatgaaggtgtggtggtgcagcgtgcgccgactggagatgacctcggcaagcatcgtaatcgcagtatcggccagctcattctgatcgatatcgtaactggtcaatgtcggcgaagtgtactgggtgatggcctggttattgatactgatcacactggtatcgcgaggcaccagcactcccgcagcagtaaacgcctgcagtacgccgactgcaatcgtgtccgcagccacgatgaacgcatccggcatgtcatctcgatgatcgttagccgctttctcccctagagtgcgcccggtgtccacagtgaacgcgccttgcgcgtaaatcaggccttccgcatccagccccaaacgctcggtccaattgcggaatgcggttaatcggctgtcttccgggtattcgtgcaaacccatcgtgaagccagtaccgccgatatagccgatgcgtcgtttgcccgaggacaccaacacatccaatgcgtccaaaatggtttggcttaaatccggttgtaccgaatcgaacaggctgggcgcaggattgatgtcgatgaatacgccatagggcaataccagatggagtttcaacagtttatccgaagagagtacggacggtccgatggaaatgaagccgtcgaaatcaccggcgttggcaatcagatcgtcgatatgggaaaacgacgtgagttccatgtgctgggctctggcattgtcgccgagcacggaccgcagttcatcgaaataggcgtccgccagttcttcctcgcgggtggcgttgtcgagtacggccacacggcgtggcaatgcgatacggcgtgatccggtagcgtagccaagctgctcgctgacctcgatgatgcgacgtcgcgtctcctctttgacggacaatgtcgggtccccattgagcagccgggataccgtggcctgcgagaagcctgatttctgcgcgatttccttcatcgtgaccatgacatcatcccctcaatgcaaacattacgtagtacttcagtaaattactttactacttagcgtaacgcgcaaagcccgcaaccggaatacaccggtcacgggctttgcgatatcaatgtcacatcagcagacgatatgacctgatgtcagctctcgtcttcggcgacgcgggagcggctgtagatcatcttcatcgagcagatgaagataaccatcgcacccaggacgatgatgccgccgaccatgaagacgttggcataggtcgaggccggaccggattcggtgccgaacagtgagccgccgctcatcgcgccattggccatgagctggccgaagatcgcgacaccgaccgaaccggtgatggcctgcatcagatcgttgaagcccaatgcacgtccggattcctcggcctccacggtcagcgttgcggtatccacaatcggctggtagaagaacgaggtgccgaagtagtagatgcacggcgccacggcaagagcccagatctggcccatcggaatcaggaacgcaacggcgatcaggccaccgcccatgcaggcgagcgccagaatgatggaggccttgcggccgatcttctggatgatcgggccagcggcgaagcccatgatggcggcgaggatgatcgaccacaccagcaggttggagacctgggaggagtcgatgccgtacacgttcaggccgatggcgttgcagccggcgttcagggtgtagctgaagaagtagccgacaaagatgacgatcatggtcatcgcgaaggccgggttggtgagcatctccggggtgatgaacggatccgcggccttgttgatgtagaccacgaaggccacgccggtgaccagcaccgcgataccccagaagatggtcatgtcggtgaagaacatggtcaccgagccggcgaacaggccaatgagcgtgaagccgatcacgtcgacgcgcgcgcccttggcatgctcgtcaggcaggttcttggccaggatcgggatgaagaacaccgcgatgatgccgataccaaagaggatgcgccaatcgacaagggtcatgtagccggcaaggaagacgcccagagccgcggcgatacggaacacggcgacgaacacgccgtaccagatgactcgcttcttcttctcgatgtacttggagacgagcaccaggaagatggagccggagacctgccagcctgcggactgcacggtacgggcggcgatgacgatccagatgctcaggtcgccgaagcagccgaggatcgaaccgagcacgaacacgatcgtgccgagaatcatcatcttcttcagggacacgaagtcaccgagagaaccgtagatcacgcacacgatgccgagcacgatgcccggaatcgaggtgatcaacggggcgaggttggcctggccgagctggtcgccgatgttcacatagatcatgccgaaagcctgctgctgcagcacgcccatggtgaagatgatcagtacgatcggaatggcgatctttgccatcttgttcatacgggcaaactcttcggtgccctcctcaggcaccgggataccgttcgccttctccttgacagcggtttctgccatggtgattcctttctattggtttgagtttggtggaatgccttatgcgcgagcgcaaggagtaaaaacagctacctcctctcgcatgggaatcgacggcgccgcgcctcttctggataccgcgagggccgaggccttcgcggcgaaatcaagtgcatgggcgatgggttcgccggacatcaggtcggcaaggagataaccagtgaaggtgtcgccggccgccgtggtgtcgaccgtgtcgacgagataagcggactgcgtgacgacgtggtccccacgcaaatacatcgaaccgcactcgccgagggtgagggctatatccgcctgggagaaacgcgcacgcatcgcacggatcagtgtctccccatcttcttcggcccctgtgagcatcgccgcctcgccctcattgagtacaaaacagccgatggcatcaagatcgacttcgtcgagccgcgagtcagccggcgagggattgagcacgatgaacatgccgcgggccttggcgcgggacacgatatagggcagttcgctgatttcgttctgcagcagcagccaatcgcctttcccatacccgtcaagcacctgatcgacgaaatcacggtcgatggcacggttcgcgccggggtacagcacaatgcagttgtcgccgctggcatcgttttggatgatggcgttgccgctgcgcacatcatcgcgcactaccaccgaggtcacgcccaccgcgcaggattcgagcaggtcgcgcaggaacatgccgtcccgtcctacctggccggcatggtgcacatcggcgccggcacgagccaatgcgatcgattgattcagtcccttgcctccggggaacacgtcgagcgcatgcgaggtgatggtctggcctttggccgcaaaatgatccaccccgtacacatagtcgatgttcagcgagccgaaattcagtatgcgcatcaggactcctttcccatgacgggaccggtgacagccagttcgtagatgcgacggcaatcgtcgcgatcaaggcgggcaatggacccgatggtggcgtccggcccgtagaaatcgatgttgtccaacatgcgttcgatgccgtcgcccggcagatcgaagtccttgaaggaaacaggcatgcctagcgagcggaagaacgattccgttgcggcgatgccacgccgggccagttcggtttcgttcatcgagccgggcctgatgccgaatacctcagtggcgtatcgcgcgaaacggaacggggccttctcgctggccacgcgcatccaagatcccatgatgattgacagggtggccccgtgaggggtgtcgtatagcgcgctcagctcgttggcaatcaggtgggtggaccagtcctgttcacgacccacgccgagggtgttgttctgcgcgatggtggagatccacatgatttgcgctcgcaagtcgtaatcggcaaggtcggccaacgatttcgggccgacatcgaccaaggtgcgcaatgcgccttcggccatacggtcgattacgccgatctcgttgtcggcgctgaaataccgttcgcagatgtgggagaacatgtccacaatgccgcaggcagtggggaacgccggcaccgtgacgctgagttcggggttcatgaacgcgaatgccggccggagtactggttcgctcagcgtgagcttggaatgctcatgctcattgttgatgacggcgacctggctggattcgctgcccgatgccgggcacgtcagtaccaccgcgacgggaagggtgcgatctaccggcactttgccggtgaaataatcccatacgtcacgctctccggcggctcccagcgcgattgccttggccgaatcgatgacgctgcctccgccgatggccacaacggcgtcgacattgcgggctttggcgatggcgatgccttcacgcaccagcgtcagtcggggattcggcttcacgccgccaagctccgtataggaaatgccggcccgtccaaggctgcggcgcacggcatctagcaagccgctggtttccagatatgctccgccatcatgatggatgagcacgcgggaaacgccctttgcgcccagttcgtctcccactttggtttcggcgtcgcgcccgaaaacgaaggtggttccgatgcatatggtgaaatccctcatatcatgctccttgcgtgtatgacggtgtccgtcatgatgtcgttgagttccgcgatgtcgtgcgccacatatgcggggtttctgctgagcaacgcgatttcgtcgccatccccgtatgtgaccgctatgcaggagatgccgttggtccgtgcagcttcgatgtcgctgaaggtgtctcccacatagaggcattgtctcggcgcgatgccatgccgtcgaacgatttcggctatcatttcgaccttcgtcgcctcacggccgggtatggaatcggggcagatccaatcgtcgaacaggttcgcccagcctttgctgccgagtatgcgcctcaatgcgccctccggcttgttggtgacgatgatattgcgtacgctatgtcccttcagctcattcagcatgctctgaatgcccggatagagtctggtgcgcgaaaaatcattgagcgtgcggtagtgtacgcgtacatcctcatcaaatgtctccagatacgcctccccgggataggggatcacgtgccgcatgatctcatccatcggatcggccagattggcgtcatcgcgcatgtacaggtcatcgatcgccccgcccgcacgacgcgcggcgtacgtcagggaattccacacgtcgctgccagtgtcggcaagggtgccatcgaaatcccataacaggcatcggtactccattggattgctcctttcgttcattcgcatggcggtggtcgatgattggaggcgagataccgccggccggccagaaggggttggagtcgccggccggcggtggagggggttgttcaggggcaagactcagtcgtagttttcgagggtgctgttcagtaggtcgacgaatccggggaagtcgagttccagcgcggcttccgcattcggctcttcgccgcgatagcccatcgtcggcgtgcgttcaagatccacggcaggcacggtaccgcgcagatgacggtagtcgcacacggtcataccgcgggtaagtgcgccgtgcagctcgatatcgatatgcatcgggaccgcagtgatcagcgacgggtcgataacccatgccaccgcgcatgcgtcgtgcatggtggcgcccgtcagctcggactcctcctcgcatgcgccgatgaagaaatcggtcagatcggcggccaggttcgcggccttggtgccgatctcacggaacttggctacgtgcttggcggtcagctcgcattgacgggtcaggttgatgccagtcatcttgacgtgcataccggagttgaacacgcgcgatgccgcctcggggtcgacgaagatgttgaattcggcggcaggggtccagttgccgtaggtgacggacccgcccatgatgcacagctccttgacccgttccacgatgcgcggctcacggttgatggcggaggcgatgttggtcagcggaccggtggcgatcagcgtcacgtcatccgtgctcattacggtgtcgacgatgaagtcgaccgcatgcttgttctgtgcggcgtgcgtcggctccggcagcacgggaccgtccagaccagtctcgccgtggaactgcggtgcggtgaccagcggtgcgaccatcgggcagctgtgccccggatatacgccgatgcggtccgccacgccaaggacctcaagcaccttgatggcattgcgggtcacgttctccagtgtgcagttgccgccaatggtcgtgatacccagcacgtcgaggtgctgcacggcgagcatgatgccgaacgcgtcatcgtgtccgggatcgcagtcaaggatgaccttcttcttgttttccatagggatacctccgttggttgtgttctttggattggtcgatattcgggcatggcgttcagccggtttgcccggcgaggaactcgtgcagctgtgcagcgtccggcgaggaacgtgccccgcgacgggccactttgtatgcggagacggcattgccctctcgcaatgattcggcgagggaggctccggcgagtctggcagcgatgaaaccggcgttatagacgtcccccgctccgatggtgtcttcgacgttcacccggaacgccgggctttccgtcaggccgtcttgcgtaagaccgatcgatcctcgggcgccgtcccggacgatgacggtccggccgtccaccgcataggccgtggcgttgcccatcatgtcgtcgtcgcctaaataggcgaactcgtccggccctgatcccagcagataatcgacattcggaataatgcgttcgagtgcagccgcgaaatcggggtcgagcacgccgtcgtccacacgcaggttcaggtcgaaagatgtagggactccggcatcgtgggcctgttcgaagatgcggatgatcgtctccctagcgctggtgtcgtaggtcaggcacatgcccgaggagtggacccaatccgcctcacgaatcatgtgcatcggcacaaggttttcgtcgagcaccttgaacgattgccgttcgcgaggccatccccacaggtacctctctccgcggtcgtccacgaaagcgaatacgccgaccgtgctcagggtcgaatccgcaaccagcccggtcacgtccacgcccgcatccttgaagtcctgcataacgaaacgcccgtactgatcatctcccacggtgcccacgaacgatacatccaggccgagcttcgccaacgccacggccgtgttcgccgaggttcctcctccctcgatgccgatctgcggatattcgacctgcgtgcgctcctcgttgagaaaacgcggatagggcacgatgatatccacattggcatcgccgacgacaacgaccttaggcatctttggccgccttgataaaagcctcgaccttggccgggtccttgcaccgatccgtatcggcgcgatcatcgtcgtaattggtcagggagaacgagtcgacgccatacgggtgcgtggcataaatcgcctcggccacattggaggcgtccagaccgccggcgatgatgcacggcacgtcggtggcctcgatgatggcccggtcgatggcccggtcatgggtcaggccggtcgctccgatgtctccggcagcaggtgctttggtgtcgatgaggaagaagtcggaaaccggctcatagtccttcacatactgcatgaccttctgttcgtcgagaggcactccggctagcaccgggatggcctgcatgatcttcagttcggggaaccggctcttaagttccgccacttcggccggactgatgccttcgatgtcgccggacaggtgcaacacgtcgggcatggcttcgcgcaggttctcgctgatttcgtcgatgtcttcggcgacggtcaggcctatgcgcacggcttgtggttgcacgccttcgaagatttccctggcccgttcgcaatcgagctgaccgggcgtccgcttgattttgccgtaggagacgccgatatgttcgccgcccatgtcgattaccatgcgagcgtcctcgacattccttattccatagatttgagcaatgacatcagccacgatggttcctttcctgagcaatggcgttgatgaacgcggggacggagaataccgtctccttgaggcctgcaccctgagccactcgggtgacgggcggcggcgtcacgaaggaacgccgaagtgtgtcggtctgggcaaacacctcgcgggcctggccatcgagcagcacgcggccgtggtacatcacgatgacacgggagaagttcgcggtgacgaatttcatgtcgtgcgaaatcgtgatgcagagtctgccttgtgctttcagacgttcgatgatgcttgcaaggcgggcgttgcccgacgcatcctgaccgcacgttggctcgtcgaaaatcaccacggatgggtccatcatgatgacggcaccgattgtgcagaatttcttctcggtgggcgtcaggtcgaatgggtgcacgtcgagctttttggtgaggcctaccagctcggcgatgctgtccacgcgatgcgcgatgtcctgatcgctcatgccgatctggcgcggaccgaattcgaattccttgcggacgctttccagaaacagctgatcgtcgggattctgaaagacatagcccacgctgcgagaccattcggcggtgctgcgctcattgacgtcaatgccatcaatcagcactttgcctccggtggggcgcagaatgccgttgaaatgcttgaccagcgtggtcttccctgcaccgttctgccctatgatcgccaccggctcgttgccgtcaagtgtcaagtccactccgtcaagggccttgtcccctccgggataggcgtgctccagtgcctgcaactcgattttcatgagagcgcctccttggccatgcggatggccggctcctcggtaatggcaatcgggccaccgagcgcacgggtgatcttcacgtaatcgggcacttccacgccatgctcttcgatcgccggatcggagaacacctccatcggagagccaagggccacgacttcgcctcgctcgagcaccatgacggtatccgcgtatcgtgccactcgctccatgtcatggtcgaccatgatgacggtgacgccgtccgcattgagctgtttgacgatgtcgaaaatctcctcgctgcccatcgggtcgagctgcgtggtgcactcgtcaagcaccagaatgcgcggttccatgatgaaagtggatccgaaagccacacgctgcacctgtccacccgacagttccagcgggttcttgtctagaatgtggtcgatgcgcatcaatttcgccacagcttcgacgcggtcgatcatctgcgctctgggcacaccgtggttgcctaatccgtaggccagctcttcggcgacagtcccggcggtgtaggacagctggttgaacgggttctgaaacaccaggccgatggtcttcgacagttcggcgatggtcgaatcggcgacatcagtcccgtcaattaggatgtgtccagcccccgcccccacgaaatagtgcgggatcaggccgacgagcgcattgcataacgtggatttgcctgccccattcgcgccgatgatggtgaagaagctgccttcctcgacctggaagtccacgtgtttgacggcccgacgcttggtgtcgcggtacttgaaggagaaatccttgacctctactatcggactcattcacttgcctccccacgagaccggcaacggaatcacaccgatgcggatgcatacggaaacggcgaccacggcgatcggaaacaggacgaagatccaattgagtaccttgtcggcggcattccagctgaccttgacataactggtctgcttcactccagtaatgccgaagccgcgagtctccagggtcataccccgctcctgggcgtcggtcagcgatgacatgacaaccggaccaagcaacgggatatacgccttgatgcgggcgatgaccccacccgatgcatcgagtccgcgagcggattgcgcctcctgaatcaccgccatacgtcgttgcatctgcggcacgacattcaggctggcgagcaccaggtatccgaccttggcgctgagccccaccgaagtgagcgcggataccatagcaccgacataggtggttttgttcatgatgtagaagctgccaagaaacaccagcaggctcaccaccactttggccgcatacagcacgccttcgagccccagttgcgcgaagccaaaatccagtaatgcggtacggttcttgggactgtacagcccttggatgaacatgagcatcacagtgacggggatgccgaaaccgaacattatcttggcgaaatcacgctgtatatgagccaagaacgagaccacaagcagcaacaccacgagtatcagaccaagcgtgaagtcaggccatgccaatgcggacagacccaaggcgaacacggccgctatcttggtgatcggattcagcttcccaattacggtgtcattgatgaccggcatatgcgacgacatgtcttactcgtcttcttcttcgtcatcatcactcagcgcatcattgtccgagccgcccatggagtcggccgcatactggctgagaaagcgacggggaatcttctgcacgatcacccacgcgatggcgacagtgatgcccttgtcgaggaggttctcgatcagcgacgaggagatcaccgaggcgagaatgtctttcatggccacgaccagcgttgccgtcagcaccgatgtaccgttgacgccggtggcaccgccgtatacgaatgtggtgatcagcgatgcggagatcgcattgacgaacgtgcacaccagccagatgaccacgacgccccacttcttgtggaacagtccggccttgaccatatagccgacgaccaaaccgcacaataccgacaccgccgcatagggaagatagaccgggttggctaccagtgccaggaaaagattggtcagcaggccggtcagggccgcgacccatggtccagacaggcatgcgacgacgatggtgccgatcatgtcgaggaacagcggcagcttgagtgcggagcacagagttccgccaatgagattgattccaaccgcgatcggaatcagcaccaggcactttgtggagaattgtgccttgatcccttcccagaacgacagcttccttgccatgctggccctcctttattttccaaccctcggttttccgcagtgtgcaatctacattgtttgtcttgcggaatcttaggaaatcattttcctaaaatgttttcttgagataagattataggacgccaacgtcagtgtcaacacggcgggtcgagggtcaagcaacccggaccgaacggcccacaatggcgacgtagcaaggaacagaacgctacgcccttgtacactgatacagaggaaaacaggcaggaggggagacatgaacatcagggacatcgcacgcatcgcgggcgtctccacctcgacggtctccaaaatcgtcaacggcaaggattccagcatcagcgaggaaacccgcaagaaggtcctgacgatcgtcaaggaatatcattacaagccatatgcctccgcctcacagcgcacgcgtagctacaccatcggagtgctgctgcgctcccccatctccttcgatagcacgctggacggcatcatccaggccgcccagaacgccggatacgcaaccgatgcctacaacagctattccgatccggaacgcgagctcaaaaacatcgcagcgatatgcggccgcaacgtcgacggcgtcatctgggaaccggccactccggacagcctcgcctatgcctcgcaattccccgaaagcaccccactgctgaccataggacccaacggcggcgaccagtcactgctactgccttataaagaagcggcctacaaactgaccagcgagctcatcgaacgggggcaccaacacatcgcctgcctaatgaccaagggacgccgcacgcaggattttctcgaaggctttcgctcctgcctgttcgatcatcagctgccttatagcgacgatctggtctactacgacctcaacgactcgctgcccggcaaaatcggaagccgggacatcaccggatttgtctcctcgcattaccggcgagcactcgagttcacgcagatgatcagccccctgcattaccggcttccagaggatgcttcactcgtctccatcaaaaacgacaccgccgaagcgctggcctatcccggcaacacggaaatatctacctacaccatccgcaactccgacttcggcgcctacctctgcgagaagctcattgcgcagatagagcacgacaaagagcagcatccctcgttcgtacaggattttcatctcgacaacaccagcaccatcgcagccccgcccacttccgccatcaaacatgtgttggtcgtcggcagcatcaatattgaccactatctgtcagtgccgcggctacctcatatcgggggtacggtatccaccaaatcggcggcgcgataccccgggggcaaaggggtcaatcaggcgatcggcgcagccaagctcgggcaccgcgttacccttatcggcaatgtcggcgtcgacaatgggtccgattacatcttcaaggcgatggaacagcatggggtcaatacggccggtgtgcgacgctgcgccggagaggacaccggctcatcgttcatattcctcgcccccaacggcgaatcggtcatcgcgattctctccggagccaacgcgtcgctcaccccggatgacatcacctccaacgaacgcctgttcgacaatgccggatactgcctgatacagaccgaaataccgttggaatcagccaaagtcaccgcgatcaccgcccgacggcaccatgccaaaaccattatcaagccctcgtcatgcgactatctgcccgactccatcgtcgccaatgccgacattctcgtgccgaacgagcacgaactggcgatcatcgaaactgagggaaaaacaatggaggataaggccgcgcatcttctcgaacgcggcgcgggctgcgtcatcgtcacccaaggagaacacggctgctacctgcgcggccagaatgtcgagtgccactatccggccgctgacttcacccccgtagacagcaccggagccggcgacgcgttcatcagcgcgctcgcctcgtatctgatgtacggatacaccgtgcggcaggcggtcgaaatcgccacctatgccgccgggtactcaatcacccgcaaaggcgtcataccctcgcttatcgaccggctctcgctggacgcctacgtccatcacagcgaacagtagcggcacgggtatctgtcttaaggcagtttccaccgcagacaattaaggggaaccgcatctagtctgcggctcccctcagtcagcttcgctgacagctcccctctctgaggggagccaaaaagcactactccagttccactgcaccggtgtacagctggtagtactcgcccttttgcgcgatcagctcgtcatgcgaaccacgctcgatgatgttgccgtggtcgagcaccatgatcacatcggaattgcgcacggtggacaggcggtgggcgatgacgaagaccgtacggcccttcatcaggttatccataccagcttgcacaacctcttcagtacgcgtatcaatcgaggacgtggcctcgtcaaggatcagcgcaggcggatcggccaccgccgcgcgagcgatggagatcagctggcgctggccctgggacaggccggaaccgtcgccttcgagcaccgtgttgtatcccccgggcagcatgcggatgaagctgtccgcattgaccagacgcgcggcctcgatgcattcctcatcggtggcgttcaggcggccgtaacggatgttgtccatcacggtgccggtgaacaggttcacgtcctgcagcacgatgcccaaagacctgcgcaggtcaggcttcttgatgccggccacggagataccatcatacagaatctggccttcctgaatgtcgtagaaccggttgatgaggttggtcacggtggtcttgccggcaccggtggcgccgacgagcgcgatcttctggccgggcttggcgaaccaggtgatgccgtgcagcaccggcttgtccgggttgtagccgaaggtcacgttggtgaagcgcacgtcgccgcgcagcagggtcagtcggccgtcgggcgaggtgatcgcctgctccttggccttcatcgccacctcgcgggccgagcccttgagcttttctgcggccttcagagacctcgtaccgtcgtcgccgacctcgcgcttccatgcccagtggccggtctcgtggtcgacttcggtcatggtgcggccatcctcgccaagttccacgttcacgagcgtcacggtgcccttgtcttcctcgatgggctcatccatcagcttgaagatacgggaggcaccggcgagcgccatcatcaccatggtcagctgctgagagacctgaccgatcgggttgatgaacgagcgggacagggtcagcagggagacgagcgtgccgagggtgagcggcttgacgccggtcagaccgatgtcgttgacgccggccagcgagacggcggcgccgacgatggcaagcaggatgtagagcaggtagcccatgttgccgacgaccggcatggtgacgttgccccaggtgttcgcttcggcggacgcctcgaagagttcctcgttcttctcgtcgaaggtcttctgggtggcgtcttcatggttgaagaccttgatgaccttctggccgttgacggattcctccacgaaggcgttcacgtcgccgatccactgctgctgcttgacaaagtagcggccggagcggctcacgatcttgcgcacgatgaagtagagcagaacggtgaacacgattacgaacgcggtgaatggaatggacagccacagcatggacagcagcgccgcgaccgcggagataatcgaggagaacatctgcgggaacgactgcgagatggcctggcgcagcgtatcggtgtcgttggtgtagtggctcatgatgtcgccgtgctcgtggctgtcgaagtagcggatcggcagcttctgctggtgggcgaacatgtcgtcacgaatcttcttgagcgtgccctgctcgacggtgacgatcagccactgccacagccaggacgccacgatgccggccacatacaggcccgccatcaggctgatggcccgcagcagcggggcccagtcggagttcgactcccccaccatcggcaggatgtacgtgtcgatgagcgactggaggaacagcgcggaaccggcctgcgcggcggcaccgaccaagatgcacaccacgatggcgatgacacgccacttgtactggaagatgtagctgaagatgcgcttgatggtgccaggctcggctttgcccatggcgggcttgcggttcttgaaactctggtcgttgctcatcgtgcttctccttccttggtatcggctgcattggcatcagctgcgctggtatcggccgtgggcatggtcactgtcaccgtcacggtttcggacggctcagcggtagatgactcagcagcctgttcggcagcggccagttcttcgggctgggcctggttcttggtctgggattcgtagatggaacggtattcatcgcaggtggcgagcagttcgtcgtgtgtgccggacgccatgatgcggccggaatccatcaccagaatcatgtcggattcctgcacggaggccacgcgctgggcgatgatgatcttcgtggtgtccggaatctcgttgtggaacgcggaacggatcagcttgtccgtcttggtatcgacggcgctggtcgaatcgtcgagaatcagaatcttcggcttcttcagcagcgcacgggcgatgcacaggcgctggcgctgtccgccggacacattggtaccgccctgctcgatgtacgtgtcgtacttatcggggaattcctgaacgaatccatcggcctgcgcgagctgcgcggcatggcgaatctcttcatcggtggcgttcgggttgccccacctgaggttttcggcaatagtgccggagaacagcacgttcttctgcaacaccatggccacctgatcgcgcagcgcctcgagatcgtagtcgcgtacatccacgccgccgaccttcagcgaaccggagctcacgtcgtacagtcgcggcacgagctgtaccagagacgactttgccgaaccagtaccgccgacaatgccgacggtcatgccggagcggatcttcaggttgatgtcgtcaagcacgggcttttcggaactgtcggagtagcggaaggtgacatggtcgaattcgatggagccgtcggccatgtcagtcaccggctgtgccgggttctgcaccgtgctttcctcctgcagcacctggcagatacgctcggcagaagcctgagaaataatcaccatgacgaagatcatggacagcatcatcatggccataaggatctgcatggcgtaggtgaccagtgcggtcaggtcgccggtggtcaggcccacggcggggttgttgccggaggcgacgatctgctgcgcgcccatccatgcgatgaggatcatcgaaccgtagatgcagatcatcatcagcgggctgttgaagctcatgatgcgctcagccttggtgaagtccttgaagatgcgctgggagatgcggccgaacttggagacctcgaaggattcgcggttataggacttgaccacgcggatgccctgcaggttctcgtcgaccacgttgttcaacgcatcgtaggtgtgaaacacgcgctcgaacaccggatgcacgagcacggccagaccgcacaggccgatggccagaatcgggatgcaggccaggaacaccatggaaatcgacggggagatacggaacgagaacagccaggatacgaccaccataatcggggcacgcacgcccagacgaatgatcatcatgtaggcgttctgcaggttcgtcacgtcggtggtcagtcgggtcacgatcgaaccggtggagaaccggtcaatattggtgaagctgaagccctgcaccttctcgaactggtccttgcgcaggttcttggcgaagcccgcgccggccacggccgcgtactttccggacaggaagccggcacccagcgaaaccatcgagcacaccagcagaatcacgccgaacttgacggtggccggcatgctgccaccggtgataccctcatcgatcagcgaagccatgatggtcgggatcaggatctccaggatgccttcgaccgtcacgaacaccggagccaggatgctggctttcttgtattcacgaatcgactggcccaacgtgcgcagtacatgtttgggcttgtccggttcgacggctttgcgcgcctgcgcgattgcctctgcggtatcgctcattcgttctcctccttcgtgttagcaacctctgctccgtcttgatcgggagccatcaccacaggtgactgagggagtgtttgatgttcaaattcgcgttgtgcgcgctcgatgttcgcacgcatgcgtgcgacgtagtcgcgcagagcggccttctctccatcggagaagccgccgaccagcaaccgttcgacccgatcgccgttcgccttgagatcggcgacgatcgcgtccgccttgtcggtcaggacgatgcgcttgcagcgcgcgtcatgctccaccgattcacgggcgatcaggcccttcttctccatcagggccagcacacgcgaggcggtggaccgggtgatgcagaatttctgttcgatggtgtgctggtatatctcacggccgcggttacgcgccaagaacatgatgatatgcgcgttgccgccggtggtttccctggcggtttgcggcatgctctcgcccaaatagcggtcgacggctttggttaccgcgcgcatttcgatgctgagaatatgctgatccattgtcctccgtaccatgcgggggccgtgtgcgtttgtaccttcaccccacattgttgtatacgcaacaattcatgataaagagacctatatacaacagttgcacatacaacaatcggcgtgttgtagtatctccaaacaactgttgagcctaaacaaagctggctcccctcaggagagggaagccagctgtattacgccgtgcgattgcctcgcttcagcccttacttcgcgagcttggcgtactcgtcaaccatgaactgggcgatcttcttgccgccttcgcccagcagggtgggcagcgagttgatcggcatggggttgaggaacatgcgcatcatggcgttgtcgggcagcttcgtcagctcgccggcctcgccggcggcggccacggcggccacgatcttggcgccgaacggatcggcctcccactcgccgtaggtggaccattcggtgagcggctgggtcttgccgtcgccatcgagggccacggcaacggtgtcggcaatgtcgcgggagctcacgcccacttcgatggcatattcgccggcctccacgtgccagtcgttgtatttttcggaccagtaggcgaacgcgcgctcgtcgaggtcgatggtcacggtcttggattcgccggccttgaggaacaccttggtgaagcccttgagctcgtgcttcgggcgggccacgtcggccttgcccggagccacgtacacctgcacggtttcggcggcatccacatcggaggtgttggtcacggtggcggtcacggtggcggtgttcgcgccggtcttggcggcggcgacgtcatcgatctcgaatgtggcgtagctcaggccgtagccgaacgggtagtccacaaccttgccgtaggtgtcgtagtagcgatagccgacgaacacgccctcgccgtagtcgacgtggccttcctcgcccggccagttcagcgtgctcgggtcatcgctgatgtccagcggaatcgactgggcgagcttgccggacgggctgacctggccgaagatcacatcggcgagcgcagggccgccggcctggccgagcagacaggattcgagaatgcccttggcgttcttggcccacggggccacggagacgacggagccgttggacagcacgaccacgacgttctggttcgcggcggcgacctgttcgagcagggcgatctgcttggcgggcatgtcgagggtttcgcgatcgaagccctcgattcaaagcatccggcgcacgactatttcgcggaccgcgagcgccgcagcgtgacgaacgcgctcaacatcaactggtcagtacccgacggcgcgaacgtggagcacgtgcttcaggcgggcctgtcgatgatggacggcattcagctgcgctggctgcgctctcccggtcgcgatctcaacgccatgtgggtcgactgcgaggatgtgctgttcccctcccccttatgggacggataccgctgacccttccgtaaatcgcgcgtctcgcacatcacctccgccaccgcgtcatcaatcaccgtcatcccgaaccatcaccccatccatcccgcatgccagacatgccgcagatcccaagggtcgaggcgcgtgtcgtccatcacggcggcgtccccgtcacccataccgggcgcgggaggcgcgagacggtcaaactcgccgcgaccgccgcgcagtcgatagctccagtagacctgaccggcggagacgttccacgcgtcgagctgcatggcggcgacgcggaggtagacggcgcggcggcgcgcggcgggcgacgggacgccgtccccggcgtcgcccgcgcgcgaaccgacgtcaccggatgcgccgtctccaacatccgcaccgccgtcaccgaacgcaccatatccgtcgaacgcaccaccagacgcatcaacggacgcgacctcaccttgcgccccgcactcccccatgcgcgccgcaagcccgttcgccacgcaccactcccccaccatgaccggcgtaaagcgcgcggcacggcggatgcggcgcgcgccccacgccgcgaacagccggtaccagcgcataagccatgcgtccggcagtatgcggaacagcacctcgggccgttccgacatgacgagatacgcgtgcgtgtcgatgatgacgccgcgcatgccctcacgtacgaaccagccgcgccagcggttcaggcggaatccgtcatggaacacgatgaccggcccgtcgcccagcaccgggcgcagccatcggtatgccgcccgatagaaccgtttgaggaagcgcatcggaacgtggccgctcccccgcgcctcccccggatccttcgcccgggagctcgacggcgacatgagataagtgagacggtcgaccggctcgttgagcacttcgatgccgtacaacgcagggcggtcgcggtaacgtcgcgcgagacgctcgagcacgtccagtgcgaacgcaacctgccgcggcgtcgtatgccagcggaccacgccggtcaggccgccattgtcgaacccgttctgcgacccgggcacggtgtgcaggtcgatgagcaccttaagcccggccctctccgcccagtcgaacgcacggtcgaggtattcgacgcatccgggatgcccgggcacgtcaccgaagatgaaaaacggcacggggatgcgcacaaggttcagcccgtgcgcggagatggcgcggaagtcgtcctcggtgatgtacgtgtcgcggtgacggcgcagcaggcgctccagttcggccgggtccgtggaccggtgcagccagatctcgtcctcctcgccgctcgcacggaacaggccgggcgtcatccaccgttccaataccagccagccgccgaggttcactccgttgattcgcccatcgtcttccggcatggccctctcatcagtattccgcatcattgctccgttccgcacaaacgacaccgcccgctccagcatacgaccggagcgggcggaaacatatgaggcccacacgaaaccgattcacacgggaccggctcacgcgagagcatctcacgcagagcagattcacgcgacggtgaaggtggtgcgcttgaggtcgtcgcggcgcgacgagtggccgatgagcagctcgaactcgccgggttcgacgatgcggttcgcatcggcgtcggcgatggtgcagtcgcagaccggaatgtcgaacacgacggtcgcggtctcgcccggttcgagcgtgacgcggcggaacgccttgagttcgcggtcggcccagctgtatgaggtgacgacgtcgcccacgtacgcctgcacgacctcggtgcccgcgcggcgccccgtgttggtgagggcgatctcggcgtgcacggtgtcggtctgcgcgaacgtgccgtccgcgttcgaggccccgccgacgatcgtcggctcaccgtacgcgaacgtcgtgtagccttcgccctcgccgaacgcgaacgccgggtcctgcgtaaggtcggcgtagcggttgccgtgctggccgcggatctggttgtagtagaccggcagctggcccgcgtggcacgggaaggtgatcgggagcctgccggacgggttcacctcgccgaggatgatctcggcgatggcctgtccgccctccatgcccgggttcggcgcccacaggatggatccggcgccggacttcggatcgttgcaacggccggcgagcacgccggaatcgcccacgatggaacgcggcagcacctgtggcttggagctcaccagcacggtgaccatcggcttgccggtctcgcgggagacgtcggcgagtgcgtcgagcagcgcgttctggccgccgagcagttcaagcgtggcggtggaacaggtctcgccgaccagctgcaccacatcgcccacgacggcgacgatgaggtcggcctcgcgcgcggcggcgacggcctcgtcgagcagggcccggtcaacgggcgcgctcactccgatcttcgggcgcggctggccgtccgggtagaactcaccctccgggtcgggcacgaggtcgatgacgttggcaccgcgggcgtaggtaacctcgcatccgtcgccggcgagcgcacggaagccgtcgagcacggtggtgatcatgccgcgcggatgaccgtcgggcatccagccgacttggccggagctgccggcccagtcgccgagctggttctgggcgtcgtcggcgagcgggccgaccacggcgatgcgcttgcgcgcgggcgcgtcaccggagccggggatcgcttcggccggcgccgcgtcgaacggcagtccgccgtcgttgcgcagcagggcaacggcctcgcgagcgagctcgaggttcacgcggcggtgatcctcggagccgatgacggccttgatgcgcttctcgtccggcagacgcgggtcctcgaacaggccgaggcggaacttgagcgcaaggatgcgcgcgacagcctcgtcgatgagcgactcgtcgagcagaccggtgtgcacggcctcgatggcgccgtcgtagaaccccggcgtggtcatgaccagatcgttgccggccttgaccgcgtcggcggcggcgtgcacgtagtcgggcttgaccttctgctcccatacggaacggcccacgttgtcccagtcggtgatgagggtgccgttgtacttccatgcgccgcgcagcttgtcggtgagcagccacttgttgaacgtgaccggtacgccttcgatggactcgtagccgagcatgaacgtgccgcagccctccttggcgatgcgttcgaacggcggcaggaaccaggattcaagcttgcggtggctcaggtccgcttcggaggcgtcacggccgccctgggtctcggagtatccggcgaagtgcttggcgcaggcgaggatcgcgtccttcggcagcgtctcgccggcctgggcaccgccctgatagcccttgaccatggcggaggccatctcaccgatgagcatggggtcctcgccgaaggtctcgtccacgcgaccccagcgggtgtcgcgcgcgatgcacagcaccggggagaacgtccagtgcacgccggtcgaggagacttcttcggcggtggcacggccggccgcttcgacggccttcgggtcccagctcaacgccatgccgagctgggaggggaagatcgtggcgccgggccagaaggagtagccgtggatgcagtcgtcgccgatgacgagtgggatgccgagacgggtcttggtgttcacggtttcgacggcgcgcggcaggtcctcggggctggtgtgcaggatggagccgacgtgcttgttcacgatgagctcgtcgaggtcgccaccgcgggcgtcgagctgcatcatctggccgaccttctcttcgagggtcatgcgggagagcaggtcggcgatgcgctcggaggcgggcaggtcggggttcttgtagggcagcgtttcgactgtggtttccggtgtggtcgcggtcatggttgtgttcgcctttctgggttccgtgcggtcactcgatgacgaaggtgttgaaggagcgcggggcgagcgtggccttgaagccacgggaggcgtcggccgggtcggcgaactcgaacgggcgttcgtcctccagcgcgttctgggtcacgaccacgatggtgccgtccgggttgcggaaggcgatggccatggagttgaagtggctggtggtgccgagcaccttcgcgccggggcgcacgtacttggagaagtggcgcatcacgtagtattcggggttgtggcgcacctcgtgcgtgtcggcggtgatggtgaacagggagttctggcgcgaccccggccagccgaccaccgaccggggttttcgtaatcctagaccaaacacacccggcacctggcaggccgcggccggtacgacaagggccagaacgcccgccaggacgctccggcccgaatcacggccggcatggaacccggtcagcgctggaacacgtcggggtgcttcggatctccgggaatatcgtcgagcaggccctcgaggccgaggaactcacgccagaagtcgagcggctggccatacgggttggattcgcggccgtgcgcctggatgttcgccttggcttcgaacacgtcttcctcggtgagcccgtcgaagtagctttcgagacggatgcggttggacggcacgtagtacagggacgcgatgatctcggtgagccgttcgacgcgttcgatcggcagcgaatcccagtggcggaactcgatgaagttcttgagacgcacgtcgttgaaatgcgtggagatgatgtggttgatttcgtacgcgttgagctcgcggtccgggtagacctcgccagcgttctcacggaaggcggcgcgatgcagctccttgcggctcagccccgattccaccgcttcgggcgtgtgcgtcaggtcggcgaacatcagcggcgtggacagcacgtcacgcgcgtagtcctcccagccgaaacgctggtcgaacaggccgggggtcacgttggtgcgctggaagtcgaggtagtcccacatgcgctggcgcagcagcggatacgggttgagacggccctcgaagtagggggtgttgcggaagaaccatgcgagaatcggcccgatggcggtgccgacgcgcatcttatcgatcgaatccttctcgtcgacatagtcgatgctcacctgggtggaggcggagcagcgcatcatgcacggaccgaactggccgacgcggccaaggaagtcggtcatcgcgtcatagcggcctttcggattgaccggcacgtcgacgaaactcgacttcggctggtatccgtagttgacgaaacggaagcccagctcctcgaggatcgggtccgcctcacaccggaagtcggcgtacaggccgttgaggtcgcccggctcatgaagcacgccgatggaagcctccacctggccgcccggttcgagcgacaccgcaacgccttcgcgcgcgagtccgaccagatggccgttctcccagtattccttgctttcgtcataatacggagcgagccgtttgaggaacgcttcgatgccgttcggctcgtagtagcttacggccgtgtcgtcggcgtcatgcaccggcagatgctcaatctcgacacctaaaccaccggtgccgcgcttggagcgccccgcctcgaagaacttcagaaggctctcgacatgcttcgggttcggctcggcgagcaggtgcgcatagctgattctgggagtgaccatgaacggtatcgtaggcgagtcgcgcgacgcgcgtcgccgcgcgcccgcgaatcggctatatctttttccgataaccggcacgtcgccggacatccgccatatcacgccgcaacgccgcaccgcgccgtcgcaccacaccgcgccgccacgcccccatcaccgcacgccacgcctccgcaacgccgcgccacaccgtacggctttgccgttatgcgcgatgtcggatacactcattgatttgtaaaccttgtttacagaaacgtccggcagagaggccggaccacaccatcaacccaccatcaacccacggcgaacagccggaataaaagaaaaacaacagaaaacaacagaacacggaaaacagcaacaacccatacaaaacaccggcaaccataagcacgtcggaagcacaccggaacgcacaccgaagcgcaccggcgaccgctccggttccacaccgaaaccacgccgaaggccataccggaaacggaccgaggacatatcggacacgcccggcaccccaccggcacgccggtgcgccacaatcgaaaggaaggaaagcggcatgacatcccgtcagggcagacaagccatagccgcgacggccgcaatgggcgtggctgtcgcgctggcgttgccgaccgctgcgttcgcgcagtcagcaacgcaaggaaaggagaccgctacgaccacgtcatcaggcaccacctactacgtgtcgtcggcacacggcgacgacgccaacgcgggcaccagcgaaaacgcgccctggaagtccctgaccaaggtcaacgacatcgcctcggacctcggtccgggcgattcggtgctgctggaatacggctccgaattcaacgaccagtacctgcacatcaaggacaccgccggcaacgccgacgcgccgatcacgatctccgcctacggcgacgccgacgaaggcaagccggtcatcgcgtcgaacggcgtcaaaggcagccagtgggagcaggactaccgtgccaacgtcggcaaccacaagaacaagggcaccgtctcaaccacgctgctactcaaggacgtgtcgtacatcaccgtctccaacctggagatcaccaacgacgacgcggacgtctacgatccgatcgacacgtggaagtggaccgacacccctgattccgacggcacaaaactcgaccgcagcgcctcgcgcatggaccgcaccggcgtggccggcatcgccgagaacggcgcgacgatgagcaacgtgacgctcgacaacctttacatccacgacgtggacggcaacatctacaacaagcacatggccaacggcggcatctacttcatggcccactaccccatggagaacacgagcgccgaaaccgacgtctggctcagggagcacgtctcacgcttcgaccacgtcaccatcagaaacagcaccgtcaaggacgtggatcgttggggcatcgccgtcggctacaccgcctacctcaactacatcgacgcgaactacggcgacggctccatcgacgacgccctcatcgcgaagtacggttccaccaacgtgcgcatcgagaacaactacgtcaagggcgccggcggcgacgccatcaccctgatgtactgcgaccgcccggtcatcgaacacaatgtgggcgacagcgtctcgaagcacatcaacacgcaggactacacgcagcccggctcctacggcggacgcgtggcggccggcatctggccgtggcgttgcaaggatccagtgttccagtacaacgagatgtacaacaacctcaacgccgagcacggcaacggcgacggccaggcgtgggacgccgactacggcgacggcacgctgtaccagtacaactactcgtacggcaacagcttcgcctcgctgatgatctgcaactggtacgcggttaacaccacgttccgatacaatatctcgcagaacgaccgtcagggcgtgttcgacctgccgtcgaacggccccggcaaccacatctacaacaacaccgtctacgtggacgccgacagccaggtgctgactaagcgttccaactcgcagtccctgttcgagaacaacatcttcatcaacgcgaccaacacgaagaagacggagacctggaaccgcggcagccagaacggcggccagacgtacgacaacaacatgtacgtcaactacgcgaacaagcccacctccgacgccaacgccatcgaggccgacgacgtgtccgcagtgcttgcgggcgccggttcggctccgacatccgccctcaagagcggcgccgagcatgcgcgcaccggcgagaaagccgcgttcgacggctaccgtccggtcgcgggctcgaaggcgatcaacgccggcaaggtcgtctccgacctcaacgactacgcggtggagaacgacttcctcggcaacgcagtcaagggcaggcccgatctgggcgccgtggaaagcgacgtggtgtccgtcacgatggcctcctccaagtacgagaccggaaccgaaaccgattccgggaccggtgacaagaccaaggtcatccacgtgaccttcaccgacaagaacccggtgaccgtcaaggaactgctctccaacgtgtccgccgacaagggcgtggacaaggccgtgtaccgagtcgccgacgccaagtccggcaagtccgccgacgccaggtccgccgagtccgaaccgaacatgctcgaccgcctgctctccctgctcccaggctccgaccggaacgccaaggacgacgagacgaagctcgccgactccgaaccggtccgcgatggcgacatcctgcgcttctccgccgaaggcacggacgagaccgacgagtacacgatccgccagcgcatcacgtgggattgggtcgcggactacgagcaaggcgtcgccgacttcgactggaaggcgcagcgccgcacgtccgccggcggcgagtggaccaccatctccgcatacgacggctcgtggccgaacaccgtgtacgaccagtactacggtgtcggcgtcaacggcaccctcgccgaactctccggcgaccgcaagcagacgcacggcctgctgatcgacaagcccggcgacggcctgcccacggccatggcgtggaaggcgccggagtccggcactgtcatgctgtcgctcaagacgttcgccgacaagatcgctgaaccgtacctgcgtcagaacgcggacaacgccggcaagaaggtcacattgtcgctgatgcgcaacgacgagacgctctgttcggccgacgacctgtccgtctatcagaagtcctccgaacagttcgcgcagtgcctcgccgagcacggttcgatcgacgtgcaggaaggcgactggatccgcatcgtcgccgacgccgagaccggagtcaaggcgccgtcgctgcacatcagcccggtcatcacatatgaggacaaggcgcccgccgcgccgaagcagaacgtgcgctacgacgtctcgtacgccgcgacggacgccgtcgtcggcacgcagtcggccgtcgccgccgcgttcaccgcggacggcggcgaggccgacgcgccggacggcgtcgcgttcgccttcaaggacggcggcgatgagggcgaggcctcgcccgtcatcgacgcgtccaccggcgccgtcaccttcacgcccgccgccggacagtacggcgcgaccgtcacccgcaccgtcgtcgtcacgtacgcggacggttcgagcgacgagacgaccgtcacgttccgtgtcgcgcaatcgcacgcgcagcgtctcaacgtgctgtacccgaccgtgcgcggcgacgccggcacggacctgaagcgcacgccgaagttcacgctgaaggcggacggcgcggccgcgtctgtgccggaaggcacgacgttcgcgctcggcgcgaacgcgccggccggcgcgagtgtcgacatggcgaacggcacggtcacgctgaacagcagggtcggcggcaccgtcaccgtgcccgtcacggtgacgttcgccgacgacggcgccagcgtctcctccaccgcccgcttcgaggtgaccgcgcccgccgcgctcggctcgtccgagttggagaccgcgactgtcgacggtgtgaacgtcgtctacgcgccgttctccgccgacagtccgatgaccgtcgcgcagctgctcgccaaggtgacggccgaaccgtccggcgccgataagggcgtgtaccgtgacggcgtgcggttggaggccggcgcagaactcgccgagaacgacgtgctccgcttctccgcgaaaggttccaccgtgtccgacgactacgtggtgaagtcgaagaccacgtgggattgggtgaacgacttccaggtgcgcgtgcagggtccgatctggtacgggcagcgtcagaccgaggccgacggcgtgtggtcggatatcgccgacttcgacgcgacgtatccgaactggatgtacgagacctactacggtccgggcgtggactacgcgaaccacagcctgcccaccgaccgctccgccatccatggcctgatcagcgattcgcccgcgtccgctggtggctccgccatggcgtggaaggcgccgaaggccggcacggtgaaggtgtccatccgcgaggacgagccgtacctgcgccaggacggcagcaacggcaaggcgttgacgcttcgtctcatgcacgacgacaaggtggtgtgcttcgccgacctgaccgtctccaagcagcgttccgaggagttcgccaactgcgtcgccgacaagggcgagatcgcggtcgaggcgggcgattggatccgcgtcaccgcgacgtccgcgtccggcatgaacaagccgtccgcgcacatctccccggtcatcgcctacatggccgcctccacgccgggccccgaacccgttccggtggacaagtccacgctgaaggccacggtcgaggaggctctgggattggccgagtcggactacacggatgagtcgtgggccgcgctcgtcgccgcgcgcgacgccgcgcagaccgtgctggacgacgatgccgccaccgccgaacaggtcgagaccgcgcagaacgcactgcgtgacgccatcgacggattggagaagaagccggtcgatccggacccgaacccgaaaccggatccgaaccccgatcccgatccgacgcccgacccggaccccgaccccggccccgacaccaagccgggtgacggttccggcacgggcaacggttccggcacgggcaacggttccggcacgggcaacggttccggcacgggcaacggttccggcacgggcaac

SEQ ID NO: 909 - DNA, 42548 bp, Unknown
  gut microbiota DNA sequence
ggcgcgaccaccggcggcaagctgaccgccaccggcgccgacgtggccggcgcggccgcgatggtcgcgctgaccgcggccgccggcatcggactggccgccgcggcccgtcgccgcaggtgaccgatgccacgtaggcaccggttcgccgccgccatcgccgcagtcgcggtggcggcggtcctgctcgtcacattgaccgtcgccgtcgtcacgcacggcgacggcgccttcgcgcccgcaggcacgcctgcgggcgcgggcgcatccgccggcatcggctccgataccggctccaatgcaagcgaggattccgacatgttccccaccatcgtcttcggcgacaccgtcatcgaacgcaaggagtacgtcgcggcgctcaaggcgcaacacggcgcggcgcggctgtactttcggcagacgtacggcgtcgacccggccgaggacggctgggataaggcgcacgacggcgaggtcccgtgccgttggctcgcgagccgtgccatcgacgaactgcgacgtcggcacgccgcgtacctcatcggcgtggatctcgggcaggtggccgacgactcctatgcgagcatcgtcgcgcgcatggaggccgtgaacagcggcaacgcggaactgaaatcggacggcggcatcgtctacggccgtaccggcttcgacatcgacagctacctgagctacgaactgtccgcgttgaagaacgcctatacgggcgacgagtcgaaccccggcatgagcctgtccgacgacgaggtgcgacgctactacgacgagcacgactggacaaaggacggcgtcgacgggaaggctccgctggacgaggtgcgcggcaacgtgaaggcgcagatgcggtcggaacgttacgacgagctcgtgagccagcgcgccgaagcgatcgacgtgaccgacctgccatgggacgcgctgtaccggttcacggcaggcaggctcgggtaggacgggtgtgaccggtgccggccgaaaagcaccagaacgaataaggcgggtgtcccgttccatacggaatgggacacccgccttgtcgtaggccgcagaccggtttgcccggtctgcgccggtctggtgccgaccgggcgtcggttggacgtcggtttgaggtcagtcggcggcagtgaagccctgcggctcgtcgccgtcggcgaacttcgccttgtgcgccttcttcgcggccgcgatcatcagcttgatgcggttgagctggttcgcctcggaggcgcccggatcgtagtcgatggacacgatgttggcctccgggtgcaggaggcggatcttgccgaacatgccgcggccggtcacatggttcggcaggcaggcgaacggctgcgcgcagatcacgttcgggcatccctgttcgataagctcgaggatctcggcggtgagcagccagccttcgccggcctgcacgccgatcgacgtgacctcggcagccttctcgacgagttcgggcatcggatcgtcttgcttgaacttgccgtgagaggtggcgatggccgccttgatcggcgcgttgtagcggtcgaggctccaacgcatgagcgcgtacaacgtcttgttgccgccggtgccgagatacttctcgttccagtcggtgatgtacgggcgcgtggtcatgaactccatgatgccgggcaccacggcctcgcaatcctgcgattcgatgacgtcgacgacatggttgttcgcatccggctggtatttgacgaggatctcgccgaccacgccgacgcgcaccttgcgcggcacgtccttcaacggcagagcgtcgaagctcttcacgatctctcgggcgagcacggggtacggcaggtagcggcgcttgagccacggggtcttcgcggccgtcttcgagaagccgtggtgttcgagcgcctcgcgcacgatcacgtcccactgctcgtacaggcggttcgccgcgcccttctccacctcgtacgggcgcacgcggtacaggcacttcatgagcaggtcgccgaggatcagcgccttgacggtgcggtgcagcagcgcgggcgtcaccttgaagcccggattgtcctccaggccctgcgtggagatcgcgatgaccgggatctgcgggtaacccgcgtcgatcagggccttgcggatcaggccgaagtagttggtggctcggcacatgccgccggtctgcgtaatcgcgagacacaccttgtctggatcgtatttgccttcgagaatcgcgtcgatgagctgtccgatgaccatgatggccggatagcaggcgtcgttgttcacgtatttgaggccagtctccacgtcttcgcgcgaggcgtgcttgaggatgtcgaacttgtagccgccggagcggatcaccgattcgacgagggagaagtggatcgggctcatctgcggggcgacgatcgtgtagtccttcttcatgtccttgacgaacttctcacggtgcgcgtaacgggacatggtcgcgttgttgtggccggacttcgacttcgcggacttcgacttggcgttcgcggcatcgttcgtggtgccgtcgccgagcgcggcgagacgcacatcggcgatgtcgcgcttcgcggcgcgcttggacgcgtcgcgcatcgccttggtgagcttcgggttcgcggccatcgtcgcgtcgagcaggacctgacggcccggcgtgggcgccttggagccggtcttgcggaatccggtggacttcggcgcgttcgcgggggcggcggcgtcgctgccggcatcggccgcgtccacgggcctgtcggcggccttaaccttcgcttcggcggcggcgacggcggcctgcgcttcggcgagcgcggcctgcgcggtggcgagatcggattcggcctgctcctgcgccttgcgggcggcggcctgcgcggcggcgtgagccgcgttgcgcggggcgtcggactcggcggaaccggactcgtcggacgtggcgagcgcggccttggccatgcgcgccttgttcgcctcgcgttcctcgacggcggccttgagcgagcgcaggcggatcttcgccgcgccgaggttggagacctcgtcgatcttgagcagcgtgtacacgtcggccttgtcggcgaggatctcggccacctggtcggtggtgatggcgtcgaggccgcagccgaacgagttgagctgcacgagttcgaggcccggataggaggcgacgaagtgcgcggccgcgtagaggcgcgaatggtaggcccactggttggtgacgcgcaacggcatgcggttgacggtgaccttgcggtcgtcgacgtggcggaatccgttcgcgttcttcttgcgcgggtcctcttcgccttcggacaggaagtcggtcaggtcgagcttctcccccggctgcagttcgcagatcgaatcctcggagaggacgaccatgccgagcgcgcagatggtttcggggatgccgtggttgatttccgggtcgatgtggtaggggcgtccggcaagcacgatgccgcggcagtcgtgctccttcatgtaggcgagggctttgaggccttcctgctggacgtcgtgtttgaagaccttgtcttcggcgtaggcggccttgacagcagtttcggcctcttcgcggctgacgctcgcccatgcgaactcctcgacgatacggtcgaccatgagctcgtggttggcgaggttgaagtacgggtgcatgtagcgcacgtcggggtcacgcagttcgggcatgttcgcgccgacgacgagcggatagttggcgacgaccgggcagttgtagtggttgtccgtgttgggcacgaggttgtcctcgtaactgacgcacgggtagaagatcgtcttcatgcccttgttgagaagccatttgatgtggccgtgcacgagcttggccgggtagcagatgttctcggaggcgatcgattcgatgccggtttcgaacagttcgtggctggaacggccggagatcatcaccttgaaaccgagcgaggtgagcagcgtgaaccagaacgggtagttctcgtacatgttgagcgcgcgcggaatgccaatctcgcctcgggtggcgttcttgtcggtgaggcggcggtaggcgaagcagcgcttgtacttgtagtcgtacaggttcggacggtcggagcgtttcttcttggcatcgccgccgcgttcgcaacggttgccggtcacgaagcgggagccgtcggagaacgtggtgatggtgagcttgcagtggttctggcacagcttgcacacgtcgcgttcggtggtcatcgacatttcgttgagggcttcgccggtgaggattgacgagacggtgtggcgcacgccgtcgacgacgatttcgccggcgtgcgcggcggcgttcggctcgtcgccggcggcggactcctcagccgccgccgcgtcgacggaacgcccgtccgcgccgacgtgcgcgttgtcgtcgtccgcgatgtcctcgtagtgcatgcgggcggtgagggccgcgccgaacgcgcccataaggccggcgatgttcgggcgggtgacctgacgttcggtgagcagctcgaaggcgcgcagcacggcgtcgttgaggaacgtaccgccctggaccaccacagtgtcgccgagttcgccggaatcacgcaacttgatgaccttgtacagggcgttgcgcaccacggagtagcacaggccggcagcgatgtcctcgatggaggcgccttccttctgcgcctgcttgaccgaggagttcatgaacacggtgcaacgcgaaccgaggtccaccggatgggtggatgccaaagccttttgcgtgaattcctgaatcgtcaggcccatggacatggcgaaggtctgcaggaacgaaccacagccggacgagcaggcttcgttgacggcgatcgagtcgatgacaccgtcagtgatggccagatatttcatatcctggccgccgatgtcgatgacggcggtgacgccggggctgaccatttcggcgccacgatagtgggccatggtctccaccacgccctcgtccaagtgcagtccggtggtgatgaggccttcgccgtatccggtggcgcaggagcgtgcgatccacgcgccttcgggcagctcagactgaatcttcttgacgatgttgatggcggcggtcagcgggctgccttcgttgttggcgtagctggaccagacgatttcacggtcgtcgttgacgagcgtggccttgatggtggtggaaccagcgtcgatgcccaggaagtgcgggccgtgcgcgccttcaagggtgccgatgtggatgtgttccttgtggtggcgcttgttgaagtcctcgcgatcggcctcggtggggaacagcggcggcatggtgggcgtgttggaaggcaggttcttcagctcgtccagacgcttcaggatatcgtcgcacgtgtgggcctcgaaataattgccctgatcgtcggagtctatgtcggcctgcaatgccgaaccgtaggccacgtacaagtgggcgtcggtcggcacgatgaattcgtcgaccttgccctcaagcgcgcgctggaatgcggcgcgcagctcggacatgaagaacaacgggccgccgaggaagatgacggtgccgtgaatcgggcgtccggaagccaggccggcgatggtctgcgtggccactgcggtgaagatggaggcggccaaatcgggcttggcggcaccatcattgatgagcggctgcaaatcggttttggcgaacacaccacaacgcgaggcgattggatacaggttctcgtagctcttggccatctcgttgaggccggcggcgtcggtgtcgagcagtgtggacatctggtcaatgaacgcgccggtaccacctgcgcacgaaccgttcatgcgctgttcgggcgtgggtttcaggtaggtgattttggcgtcctcgccgccgagctcgatgatgacatcggcctgcgggtattccttgtcgattgcctcggtttcggcgatgacctcctgaatgaaaggcacatgcagattgtcagcaagcgccagaccgccggaaccggtgatagacaggcgaatcggttcgtcgccgcgtccgaggtccacaagcttcttgtggatgtcgaccaacaggccggccacggtggcacgcacgttggcgtggtggcgtcggtaatcggagaagagggtgtctcccagggaatcggactgatcaagcaccacggccttgacggtggtggaaccgatgtccaatcccacacgcaggggcttcgggtgtgaagcgggctttacgctcgcgtcagtggcgatgtcaaccatgtgttcctcttaattccgacttccgggagtgcacgctttgaggcatcatgaaccgtttcgggacggctggcagataccctgcggacggcttcgcccggctacttcttatggaatattagtccgaccacctgcccaacatggcacgaggcgaggcgatttcgctcacgggaaggccttttcccaacagttccaacgatattgctgagtgcggcattccagaactgctactacgaggcctgttggccttcgccggcttcgcggtctttcaaatagatttcggggatatctcgttcttgatcgtggagcttggcccagatgaccggttcgccggcttccagagacttgggcacatcgaggatgcgctggtttctggagccgcggaattgcagcagcgagtccttctggtctctgaggtagcggccgtcgacgagaatgtcgatgagatgtagcaattcaagcttgtctggggtttctccggggcgcatgagttcttcccatgtgtagccggtccacgaccagatatctttggtatgaccgaattcctggcggatacgttgcgcgagcggcaccagcacgggagtgttgaggaatggctcgccgccaaggaacgtaatgccttgcacccatggggctttcagatcttcgatgattttgtcttcaagtttttgcgtgtattcgtggccggcttggaaatcccagatggaggcgttgaagcagtcgacgcagtggaaggggcaaccggagacgtaaagggagttgcgcacgccttctccgtcggtgacaatgaaggttttgtagtcggcgatcatccgcttggacatgcgccggccatcccattgaccggctttcggatcgttggcaagaccgttggagggtacggaggggccacgcccggtctcgccggccgcaaagtcatggcgcttgggttcgggcttggtcgtatgcagctccggcatgattccctccttacggaaagcattagctcccgctggcgggagctgtccgtcatcagacggactgagggtggtcaacaccataaaggatgaccgccctcagtctcgcttacgctctacagctcccgtcagcgggagcaagtataaaccctacttggtctcttcgaaccactcgcgagtggttccgtcatccagcgtcacacgaccggtttcgccgctcatgtgcttgactcggtgggcaatttcctcgtgacggccgtgcaccatcgggcgctggaccgggctgccgagatagccgcaggtgcgcttggtgacgttgcacttgtccgggttggagttaccgcactccgggcacttgaagccttcctcggtcggctcgaagtcgccctggaagccgcacacgaagcagtggtcgatcggggtgttggtacccaggtagccgatgccgatgttgtaggcgtaatcccacacggcttcgagcgccttcgggttgtcctgcaggcacgggtactcgcagtagttgatgaagccgccggaagcgtagtacgggaagtccttctcgtagctgagcttctccatcggagtgggctgcaaccacaccgggtagtggaaggagttggtgtagaagtcgtgatcagtcacgccttcgatacggccgaacttttcacggtccatgcggttgaagcggtcggtcagggattcagccggagtggagtacacggaatagtggtaaccctccgctttgctccactgcttgcacagctcgttcatgcgcttgacgatggacagcgcgaactccttgccttccggatcccagccgtggtcgcgaatccagttcttgccatagaagaccgcagtggtctcggcaaggccgatgtagccgagcgacacggtggcacgctcgttcttgaacagctggtccacgttgtcgttggcaccaagacgaccaaacgcaccaaagcggaacagggtcggggcgttgaccggggtggcttccttgcagcgcatgatgcggaactggagggcctgatgggcgacttccatacgctcgtcgaacagcttccagaagcgagccttgtcaccgtgggattcgatggcgatacgcggcacgttgacggtgaccacgccgaggttcatacggccgtcttcttcatccttgccggtctccgggttgatccaaccctgcaggaaggagcggcaacccatcggagccttgaaggagcctgtgatcttgacgatgttctcgtagaacaccacatccgggtacatgcgcttggtggcggactcgagggcaagctgcttcagatcgtagttcgggtcacccgggtcggcgttcacgccgtgcttcacagtaaagacgagcttcgggaagatggcggtgtggtgttccttgccgaggccgcgaatacggttcagcaggattgcgcgctgcacttcacgagagaaccagtcggtgccgagaccaaagccgacagtcacgaacggggtctggccgttggacacacggttggagttgatctggtattccatggtctgcatggcatcatagatggccttgcgggtacgaatcttggcgaggatttcacgctcttgctcaagttcgtcaacgtcggtgtggaacggggtgtccatcggcagcggttcacgggaaccgaaatgcagcttggcgggctcgttcttcttggcgctctcgacctgacgacgggcgaattcaaccggcatgccgtcggggatggtctcacgagcttcctcaaggaacttctcgtaatccttcttggcatactgggcaagatgctcgtcggcacggttggcggtctggccaccatactggctggaggccacgtccttcatgatctgggtaatctgggtggccgcaatggcgatggacttcggggaagccatcggagcgttgccaagagtgaagccattggccaacatgtcccagaagttcggcaaggagcagttggactgggcagtgaacggcgaatagtcggcatcgtggaagtgaatgtcgcccttcatgtgggcgttggacaccgccggcggcagcatgttgaacgcggcggccttggacacggcaccggccagcagatcacgctgggtggagtagacgttggaatccttgttcgcgttctcgtgaatcagggtcgggtcatgattaatgaagcgagcaacggcctcgttgacatcagtggccttggcacgctgaatgtctttgtcgagacggtaattggtgtaggcgcgagccacatcgtacaggtgggcgtcaatgagggcgtgctccacgagattctggatgtcctcgattttggcggggccggtgtaacgccccttgatttcgccttcgacttggttggcgaaaccacggatcatggcatcttcttcggggccgacttccttgttcaggtcgccgaaagcagacttgaccgcagagatgatgttgatggggtcgaagtcgaccacacgaccatcacgcttctcaacgagcacggtggaggccttggcggccaccttggtctcgttatcggtgacggtttcctccagcacctgtgcgcccatcgggcacccctttcctataaggcgaacactcttccgagttccgcattttggccgcactcgacgtgggccacacgaaattacattgatgtcgttttcttgaacctctagaagaatacggcatccccacccctatatctagtgctcaacagtggcgtgtcgaactatttatagggttttcggctattttccgccaaaaccacaagtgtgtgattagcgtaactgttttctgctcgcgtgtcacacagcgagctcactgacgactctcaatcgtcagcgcaacgcatatctcactcctcttcatagcacccgtttcttcgccataatgactcctttcttctgatgcaccagaccatctccatcatcggctgacacatcgcttcgcacggttcttgcattcatcatcacaccgttttcaggcgacggtaaatttttaccgtcatcaaccagcgcacttatagtggagtgcatgactactgcaatgggctactcctctaccggccgcccaccgactgccgcttcactggcctcggctggctttgagccgggtcaaggcacattcgcgcccgatcagggcactatcaatctgccgaatgaacctcgccctatcgatcagctgcctgcacgcgccgctgaaaccaccgcgcaaaatccgtggccggtaagtgtgctgagccagaagttctacggtgccgtggaacgatggccgtccgcctgggtcaccggccagatcacgcagatcaatacccgtcgcaccggctcggcctacatcacgctgcgcgacgacttcgaggatatcgccatggaagtcaatggcttcggcaggttcgcggccgcggccagccagttcgttcagggcgaccgcgtggtgattcatggcaaaccgaacctgtggatgaagcgtacttcgctgtcgttgcgcggagacacgattctcaaggtcggagccggtggcagcctcaaggccatgatcgacgaattgcgcaagcggcttaagggcgagggcctgttcgatgccgatcacaaactgcctctcccggagtttccgaagactattggcctgatttgcgcacctcaggcacgtgcggaaggcgatgtgatcaccaatgtaaaccttcgttggccttccgtaaccttcaaggtggtccatgtgcatgttcagggcgagcaatgcccggccgaggtggttcaggccattgcacaactcgatgccgacccgagcgtggatgtgatcatcgtggcccgtggcggcggctcgtttgaggatctcatcggtttctcggatgagcgtgtggttcgtgcggcgtatgcctgcactacaccattaatctcctccatcgggcatgaggatgactggacattgctggatctggtcgccgatctgcgcgcctccacccctaccgatgcggccaagcgcgtggtgccggatgtgcgtgagcagtcgcagctcatcgaaggtgccatcgaccgtatgcgactgcgggtccgttcgcgcgtggagaacgagattcgacttatcgagggatatgcgaaccgcccgagcctgacacagccgcacaccatgcttgagcctcatcagcgcttaattgacgactcgttgcaacggctcgatatcgggctgcgacgcatcgtggacgatgcccagctcaccgtcgagcgagctcacgcctcactgaccgcactcagcccgcaatccacgttgaaccgaggctatgcggtggtgcagtccgccgatggccacgtactagacgatgcttcgcaggtaagccctggggatggcatcaccgtcaccttgaagaagggtgtcattaccgcaaccaccacatccgcaaccgcgtgacacgccatacgcagccacgcatatataccgtatatataaggagaacatcatgaccgaaaacgccacatccaccgacatgaacacccccgccacgtccctgacggacaaggaacgcgagctcatcgcccagatgccatatgaggaggcgcgcgacaagctgattcaggctgtccaggcactggaaaccggcggcctcaatcttgaccagtcgatgcgtcaatgggaaatcggcgaggccttggccaagcgcgcccagggcctgctcaacgacgtacgagccaagctcgaccaggcacaagccgagcaagccgccaacgaagccaccgcaggcacgcagtccaacctcgactgagttgcctcccggcgcggcatcccgcggctcgcacccgagtccggactggactgagttctgcttcccggcatacgatagtggtgattaggccacattggtagcagttatagaagggaaatcccatgtcaacgctgattcttgtattccatccgcacctgaaggacggctcgcgagtgaacgcccgtctgcttgccgaactcgccgcacaaggcgaggacgacatcatcgtacgcgacgagtacgccgaatatccgaacttctccgtcaacgccgacaaggagcacgagctactggaggccgccgaccgcgtaatcctccagttcccgttctactggtactcctcccccgcgctgctcaaggaatgggaagacgaggtcatcaccgcaggctgggcctacggtggaggccacgcactcaagggcaaggagctcaagctggtggtcaccactggttccgacgccgccaagtaccgcaaggatggcgagtacagccacaccatggaggagctgctgagcccgtttgaggtcgtggcgtacaagatcggcatgaactatgctgagccgttcctggtgcagggcaccgccaccatcggcgatgcggagctggatcaggccgccgccgattatgtttcggcgattttggactgaataagctgaggccgggtgcaagtcgcacccggccttgttgtttcgcgggctagccgcggtctctcccagtcagcctgcggctgacagttccctcgtcagagagagcttattttttggatcagagggagttgatagctacttcttcaacggcacgtagatcacgtcgtcaatgagctcgcgatagtgctcaacgatttgcgcgcgacgggtcttcaggctcggggtcagcatgccgttggcctcggtgaattcgtctggcagaatctcgaacttacgaatcgactcggcgcgggaaacgccctcgttggcggcgttcaccgcacgctccacctcagcgtgaacgatggcgttcttggccagcgaggccagatcgggttccggtttggcgccctgggattccagccaattgttggcatccgccagatccagcgtgaccagagcggccacgaacggcttcttatcaccaataaccaagcactggttgaccacaggcgaggtcatcacggaagcctcaagcagacccggcgacacattcttgccaccagcggtgatgatgaggtctttcttacggccggtgatggagatgaagccatcttcggagatatcgcccagatcgccggtgtgcagccagccatcagtgatctgctgggcagtgaccccagggttgttgtggtagcccttgcacaccagcggtcctttgaccaccagctcgccgtcctcggcgatgcccgcagtgataccgcacatcggcatgccgatggtgccgatgcggttgtcctctggcaagctcacacacaccgggccgcaggtttcggtcatgccgtagccttccagcaccggcatgccgatgccgttgaagaagtgggaaagctcggagtccatcggagcgccgccggtgatggcgaagtcggcgttcggaccgaaaatcgtgcgaatcttcttgtacaccacctgctcgtagaaggcgtgggcgatgcgtccggtaatcggcagctgctcacccttctgctcggccttggaccattcgcgcgcgttctcggcggcgcgcatgaacatcttgccagcgaatccggtgccggcgcgctgggaggcggcattgtagaccttctcgtacacacgcggcacggcaagcagcagcgtggggccgaaggtctcgaagtccttgaccatcgtcttcatattggagctcaaggccagcgaaatcgtgccgccaaaactgaagaattccaggaatcgggcgaacacatggctcaacggcaggaacagcagcaggcggcggttgggccatgcgccggcacgaggcatgtactgcagcgcggaaagcaccaggaaggcgaagttgcggtgggtcagttccacgcccttcggggtgcctgtagagccggatgtgtagacgatggtggcgcggtcgtcgccgtgggaggcttccttgtattcccagaattcggcgtcggtgacgctttcgccgtaggtcttgatggcgttcagaccgccggcctcgattacgaacacgttgcgcagggtgggcacctcatcgcgcacggattcgatcttgtcacgctgcccgtcatcttcggcgatggcgagcgtgactttggaatcgttgaaaatccagctgacctggctggcggagttggtctcgtacaccggcacggtgagcgcgccgatggacatgatcgccatatccagcgcggtccattcccagcgggtgcgcgagacgatggcgactgaatcgcccttattgacgccaagtccgaccaggcccttggccaagtcgatgaccatgtcacggaatacttgggcgctgtacgggtgccaagtgccatcatcgcccttgtattcgatcatggcaccttcgggatcgcgcttggcgcggttatcgagcagatcgaacaggttgatgtcgctgtcaatcggctccttgacgggattggtgaactgcttgacgatacgagtatcgtttatggccttatcagcgatgttttcagtcatactccccatgtaactccacggatgctacaaaacacgcgcgaaacaacggattgtccagaccaaatggccccggcaatccgttatttcgggcaaaccaggtaaatctgtcgcaccgtacattcagcagattactcggcggagttattggcctttttcagctcgtcgcgaatctcctgcagcgtggcgagagtctgctcttcaacgctaggcccctgttcttcagcgtcagcctcatcctgggcagcagtgagatcacgaagcttattaatcggcaaaatcacgcagaaatacactgccacgccaacaagcaggaagttaatcagcgcgttaagaatcgcaccaaatgaaacagtcgagttgttgaacgtgatggtcagcagtccggaaagatccggtacgccgccaatcatgccgattaatggactgatgagattgtcgacgatggaattgaccacagcggtaacggcagagcccatcaccacacctaccgccatatcaatcatcgatccgcgcgacaggaatttcttaaagccattcaacggacctttatcggtcaaagcaacaactttgcgagcggttcctcccgtggccttggcaaagtcggtggcaatattcatgggattgtggttactcataacggcactccttacgaaattcagacacttcacttgtatccgactggttttcccacgaccccattatgccgcttgttggaatatccctataccactgcggcgttcccgtacatgactatgtacgagaacgccgccaaccctgcttgcagagaacctgttagagctgtttagaactggatgtaatcgacttccgtatgctcgccggtttccaagtatttcgccacatcatcaggaccgacgaacaccagttcgaccgcttgcgcaatcatcagattgacacgatccattggcgtaaggttttcgaaatagccgtacaccgggattcccagcgcatgcgcatatccgatttcgaacatcgtgcccgggtcctcgtccataagattggcgaccacggctttagcagcattaatgccatggatatcgtccgcaaagcatccttcagggcctacttcttcgatctggctgacaaaccgcggcttgaacagtaccttgccatggtcttccaatatcttttccaaacgttccatacttgccgtttgttcaggatcaaagaacggaccggccacatagaagtcatactgtttgtcttcactcatggtctctagtcatagcgcagcaacgtcgaacgtcagccgttattttcactgtatggacaaggggtcgtattgtgaacattgctacgggataaccgtcaacgactacgtacgttgcccacgattggcgcatgccgccgctcttgcgccgtccgcactgccagcccgtcagccgcgattgacgatttgcatggcgcggccatcgtccatcaggtggaagccatgcttctggtagaacggtgcgtttttgctttcctcaggcatgacttccagcaagaagtagtcgcgatacttagccttgaccagttcaacgagatggctgccgatatgctgcccgtgatatgccggatctaccagcacccaatgcatataggccaccatttcggtatcgtcgagcacgcgaaccaagccgaccaaatggccgccatcccatgcgctgatcaccgtatccgaatgctgcaatgccttgaacaaccgttccggccactgcgccgattcccaacctaccgacttgaacagcgcctcaacctgctcaacagtaaaccgcttctcttccgtgtattcgatagccatggaccctcacgacaaccgtgaagccccacatgtctttgcatagtttcacacgacgggatgatggatagtggaacctatacgtttacacatgcctaatgcccatggctcatcaccgatgaatagaggctgagataccgtcatgtttccgaagccaagtgcccgagatcggattcgaaccgacgacacccgctttaggagagcggtgctctatccactgagctactcgggcaacgacgtttcattgtacacggccacacgcccagtcgcatcatgttcgcgtggcagcttgcgcaagccatccggcaacctgagcaagccacatggaggaacccgacatcaggtcatggcccggtctttcgtgccagtttggtgcgaactgctcttgcgcacggcgaaaagacactgaaagacaagccgtacacggtacagtggcaaatcgcacgaaaagcaaagtaacagtaaacaagccggaggaaagggcagcatggcaaaggcacggagtactaccacaggcgcaagcgtacgagctcgcgccgctgccaagccacgctctgccagagccacggcacgcccagtatccaagtctgccgtgaagccacacaaacggcatcgtctgcttggttttctcgccacgatgttcgcgcttcttgcccttgccggcgctgccgcccgcgcgctgcctgccgatttacaggaactgccatttgcgccgattgtggtatcggcaacgccatggttcacgttgcttggcttgattgccctgctgttggccatcgtgtcgcggcgtatccttgccgcactaatcgccatcgccgcaatcgcatgcaatggctattggcaatatccgttcttctactcgaccgatccactcccccaagccgcgcagaacgccgtggccgcagcctcccccaacaccagcgatgcctacgcgcgcgtcatgaccttcaatgtgtataaggggcaggccgacccgcaagccatcgtcgagctggttcgcgatcagcgcgtcgaagtgcttgctttgcaggagaccaccgaggatttcgtcaaaaaactcaatgaggctggtattgagcattatctgccgtatgcgcaggtctcatcgtctgacggcgtattcggtaacggcctctggtcggccacgccacttgccgatccgaccgacgatgacgtgaattccagcgcctcattcatgcccggcggcacggtggatatgggtggccagcagattcgattcgtatccgtgcacaccaccgctcccgtacccggctactggcggcagtggaagcgatcgctggatgagttgggtctgatgcgcgagcatacggatacacggtatattttcatgggcgatttcaacgccacttacgatcacacgccattccgtgattttcttggcgaccggttcgtggatgccgcacgtgaatccggacatgggtttacgttctcatggcccacgaaccgtgcggctgtgccaatgttcgccggtattgaccacgtggtgcttgatcagggcatgaaggccggacaatgcaaggtggtcaaagtcgagggctctgatcatgcggcattgttggctaccgtggcggttgggtgattcccctcaataggactagaaaccgaggcgggtgcggccgaattggtcgagccagcgcaaaatcgcgccttcacgcagcgcccacgggcagatctcgacttcctgaatattcagggccttcatgatctcgtcggccaccacgccgccgcccacaatctgcatcgtgcgttcaggcgtgatgccgggcaaagccacgcgctgctcaggcgcgatcgccgccaaacgaggaatccagtcttccaactgctcacgagtcataatccatgaatcttcgcggcccggcgcacgcatcaccgcaccgcacaggcgagccagcgagcggaaggtcttggaggtgccaactgcatgattcgggtgcttggattgcgggaaaaccttgaccatcggctccagaatcttgcgcacgttcttacgcacgtcttccaactcgtcgggcgtggccatgccggaaggcagaaattcagtggtgacgcggcccgcgccagccggggcggaaagcgctacggtcggctcttcgtcggagcccatcgccacttcgagcgaaccgccgccgatgtccagcaccagcagtcggccggcatcccaaccataccaacggcgggcggccaggaaggtcaggcgagcctcatccgtgccagacagcacagtgacgccctgaccaatcagttcctcgatcttgtgaatcactttgttgccgttcggcgcctcgcgcagggcggaggtggccataaccagcagctgggtgatttcgtattcctcggccagccgcatgcactgggacacggcttccagaatcgcctcgatgccggacttcttgattgagccgtcgtcctttaaatacttcatcaggcgcactgtggatttggtgctggcctcggggtcagggcgagcgccgggggcggcgtcgacgataagcatgtggatagtgttcgaaccgatatcaagcacaccaagtcgcgtggtatgcgaacgcagattgaccatgattcctattcctgaccttacctaacccgtgatggccgaacaacgggccgaccatcgcaatcagccagccgtgcgccaccatggcgagtcgttcggccggcaaccaacaccgtgaggccagccgaacatcacacaaactcgactactgtacaacaatcacaccggctgccgcgccgttcacagcgattcgacgaacgttccgagacgttccagcccctcggtcagggcctcacgtgaggcggcatagctcaggcgcacatgcgtatccgccgtggccgcgccgaagtcgcggccaggagtcagagccacatgggcttcatccagcgcgcgttcgcagaacgtccaggcatccagaccagtgcgggagatgtcgaagtaggcgtagaacgcgccattcggctccacctcaaccggcaaaccgatgcgcttgagcccgtcaatcacaatgcggcgacgggccagcaattcctgacgacgagcttcgcattccgccaagctttccggcgtgaagcaggcgagcgccgcatgttgcgtgggcgtgtgggcgcacaggtagtagttggtggccagatcgtcaaccgcttccagcacagtgggctcgtccggcagaatcgcccagccgaggcgccagccggtcatgccgaagaacttggagaagctgttgcatacgatggcatcggggtcgcaggccagtacggacttgacttcggtaccgtccggctcccggtcagccaaatcaaggtaggtttcgtccacgatgcgccatgcgccgcggctggcggccaacttgcacacctcgtccaatacgttgaagtcgatggtggtgccggtggggttggacggcgacgtgatcattacggccttggtcttgctcgtccagtactggctgcacaggtcggcggtcaggtggaagcgggtggcggccgaggtcggcacatcgatgacccggccttcaaacgaccgcacaagttcgcggttgcatgggtaggaggggtcggccacaatcacatcgtcaccggggtccacggtcagcgcggtggccaacagcagagcggccgaaccgccggcggtcacgcagatacgcttggggtcgatgtcaaggtcatgacgctcgcggtagaagtcggcgatggcctgacgcagttcaggtaggcccatggcggcggtgtacggcagggcccggccgtcgtactgttcgcgcatggcgtcgcgtacggcgggcggcgcgccgaaatcgggctcgccaaggcttaatttgatgacgctggtaccttgggcgatcatcttgtctgcttgttcgccgaataccatggcacggaagggattggcctcacgcgctcggcgggacatgactggagacgcggccggagattggggctgctgcgctgcttcgttttccatatttcggttctatccgcctcacgggacaaggtttcttcttctataatcactgtaggtcgattgagtgcaccaacccgcattcaaggaggaataatgagtcgattcaatggcaagcgcgccgagttcgaggccagcggcgaaaaaatcaacgtcgcgattctgggtgcgggccgcatagctcacaccatggccggcaccctgacccagatggctgaagattcactgtattcctcatggattcacccgtatgcggtagcggcccgtgatattacgcgcgcgcaggcttttgccgaccaatggcattttgacaaggcttatggatcgtatgaggagttggtggcggacccggatgtggatctggtgtatatcgccaccccgcacagtctgcacgccgaacaggcgatcctgtgtatgaaagccggcaagaacgtgctggtggagaagtcgttcaccgcgaacgccgggcaggcacgtgaggcgctggccgtggccgaggaaaccggcatgctgtgcacggaggccatctggacgcgctacatgcccagccgcaagctcatcaacgaagttatcgagtccggcgagatcggcgaggtgaaagcggcgagcgccaacctgtgctatccggtgtccggcaaggcacgtatgaccgatccggcctgtgccggtggcgcgctgctcgatgtgggcgtgtatccgctgaacttcctggatatggcggtcggcgccgaccatggccgtacacttgatcatttcgatacgtcgatggtgcccgccgaaaccggtgtggatgcgcagaattccaccacgttgtattacagcgacggcacgatggccgtgtccaccagttcgatgctggtttcctccgaccgcggcggctatgtgtggggcaccgagggttatctggtggtcaccaatatcaacaatcccgagtccatcgacatctatgacaacgcccacaagcccgtgcgcagcattgcggtgccgccgcagttgaccggttatgagtatgaggtggccgatgcggccaacgcgctgctggacggcaagatcgaatgcgaggcgatgccgcacgccgacaccatccgcatcatggagctgatggatgcgattcgtgaccgttggggcctgaagttcccgtttgaatcctgatttcagctcccctccagaggggagctgaaattattccgctgaatctgcatctccttcaacaatctgctcatacagccgtacgaggcgttcgtcgcgcacggctttcgttaattcgcactcccatacggtaattacacgccagccagcggcctccagttcggctcgctgcgcgatgtctcgattgtgattgcgcagtagtttcgcctgccagaattccacgttcgatttcggcatcgaatgtttggaacatccttcatgcatgtgccagaaacagccgttgacaaacacgatggcgtggtatttcggcagtactacatccgggtgtccggggtaacgcttgtcgttcttgcggaatcgcaaccccttgcgaaacaggtagctgcgtaccagtacctcaattttggtgtctttgccacgaatatgcgacatcgtgtacgaacgggtaccccgctcatacttctccactggctgtttcttgcgattcacgcactccagactaccgtgacgttgcggcgagaatgagagcctgaacgaacgatcacccatcttgcccgtccgtgtctcttatcgcgggcaacaatcatctgccggtcgagactgcccgattagactgagttcaatggatgacatgacgattcgtagggccacggcggccgatattccccagatcgacgaactgctgcggcaggtgctcgaagtgcatcatgccggccgaccggatctgttcaaaggcggtgtcaagaaatacacggacgaggaattgaaggcgattctggccaacgatcagacccctgtgttcgtggcggttgcgccatctgccaatgacggcaatgacgccgaacataacgccgactcccccgccaccgaccaagtgcttggctacgcattctgcgtgttccagcagcacctcaacagcaatatcctgaccgatatcaaaaccctgtacatcgatgatctatgcgttgacgagtggtcccgcggccaccatgtaggctccaccttgtatcgctacgtgctcgacttcgcccgtcaatccggctgccacaacgtaacgctcaacgtctgggcctgcaaccccaaagcccaagccttctacgaacgcatgggactcactccatattacatcggcatggagcaggtgctgtagcgccgccgtttcagcagcacgatgatggcgatgatcgcagcgaggctgcatagggccacgccatatacaaagcccggagttccgaaattcatgaggcagattgtgatgttaccggtagtggttaccgaaaacacgacgataagcgcgacgatacgaatcatatccagcagtccagctgcttgagccaacagacgctccggtaccaccaatttggccgccgtgcacagcaaagtcgcctgaacggcgagcagaatcgcccattcccagaacatggacggttctttaagcaacgtggtctccggaaacatagacaccacctcattgataaaccacggcgccacaacaatctccacatatgcgagcccaatacaacacacgacaagcaccacggcaatggcatagcgccaagcgacgtctgttttgcgagatttacgagaaatgaatgcgataccagcgttcatggctatgctccttaatccaatatcaatatcaatggatgaacctgcactgcaccgtatgccaccatcataatatatcgaatatcgatataaaaatatcgaaaaacactttcaccattcacctacacatccgcaaacccatgaatacacatgttcttaatcgggatggggagtgcacaaagaagctctgtcaccccagcagattgaggagatcgtccctggtgagggtggcgatggaggcgggggcttcggtgagggcgctggcgccggtgccggcttcgtcggcaagcaaggaagcgtcggtgaactggcgggcgagctcgctcttagtatgctgaagctccaagatacgttcttcgatggtgtccttggccaccacctgatacacgttgacgtcttcggtctggccgatacgatgtgctcggtcggtggcctgatcctgtgcggcggcgttccaccatgggtcggcgtggatgaccacgctggcaccggtcaggttcagtccggtgttgccggccttcagggaaatcaggaaggcaggcgtatcgtccgcattgaactggtcgacgagttcgagacgcttcttcttgggcgtggagccggtgatggtgtagtagcgcaggccttgcgcgtcgaaacgttcggcgatcagatcaaggaagctggtgaactgggagaagatcagcgccttcttgccttcgttcacacaggtttccaccagttcggtgatggcggcaagcttggccgattgatccttggcatcggcgtacagcagcctcggatcgcagcagatctggcgcaacttggtcaactcggcgaggatgcgaatcttcgacgtgttgaaatcggcttcttcgctgtgttcgagctgcattctgagccgctgctcgtgagccgcatacagtttgcgctgttcgccggcaagccgcacggtcagcgtggtctctagcttgtccggcaaatcggtcaacacctgggacttcagcctgcgcttgatgaacacgcccaccaacgactgcaattggcgagatacccgagcggcctcaggattgacttgtgcggcggcccgaccttcagccgtgctgccatccgcggcccgggcattggagatgggcaactcataacgctcatggaatcgcttatacgagccgagcagccccggcatcaggaagtcgaaaatgctccatagttcggagagtcggttttcgatcggcgtgccagtcaaggcgaaacgatggtcggcggccacggccttgaccgctttggctattttcgtggtgtgattcttgatgtactgggcttcatccaatgccatgacattgaaacgttgctcattggcggtgtaatcatcgacatctcggcgcagcaggtcgtatgaggtgatgagcacggtgggttcatccgcccggaacgcacggccgatggcggtacggcgctcggctttggtaccggccaccaccacggcattgaagctcggggcgaacttggtgaattcggcaccccagttgtacaccaaggacgccgggcacacgatcagcgatgggccaaggctgccgtcgcccatctcgccggtattccgctgatatcgagacaggagcaacgcgataagctgcacggatttacccaagcccatctcatcggccagaatgccgccaaaacccttgtcgcacaacgtgttcagccattgaaagccttcgacctgataagggcgcagaatatgcttgagactatccggcacttcatacgacttagggtcgatgatcttgagatcgtcgatgtattcggtgaacgaagcgtccttgactacatcggagccgtcatccggcagctcaccatccagtaggaatgctcgaccgcccggcaactcgatcagtccggagttgagctgctgctcgctcagatcgaggtcgctggccaatcggtccaacgtgctgagattcgcgccgctgagtttgacaagcgtgccgtccttcaactgatggaatcgttgacgccgacggtacgaagatagcaaggcacccacttcgtccggcggcacttcatcagcgaggggtgatatctccaccaagttgcctttgatggacaatccgactttgacgcttggtggcttgggcgcgatcagccggtcaaaagccggtgtggtgaagacctcccccacttcctttagtgccggcaatccctcgtcaaagagacgaacgatctgcgtggtgtcatcgcgatcgatagtggccgcatcagacacgaattttttggtggcctttcgcgcggccggcgttcggaacccattcaccgtctgatgagtggcggccgcaacgcgcttgcgctggtcaggcatggtaaagaattcacgcactacatcaatcgcaagatgctcagcgtcgaaatcacgcccaatcacgccccgagacaaggggatggaacgctcgccctcagcatgcaccgtcgggccatcgggtagcaacgggacaatggcatcgccgtagcgtgccttgacctcgcattgcacaccatgctcatcacgatccagataaaactggaggctgcattccgtaggacttaattcagccagctcgcgaggaatctcactggcctccaacagtccggcaccaaccagctgaggcaatagcgtgcgtgcgaatagggcgatgtcatcgccggcaatgacctgtccctcgccatcgggttcaaacaggtctcccaatagtcctcgcaacggaatcaatcgtttcgggcaacggacgaatcggcatcctgctgcgcttttacgctgagagcccgccaccatggcggataccgcaccggccggattagtggaggcgagcaacagccatacattcttgccgccgtcaatcacggtttccaccgctggcactccggtaagcaggtatccggcatccggaccatacgtattgaaatcacgccgcgcaatgcgcatgagaaaatctggctcgacaccatcaactggcaccgatgcaggctgcccggagaaccatgtgttcagcacgagctgtacgcctctgccctcacgtacggacagcaaccgggccacttccggtgctgaaagcgtcagatgacggtcgatggcgatatgcccgtaatacctgtcctgctgctcggccgcacgacgcacggccatcgcatcatcaaggacgtccagcagggggcgcgaatcatcatcgagcatatccggcgtatgaataaaggcaagcttctgcccataatccgcatagtcgccgttcgccatggcaagcacaaattgcggaatcgatttcagcacatagctggacccattggaagccgagccgatcttgaactccacgctccacacgccgtcgatgaaactcaatatcgggacaagctgcacctgccccaagcccacagtctcgctgtcaccctgatacccgccgcctcgggtgccggcacgagagccgtatccgctttttgtacgccgagcatttgcaccgtttttcccttgcgtggcatcaaaccgacgcataaccgcattgcgacgacgaattttggcttgagcgtcttgcctatcggcgtgctccatatagtcaatcagcgtccgagacggtcgtgcggccccggcacggtagccttcaaaacgctgcggatcatcgcagaatatgaaggcgagcgcaatcatgtgcttgcacatgccatagccacggccgtaagccgggcatgagcacttgccaccgacggcttctcccgtatcgaggtcgaattgcacgctggtacgatacctactcgatgggctggtggtgccacgtagaataccgtcaagctcggcatacccggttcgatgattttcgctgtataccggattgataaccatggtggccgctttgcgcgcaatgctacgggcacgagcgagcacggcattcgacgatgacgattccacatcgttgcgtaacgcaaggatagggacggcatgggcttcggcacgcttcgcagacccggcgaaatggccttcgtcctcatcgtcgaaccatacggaacgtccttgcctgaaacgatagggcatcaccgcatcggcggcggacaaactgtccgttccaccaaacgttacgtctctgctgccggccgcgcctgagctaccaagtattccacccgtctcaccagaaatgccgcctactccgccgcttttaccggcatagatgcccctgcccccattagtgtcatcagtgtcatctatgtcataccgaccgtcgtcgtaatcggcatcttcgtcgtctcctcttttccaaggattgcgacgacgcaacgcatggccccaggaaacgccggaatcatcatcctcataaggcaggaggccatcgtcatccgcattatcgggaacatggccaaacacaccataccctttgctcatgggcgagcctcctttccagcgaatgtatttcaacccaacgtttccatcctagacgaagcgcgcggtagccttaatgtatggatgcagacaagccggcgcaacgcaaatcctatgcagggaacaccaccctcgaaatcttcgaggtgctgtggcgtcacagttactttgggcatggcctgaccgtgcggcaaatactcgatgagcttgcccgtaaacaccagctggaagatccaagcgagctgccgaccgagaagaccatacgaaaccagctcaaaaagctgacctccacggaatttctcggcagacatatcgggcatctcaccgaaagcgaccttgccggcatcgaatgcaagaatccacaacccggctggtatcttgatgcattcctgtccactgccgaaatgcgactgctactagacagtcttaccctatctcgcatcagcctcgacaccatggacgacctcatcggtaaaatccgcgagctcgcaggcgccgccgggcaggcagtaggctacctggaccatgtggccacctacacgcatatcaacggtgagttcctatccactatcgaccagctgaatcaagccatcgaagaaggccacggcgtaaccttccaataccgtgattacggaccggatggcaccttgataccgcataaaagccgtacgggtgcaggccgaattacctacaccgccgacccttaccagatggtgtacaagaacggacgctattacctcatctgccacctgcatggcgaagacaacctccgcattttcgtggtcaaccgaatcgccaacgtcagcgccaaaggcaggaacggcacagtgccactggaaaaaccagcaccagctgattttgacgcagtgaacttcatgcgccaccgtccataccccgtagccgatgccccgattcgcatccgcatggccgtacgagacgaatccatgctcaacaacgtgttcgaatggttcgacgaccctcaaatcaaacattcaccggacggcacacagttcgaagtcatcgtcgatgctcccgaacgcgctgtgttctggtgggcattgcagtattcctgggatggccgcgtagtgattcttgagcccgattcgctcaagcgcaaactctatgatgccgggcgtcgcatggccacagcctatgctcccgaatgatgcaacatcacatcgcacacctccttgtcgagttgttcaccagcgaatttcaccggagaacctatcatcccatcgccaatcacactcggtaattttttaccgggaaatacgatttcaagccatttcgcgggcatcgtccctcacctaggcgcacataaggctaaggtgggaatcattaatcgcatcgcgcgtccacaagcgtgcactagcgcgtacaacaataaggagcaactatgagcgaagagcgtaccgcatggggctggggtctggccagcgtagacgccgccggcaccaccctggacgtctggtaccccgaactgaatctcggtgaggcaccggccgagtccgatcgcccgaaccacaatttcggtactttggctcacgatgaggccgacgcccgtggcattcgccgcgtgccggtattcgtcgtcagccagttggacgagccgatcagtaatgccgcggacgcttacctgaagctccatttgatgagcatgcgcatggccaagccgaacacgctgaacctcgacggcatcttcgcccagctcgccaatgtggtgtggaccaactacggccccttcgccgttgaagacttcacgctgcgcaaggccgacgtcgaacgcgcctccaccgaagccgctctcgctttcgcctcccaggccggactgcctgccgcagctcctgccgccactgtcaacgtgttcggtgtggataagttcccgcgcatgatcgattacatagtgcccaccggcgtgcgcctcggcgacgccgaccgcgtgcgcctcggcgcttacttgtcttccggcaccaccgtgatgcacgccggattcgtgaacttcaatgctggcacgctcggcgtctccatggtcgaaggccgtgtttcgcaaggcgtggtcgtgggtgacggttccgacatcggcggcggtgcctccatcatgggcaccttgtccggtggcggcaagctgcgcaattccatcggcgagcactcgctgctcggcgccaacgccggtatcggcatctctctgggcgataactgcaccgtcgaagccggtctgtacatcaccgccggcactaagatcaccatctgggacaaggccaaggccgccgctggcgaaccgctggaagtggtcaagggtgctgagctctccggcaaagacaacattctgtttatccgcaactcggtgaacggccgcatcgaagcccgctaccgcaaggtgggaattgagctcaacgccaagctgcacaagaactgaaattgaaataatggagcgttatcttcgttgcccctcggtcgacgtaccttcgtacgccttccctcggtgcgcctcgataccgcacacattatttcaatttcagaactagccctgctagttcttatgcagccgtcgcagcatagctggtttgcgctgtacatatagaaagcgcctcactggaatctccagcgaagcgctttctcaaaccaacaatcaccgctcgtccatcggcacgaaatcgcgctcgaccggaccggtgtagacctggcgtgggcggccgatcttggtattcgggtcggccaacatctcacggtactgcgcaatccaaccgggaatgcggcccagcgcgaacagcgtggtgaacatggccggatcgaagccgatcgcccgataaatcaagcccgtgtagaagtcgacgttcggatacaggttgcgcgatacgaaatattcgtcattcagcgcaatatcttcaagctcggtggccacggcgaacagcgcgcgctcgtcagacggcagcttctgcgtatcttcgcgctccatgatcttttccagatacttcctggcaatcgccgcgcgcggatcatacgacttgtatacacggtggccaaggccggaaatcttctggccattctccttggcatcacgcacgaactcggccacagacttgccggaatcacgaatcgccttcaattggcgcagtacggcctcattcgcaccaccatgcaacggaccagacagcgcattgacgccagcggccaccgccgaatacaggttggcgtgggcggaaccggcgatacgcaccaccgaggtcgagcagttctgctcatggtcggcatgaataatcaacaaacgacccaaagcatgcacatacagcgggtcggattcaaacggctcgtacggcacagcgaagcacatgcgcaggaagtcgtccacatagccgcgcgcgtaatcggggtacagcatcggctcatcgcgacgacggcggaagatgtacgacacaatcgtacgggccttggccatgatgatcttggcggcctcatcaagctggtcgttgtcagaaatatcggtggtgtccgggtagaacgtggccagcgcattgatggcggaggcaagcacgctcatcgggtgagcggagcgcgggaacgaacccatgaaggtacggaagtcttcgccaaccatcgtcttgtgattgatgtccgcacagaactgctcatactcagccctgctcggcagctcgccgtggcgcagcagccacgccacctccagaaaatcggagttctcgcacagttgctcgatggggtaaccgcagtagcgcaaaatcgaatgcttgccgtcgatgtaggtgattttcgattcgcactgcgcggtggtgaggaatccgggatcaagcgttacccagccatcgttgcgcagtttggaaacgacgatgccatccggccctgcactagccttaaccacgggcaggttgaacttgttcgaatcgacatcaagttgtgccgttgccattcgcgcaccttcctcttcatgaaccacttaccccaaacattaacgttcacgcgttcgcgaacactagtgttcggtactctatgtcttctgtgttaccgctggcgaatgccggtcgatacacgaaagccgaagtgcgctcatgctatcaaagcaaacgcacttcggcttgttacgtctcgaattcgcgggaaaaccgcgaacagacggacggctaatgagacgctgatcgcccatcacaggccaatcaggcacctaccatacgccaaacgccgatcagaggttggtgcgatcggtgaagacgatcgggccgttctcggtgatggcgatggtgtgctcggagtgggcgccgcgcgagccgtcggaggcacgcagggtccagccgtccttcggatcttggaagatctcgtcggtggtcttgaggaaccacggttcgatggcgatgaccaggccttcgcgcagcttgtagccgtggtgggcgcggccgtcgttcggcacgtgcgggtcgccgtgcatgatgtggcccacgccgtgaccgccgaactcgaggttgatcgggtagccgtattcgcgcgcgacgtcgccgatggtgttggagatgtcgccgagacggttgccgggcttggccacgtcgatggcggcggcgagcgcttcctcagtgcacttgatgatgcgcaggtcttcggggtccgggtctttgccgaccacgaagctgacggcggaatcggccacccagccatccacagagatggcgagatcgagggagacgaggtcgccgtccttcaggctgtagtcgtacggcacgccgtgcagcacggcgtcgttgacggaggtgcagatgtagtgggcgaacgggccggtgccgaagtcaggagcgtagtcaacatagcaggattcggcgcccttgcggtccacgatcttcttgtggacgaactcgtcgatttcgagcaggttggtaccaactttggtggtctcctgcagttccttcagaatgccgccgacaaaacgaccagccggcttcatttcctcgatttcacgaggggttttcagttcgatcatgagattctttctaccttgttgagacttgttctcaactctagaccagcccgaggtcaaccgccagaagcctacctgaaatccactcgcagcccattaatagccaaggccgagaaaaagcgcccggcagcacatagcctgcacgggcgctttggattgattgtctggggactggttgcatgaagcgtgagattacttgcgacgcttgccgaaagtgaacgcgcgaatcactgaagtaatccccatcaccaccatggcgcatccgccgaagataatcatgaatacggcggagctcagcgggctcatcagcaccacgaagccggcgataatcgagatgatggcataggcgatggcccagccggaatgcgggatacgccacgattcaaccagcgacagcacgccttccataatccatccgaaaccgaccatcaaagtaatgagtaatgccagcgtctgaccggtcatgccgtagttgcgcacaaccaccacgccgccaaaggtcagcagaatgccgacgaacacgtccagcacacgccagccgcccggcagacccggctccacgagagcgctgacgatgcgcaccacgccggaaatcacgaaatacacgccgagcaacaatgcggccaaagccagcgtcttgttcggcaccagcaacagcgcagcgcccaaggcgatggcggccacgcccaccacgccgtaaatgatgcgaatcttggtcttggctttttccggcagccattcctcgatcaggcggaatggactgaaattgccgacataccagttggtctgctgccagccgggttgactttgatcgccccatggaccattcggctgcccgtccgcttggctattcgattggccgtccgcctgataccgccgaccgtccggcccccatgccggctggccgttcgggccatagttcggattgtaggcgtacgggccgtagtacgggttctggttcggttcgccttgtggctggccgttctgcgcatgctgattctgagtgtcttgcgctcccggcgcaccttgcggaggatattggccgccatgattgctgtcatacgcaccatactgcggttggcccggttgacccgccggattcggctggttcggctggctctggttgggctggcccgtctggccattccactggtcctcgttcggattgctcatcgtaactccttagctcaaggtccatgttcagattccacatactatgatagacaagttgtctaatttgaaccatcaccacaattaggcaatctgtctagttcactgacagcgcaatgcccataacgcaatatctgcaccatcaacgcttctcccccgccgcgattaggcttagggccatgaccaacgaaaccgaaacgctgacgtcgggcatcgacccggcatcgttctcctccgtcatcaagccgaccaacgacctgttccgctacgtgaatggcccatggatcgacacctaccgattgcccgacgatcgttcgcgctacggctccttcgacaagcttgccgaagacgccgaaaaccaagtacgcgacatcctcgacgccgacgactgcccggctgtcaagtctgaggccctgtaccgctcattcctcaacaccgacgccatagaggccgccgggcttgacccaatccgcgacgagcttgacctcatcgattccgccatcgacaaggccgcactcacgcgcgtgctcggcacgatcaacccagccggcggccccgatctgttcggcttggccgtttacggcgacccgggcgacccggaccgcaacatcgcccaccttgagcaggccggcctttgtctgccggatgaagcctactatcgcgaggatcactacgctcccgtgcgcgaagcatacgtggcgatggtcgccacccagctggtgaacgccggatacgcgcccgccgccgagtccaacggtggcgatgagctgccgtccaacaccggcgatgacgagagcaacgctcccgccacggttcccagcgaagccgcgctcggcatggcccgacacttccttgccgtggaaaccaagatcgccgccaaccattgggacaatgtggccacgcgcgactcggtgaagatctacaaccccaccgattacgccgatctggccgccacgctgaaaaacttcgatctcggttcttggatcgacgcttggcagaccgcttatgacgccaccgaagccgccaaggctcagccgattgatttcaagtctgtgttcgcgcgcgtcattgtgcacgagccgagcttcctcactggtcttgatgcgttctgggccgaggccgatctggccgaccttaagctgtgggcccgtgttcacatgattctgggcttcgcctcctccctgtctcgcgacttcgacaccaccaactttgacttctacggcaaggtgctctccggcgccaagaagcagcgcgatcgttggaagcgcgcggtgagcctggtcaacggcatttgtggtgaagatgtgggccgcgaatacgtgcgcctgcacttccccgaaagctcgaagcgccgcatggaagagctggtcgccaatctgattgacgcctaccgcgtgtccatcaccaattccgattggctgggcgaggacaccaaggccaaggctctggagaagatctccaagttcacgctgaagatcggctacaccaaccactggcgcgattattcggcgctgagtgtttccgcggatgcgctgcccgccgagaacgccaaggccgcgaacctgtacgagaccggctatcagctggccaaggtcggcaagtcggtcgacaaggacgaatggctgatgaatccgcagacggtgaacgcctactacgagccgagcatgaacgtcatcgtgttcccggccgcgattctgcagcccccgttcttcgacccgaaggccgaggatgcggcgaattatggcggcatcggcgcagtgatcggccacgagatcggccatggcttcgacgatcagggttcgcagtacgacggcgacggcaagctcaacaactggtggaccgacgaggatcgcaagaacttcgaggcccgtaccggcgcattgatcgcccagtacaacagctttgtgccgctgcagctggccgagaagtacgctgacgagcctgataaggcaccgcacgtgaacggcgcgctgaccatcggcgagaatatcggcgatttgggcggcgtgaacatcgcgctcaaggcgtatgcattcgcgctcggcaaggcggcaggtaagtccgacgccgaagaagacggctcccccgccgccatcaaggcactgctcgataccgcccccgaaatggacggattcaccggcctgcagcgcttcttcctgagctacgcctccatctggcgcaccaagaaccgcgacgagctggccgaacagtacctgcagatcgacccgcattctccggccgaattccgcaccaacggcatcgccagcaacgtggacctcttctacgatgcctttggcgtgaccgaaggcgacgccatgtggctcgcgcccaaggaccgtgtgcgtatttggtaatccccgttatgtaaaggaaaaccgctgtgtttgcctcgattacaggcgaacacagcggtttttcatgatgtatggttggcactcagaattcggaatcactgggattggaagattcggcgaaaccgtcgacgtaggtttgttgggccacgggctgtggttgattggtgtcggcgtccggttgcgacatgacggcatcggccacggccgcggactcggttgatggcgacggcgattggccggaatcggaggtgaccccaaattcgacggggccagattccgacgaggtcgcatacgggtcaatacccacaccggatgcggcaccgcccgcgccatattgcgttggcctaacgtacggcgacgatgctcgttgcccgtttccgccatccataccttcggcggcaccgttggcattgccgttaccgccggcaccattgcctccgttaccattaccggcacgctgtggcttgatcagcgacgtggtgccgaaggtcaggtcatgcccaatgttggtggcttcgagaacggttctactgcgcggttcgccttgctcattggtccactgctcggtaatgagtgagccgaccacaatgatgcggtcaccgcggcgaaccgaactggcggcgttcacggccaaagcacggaacgctttgacgcccacccatgcggttccgtaatcctcccattgtctggtagtcgggttgagtcgactgcgagtgctgcccatacggaatgtcagcacgcggaagctctcggttccgcctagtgtcggatcaccggccacaaagccggtgacggtcactgctgcttgttgatttgccatgatcggtcctttcctcggcctgctggcctgttgtttggatgtggaccgccggagcctgtctccggcttcattgccggcttgcacgccccagcggtacctccactgtgaggcatgacgtttgaagtgcacaagggcaactggcaaatgtggatactgtgacgcagttgaatttttaagaatgtggataagtttcggttatccacagcaaagcgccattctgcgactgggcagaatggcgcttgatgcgattaacgccgaggctgagtaagtgggcctcaactgagggcggcgaagcgctcggcaagcgcgtcggcggcttcggcggcgggcacggcgaccttgttttcgccgttgcggtcgcgcagttcgatggtgccgtcgttgacgtaatcgcggccgaccacggcgaccagcggcacgccgatcagctcggcatccttgaacttgacgcccggagacaccttcttgcggtcatcgtaaataacctcaaggcccttggcctcaagctcggcgaccagcttctcggcaccttcaaacgccacggcgtccttgccggtggccaccacgtgcacggcagccggggcaatcacggacggccaagccaagccggcttcgtcgtggtgtgtttcggcgatgcaggccagcacgcgggaaacaccgatgccatagcagcccatccacaccggcacggccttgccgttctggtcgagcaccttcaggtccagtgccttggagtacttgagacccagctggaacacctgaccgatttccacaccacgctcgaagctcaacggaccggaaccgtccgggctcatgtcgccgtggcgaacctcaacggcttccaccacgccgtcggccttgaagtcacggccgtacaccaggttgtagtagtcgacctcgttctcatcggcaccagtgaaccaagcggaacccttgaccacgtgcgcgtcgatcaggtagcgaaccgggttcttcacgccagcagcctcggcctgcgggccaagcaccatcggtccgatgtaaccgggcaccagttcggggtgctgcttcaggtcttcctcagtggcttcctcaagttcggcgggcgcgaactgggcttccagtcgcttcatatccaccgtacggtcgccgggcacgccgacgacaatcacttcacgccacggctcgtcatgctcttcatcctcagggtgcttgacggtgatcaccacgttcttgaggatgtcggaagcctgccattcacggccatcagtacgcgggtggtcggcgttggcacgctcgatcatgttatcgatggtcttggcatccggggtggcttccttggaagcggcgggagtggtggaagcatcgatttccggtagttccggagtgctcagggcctccacattccatgccttgccggaaggtgccagcgcgaaggtatcttcgccgatcggcatcggagccaggaactcctcggatgcggagccgcccatcgggccggacatggcgaacacaggtacgtacttcaggtcaagacgctggaagatacgctcgtaagcgccgcgctcgtcatagtaggccttgcgcatgccttcttcatcgatggtgaaggagtaggcgtccttcatgacgaattcacgaccacggatcaggccggcgcgcggacggaactcgtcgcggtacttggtctggatctggtacagggtgacgggcaggtccttgtaagaggagtacatgtccttgaccagaagggtgaacatctcctcgtgggtgggggccagcaggtaatcggcctcgtggcgatccttcaaacggaagatgttatcgccgtactcctcccagcgatgggtggcctcgtagggttcgcgcggcagcagggccgggaagtgcacttcctgggcgccgatgccgttgatctcctcgcggatgatggcctcgatcttgttcagcacgcgcagaccgagcggcagccaggtccagataccgggtgcggccttgcggatatagccggcgcgctgcagcagcttggctgaatcgacatcggcatcagcggggtcctcgcgcagggtgcgcaggaacatggttgacatacgaagggtattggaagtcatgtgttccacgatattcgcgtgaaccgacaagcccgcctgctattcgcactattccgaccttcatcttggcattcggactcactcgtgcaacaatgacggctagaagggtagaagggcacgatgacgcaaccgaccgagcaacaggggaatcagccggaatcctcggagcagccggtgtatcaaccggccccagcatgggccccgcaattttctgctgcagcccccgcaattcccaacggcagttccacaacaagcggtatcgcaacagccaatggccatgccaccgtttgcgcaatcgcctatgtcggtcccggaacaagcggcctgcccgtatcaaccgtaacagccgggccgggcctatgcttctccctgcccctacccgaatccggcaatggcccagccgaaccaaccatcagtcgcgcaagagcgattcgggcgttcgtcgggacggctgaccgcatcacaggttattgagacatgcgccaccattcttgccggcgtaatactcctcggtcttgcatggaccaacccgcaaccgtatgccccggtggatcttatcgccggcctgtccggagcggccgcgctgattgtgggtgtgcgtttgccgcaagtacgcccgatgctgcgtagctggccggcattgtggcttgctttgggcggcatcattctgattgtggcagccgcgcgctatgaggcgagcctcaaatcgatgaggacgattgccacgcgtattggcgatctgcggtgaatcgcgcgggcgacctgaggcagattaccaacgtccggcgatagcagtcctgcatacggggcagtgcccattgccaccgtatccggcagataaacgattggcaatgattcgataccaatcgcgttccacgagcttggcccggcattcagggtttgggcaatacgtggtatcgccttcacgatcatgcacgttgcctgtgtacacataattgagtccctcttcgagggcgatgtctcgggcgcgggtcagagtctcgtgcggggtgggcggtacgtccatcatgcggtaactggggtggaatgcggagaagtgcagcggcacgtccggacccaagtgctcgcgtatccatgtacattcagcatgcagctgggcgtcgtcatcgttgaatccagggatgagtagcgtggtgagctccacccacacgtgttcgccttctggtgtgcgtgcctcgttgaccgcatagtcgatggtctcgagcacatcggccagatgagtgccggtcactttccaatagaactcttcggtgaagcctttgaggtcgatgttggcggcgtccatggccgcgtagaagtcgggccgggcttcggcgctcatgtatccggcagtcacggcgatgggatggatgccgagcgctcggcaggcttcggccgtgtcgatggcatattcggcgaacacgatcggatcgttataggtgaacgccaccgaatcgatgccccggtcggccacgacctgcgcgattttctccggactggcttccatgccgagccggtcgaagctgcgggctttggcaatatcccagttttggcagaatcggcaaccggaattgcagccagccgtgccgaaactcagcacactggaaccggggtggaagtggttgagcggcttcttttccactgggtccacggcgaagccggagctgcggccgtaggtgtcggagacgatgagtccgtcgtggtttgagcggacgaagcaaaagccgcgttggccgggcttgaggacgcagcggcgcgggcatagttcgcagcgagcgcggttggtaccgtcgtggaattgcgtttgccagcgggctatggcggggttacgaacatctgtgactgacgccgtatgaccgcacgattcccgatgaccaccctccggcgcttcgcgccacctcttgccagcgggaggagatatggttgctgcgttaatgctcggcataggcggtcacctcgtagcgttgacagtcgatttcgctatcggtccagtcgtaggaagggcggataccggctttggcgagcaggtgagcgacgaaatcgtgcggatcgggcagctcatcccacacttgtggcaggaatgtggcgctgcggccacgacggtcggcgagaatcagaccgtctttgccggggcgtaatacttcctcaagttcagtgcgcgaacgtaccgggcgttcgacgttgctgccgtcccgtttgacggcgtcggtctgaggtccggattgcagcgatgccagagtcgcggtcttcgagccggtaccgcgcgaatcggcgtcacaggagttcactgtaatcggctcgggctcacccaagacggatacctccacgttgagcagcgggtattccgcggcggtgaccggggtgaaacgtgggtcgcgggtggcggcatccactgcgtgctcggccacgtccttgccgagcgagcggtgggcgaccagcgaaccaatgcacccgcgtagccggccaccctcggtcagggtgacgaaacaggcaccgggctcgttcagccatgggtttgcggcaagaatggacgcggtcgaatcagcggcggtcggatgctcgatatgcagccgttcccggatagcggcacgggcaagtttcagcagcacctcaccgtgggatggcgtacccgatgtgcctaagtcatctgcaccggctagagcatctgcttccggcttggattcccacgcggcaaacgagacatatcccactaccggctcgtcggcgtctcgcattgcggggcgaggttggccggcgagcgccaccacgccgtcgtcgccggaagtggaacagccgagctcgaagagcctcatgtccttgcggccttttaacacatccagaaggccgttgatcgggtatgcgccacaggcccggcgagggtgaatcggcagatgcaaagccgcaatgtccgcaatggtctggtcatccaacgcgcgggcgacttcgtgcggatgatagtgcgagagatccgaactaatcacgatgacggtttccgggccaccccacaaagcacgcaacacatcacccacctcttgtggcgtggcatcgcccgcgttcaacggcacgatagtgaggtctgggccgagcacggtctgcaggaacggaatctgcacttctaccgcatgttcttgtgcgtgggttggggcattgacgatcattgcgggagccggcgcgcccggacgggcatgtgtaccggagcgcaatggctcattgacagacaggcccagagccttacgctcggctgcaatgtctaccggcacagtgcccagcggcgtttcaaacgccgctgccgtggaacaggcgacgcctcgcacggccacgcggtgagtcggccctacgattaccgcgcgagtcacgctcccccgcccacgctccaagagcgcgtaagcgagcgcagctgccgtgccggaatatatgtatccggcgtgcggcactattaccgccctcggcacccccgctggaagtgtgggctccaactgttgcagaagctttcggccgtaatcgagctgctggttgattagctgtttgagcgcggtgcggtcagccggataaaacgaaccggccaccgctgacggacgtattgcgccagtgattttgccgctgccgtctgccgcgct

SEQ ID NO: 910 - DNA, 15682 bp, Unknown
  gut microbiota DNA sequence
agattcgcaatccctttttcggggggatactgcatacaaccatacccccttcctaggaaaaagttgacgagaaactagaaaatgttcatttgcgaggtcagttagcgtacgttttctaggcaaaagaaaagccccgcagctatgcagggcttttccaacgaggccataagagaggaagagaataacctcgtttaatggttgacgaagctattagacctcgccaagtatctactagttcagacgcagctcagtcgacggagcgaacaggtgcatcttggccgggtcaatcttgatcttgacggtcgcgccaaccttcggcagcgcacgcggattcacacgaatcgtggtgagcttgttctggtcggacatgacctgggcagcctcagctgcggagccatcggtgacgatgttgccgtagatgtagccatcggagcccagatcctcgacgttcacaaccttcagggagaaggcgttcgggtcgtcagccggggccagaccagcgtcctcaggacggaagccgaccacgatctggccgttgtcttcggcggtgagcttggcgacggcctcagccggcaggtccacggtgtcctcaccgatcttcgccttgccgttgaccaccgggtgggtgttcaggttcatcgacggggagccgatgaagccggcgacgaagacgttggccggacgatcgtacagctcagtcggagcgccgacctgctgcaggataccgagcttgatgacggcgatgcgatcgcccatcgtcagagcctcggtctgatcgtgggtcacgtacagggtggtgacacccagctggcgctgcagggcagcaatctgggtacgggtctggacacggagcttggcgtccaagttggacagcggctcatccatgaggaagaccttcggctcacggacgattgcacggcccatggccacacgctgacgctgaccaccggacagagccttcggcttgcggtcgaggtactcggtcaggtcgaggatctcagcggccttctcgacgcgcttgcggatctcgtccttcggagtgccggcgatcttcagggcgaagcccatgttgtcggcaacggtcatgtgcgggtacagagcgtagttctggaacaccattgcgatgtcgcggtccttcggctgcatcgtggtgacatccttgccaccgatgaggatgcggcccttgttgacctcttccaggccggcgagcatacgaagggtcgtagacttaccacagccagaagggccgacgaggacgaggaactcgccatccttgatatcaagattcagatcatccacggagggcttatcgttgcccgggtagatacgagtgacgtggtcgaaaacgacttctgccataattactaatcctttcagaggcaggtacgtgcctcacgatccgttgtaaagggatttgttctttactgtgcttccgccctcgccaccgacgtacaactttgctttcggaaactgcaagcttcagcgtttactttttccggttcagtgaaggttctcttcgttgagccgagaactactatacacggaccgtggaccaaggcaagtggcgtgtctgaaatgtagttaactttatgggcgtttctgggggtgttgtgtggttcggcccatgacacgcctgtttctcgaacgtgcgaaccggcacgcccgacgtagagcaggtctgctcttcccggactgatggattccatcagtcgccgactaatgcgacacagactcgaaggtgacgccgttgcgggcggctttgcgctcggccttgcgctcctcggcgtcttcgatgcgctggatgcgcagctggcgccagtcctcgcgcatgtcgcggaaacggtcggccagcgttacgtcatcgttctcggcatcgccatcagtactgctgccatcggccttaccgaacgtgccatcggccaccttggcgatgcccagcttgagcagtccgagcaactcacgcaacgtttccggtacgggctcatcgccctcatcggcggacttggtcaggccctcgatgcggcgacgaagcgcgtcggcgtcctcgggatcgatcttgagcccggcgatcagcgactggcgcatggtctcgtaatcgaggttggcaaaaaaattcagctgttgcagcgtcatgaagcccttgagctcggggaatcggtggacgatgtattcctcgcggtcgtcggcggcgcgggtccagtcgcgggtgagctgcggatcccagctggcggtaatcgacccctcgcgcatgcggtagtggtacagcgccttgggcagacggaccacgcgcgtggcctcgccgatcacgttgcagatacgggagagatcctcgattttgcgacccaccgggaaggagaatccggtgccctgataggtggaggcgggtgccaggaaggcccagaaatagccgtcaatctcagccttgacttgctttttgatgacctcgaccggggtcaggacctgcacctcggtgaagtcgttgtggcgatagttggacagcagcggcttgttgttctcggagatggtgtcgaactggaacatcacgaggtcggcgtcatactcgcgcatggcgttcaggcagtcctccaccaacgtgggtgccacggtgtcgtcggaatcggcgaagtatatgtacgcgccgatagcctcagcgataccggagttgcgggcgtcggacaggccgccgttgggcttgtgaatcacgcgtatgcgcgggtcgcgggcggcccaggcgtcgcacatggccgggcaattgtcgggcgagccgtcgtcgaccagcagaatctccagattggcgtacgtctgcgcggcaacagacgccacgcattcgtcgaggaacttctcgaccttatataccggaataatgatgctgaccaacggatcctgttccatatctccagcgtagcgccgccgtgcgaacgcggcggcgctgcgggttcgcggaccgcgaaacccttagaagtcccagtcgtcgtcatcggtttcttcggctttgcccatcacgtaggaggagccggagccggagaagaagtcgtggttttcgtcggcgttcgggctcagggcggccaggatcgcggggttcacatcgcaaatctcagccgggaacaaagccgggtagccgaggttcatcagcgccttgttaccgttgtaccgcaggaacttctcgacgtcatcggtcaggcccacgcagtcgtacagcgactgggtgtactccacttcgttgtcgtacagctcgttgagcaggtcgtacgtgtagtcctgcagatccagacgctcggcatcgctcagctgggcgatgcccttctggtacttgtagccgatgtagtagccgtggacggcctcatcgcggatgatcagacgaatcacgtcggcggtgttcgtcagcttggcgtgcgcggagaagtacatcggcagatagaagccggagtagaagaggaaggactcgagcagggtggaggccaccttgcgcttgtacgggttgtcgccctcgtaatagtcgagcacgatctccgccttcttctgcaggaactcattgttctcgctccagtcgaatgcggcatcgatctgctcggtggagcacagggtggagaagatggacgagtagcttttggcgtgcacggattccatgaaggcgatgttggtgtacacggcctcctcgtgcggggtgagcgcgtccggaatcagggagacggcgccgaccgtgccctggatggtgtcaagcagggtcaggccggtgaagacgcgcatggtgagcgtatgctcgtcctcggtcatcttctgccagctggggatgtcgttggagacggggactttttcgggcagccagaagttgccggtcaggcggtcccagacctcaaggtctttctcgtcttcgaggcggttccagttgattgcggagacgcggtcgatgagtttcagcggtttgcgcggaatggagataggtgccatgagtagtgttccttttactcgttgtcgttatcgtcgttggatttgttttcgaactcctccggcgcggtcagccggagcagtgctctatagatggttcgtgacattgtgggttccttagagtggcctctggttgttcgatgtgtgcggagaccgccgtctgagaccgaaggcgtacgaaggtacgtcgagtgccgaagaaaggcggtatacgctccctcgaacgatcagagcatgcaggagacgcagccttggacttcagtgccttccagggcttgctggcggatgcggatgtagtagagggttttgatgcccttgcgccaggcgtagatctgggccttattgaggtcgcgggtggtggcggtgtccgggaagaacagcgtcagcgacagtccctgatccacgtgctgggtggcctcggcgtacgtgtcgacgatggccttccagccgatctcgtaggcgtccttgtagtacccgaggttgtcgttggtcatgtaggcggccgggtagtacacgcgcccgatcttgccttccttgcgaatctcgatcttggaggcgatcgggtgaatcgagctcgtggaatggttgatgtacgagatcgagccggtgggcggcacggcctgcaggttctggttgtagatgccgtccttcagaatcgcgtcgcgcagggcctcccagtcggccgcagtcgggatcgcgatgccgtactgttcgaacagcgcacggacccgttcggtgcgcggagtgagcgaacgacgaccatcggtgtacttgtcgaagtagttgccctggccggccggcttggcgtagtcgctcgtagcgaagctggcgaacgtgcggccatgctccacggcgagcgcgtgcgaggcacggtaggcgtggtaggccacggtcatgaagtacatgtcggtgaagtcgaggccctcttcagaaccgtactggatgccttcgcgggccaggaagccgtgcaggttcatctggccgagaccgatggcgtggccctcctcattggcgcggcgaatcgaaggcaccgcgttgatgctggtgtgctcggccaccgaggtgagtgcgcggatcgccgtctccaccgtgtggcccaagccgccatccatcgtcttagcgatgttgagcgaacccagattgcaggagatgtcgcggccgacatgcgcatacgtgaggtcctcgttgtatgcgctcggctcctgaacctgcaggatttccgagcacaggttggacatggtcacgcgaccttcgatcgggttcgcgcggttgaccgtgtcctcgaacacgatgtacgggtagccggattcgaactgcagttcggcgatggtggtgaagaacttacgggcgtcgatgtaggtcttcttgatgcggtcgtcggccaccatctcgtcataatgctcggtaacggagatgtcggcgaacggcttgccgtacacgcgctccacgtcgtacgggctgaacagggccatctgggccttctgtttggccagttcgaacgtgatgtccggaatcaccacgccaagagccagcgacttgatgcggatcttctcgtccgcgttctctcgcttggtatccaggaagcgcaggatatcagggtggtgggcgttgaggtacaccgcgcccgcgccctgacgtgcgccgagctggttggcataggagaaggagtcctccagcagcttcatgaccggaatcacgccgctggactggttctcgatgtgcttgatcggggcgccgagctcgcgcaggttgctcagcagcagggccacgccaccgccgcgcttggagagctggagggccgcgttgatgccgcgcgaaatcgactccatgttgtcttcgatgcgcaccaggaagcagctgaccggttcgccacgctgggccttgccgaggttcaggaaggtcggggtggcgggctggaagcggccggcaagcatttcgtcggcgtattcgatggcctgctgctcattgccggcggcgagctccagggccacagcggcgcaacgctgcgggaagtcctcaagatagaggcgaccatcgaacgtcttgagcgcgtaggacgtgtagaacttgaacgcaccaaggaaagtgccgaactcaaagccggcggattccacgtgctcgtagatgcggtcgaggaattcagcggagtactggttgaagaccgcagggttgtagtactggttgctgatcaggtattcgagacgctcggcggtggaggcgaaccgcttgctgttggtggccacgtgccctgtcacgtattcgcgttcggcggccttgtctttgtcgaactggatcttgccgtcggcgtcatagaggttgagcatcgcgttgagcgcgtggtaatcgtgcgccgggtcgtactgttccgctgcggtgtcggcagtattgtcgagcggcaggccggtggcggtgaggtcagtcattggaaatccttggaatatggcagaagtgtgtttactcagacagttgctcccctcagtcaacttcgttgacagctcccctcggagaggggagccaatacctcgagggggtcaagatttactgttcggtgaagaagcggacgaggccgtttcgcacggcggcagtgtcttccggggtgcccatgagttcgtaacggtagaggtagggcaccttgcatttggcggcgatgatgtctccggcggcacagtaggcctcaccgaaattggtgttgcctgaggcgatgacgccgcgaatccactcgcggttggctggatcgttgaggaagcgtttgacctgaatcggcactgctttcttgaccacgccgccgccataggtgggcaccatgatgacgtacggttcgcggacgtttagcgccgggtcggcggcccgcaacgggatgcggtagacgttgatgccttcgtcctgcaaacggcatccggccacgaaccgtgcggtgttttcggaggccgacgagaagtagaccaatgcgccgatcgtcttgccttcggccgcgaattcgggctggctcagactcacgcggacaccgtggcggcggcgcggttgtcggcggccacctgctgggcgacttcgcgaatcaggtcggggcggtagccggtccaggagttgtccggcgtgatgaccaccggagcctgctggaaaccggcggcctgcagctgctcaagggtggaggggttctgcgtcaggtccacggtttcaaacggcacacccagcttggtgagctggcgcttggtggcatcgcactgcgggcaatgcggcttggtgaacacggtgacggtcatggcgactccccttgatgtggttctgatgaacagtgaagcgaaggccatattacagcggtgtgatttgaaatcaaggcactatatgtagtggcgcgtgtcacataacaaacctagatatagggtttttcgttgatattccgccattcccatgcacccccgaaaatcggcgtgcagcgacccgcccaatcacatgtggcattgttcacatttgcgtttgaaccgctcttcgactgatcctcaaccgccctgcaaccgccatcttgagtttcgaggggctgttttgaccctttccggagatctatctccgtttcgaggggctggtactcaagtaagcgcatccccaaaatggcggaatgacggtggggcgaagccgtttatacccgtgttctagcgggccaccagcccctcgaaacgggagtaaacctctacggaaggccaaatcagcccctcgaagcggagaacggatacctcggcaccccgtgtggagccagaaggcccggccggatgtccaaacgagcatccggccgggccttaaaagtagttgttcagttatcagaatcgatgcggcgcgatactactccgcgtctttacggctccaacagatcttcgatgcggcagccaagcgtgcgggccaaagcgagcacggtggagacggcagctttgccaaggtctttgcggcgctgctcgtacatttggatggagcgcagggtaacgccggagcggcgggccagcccggattggctgagtccggcgcgcacgcggatcgtgtgcagccgggagtcgccctcggtgcgattatgggcggcccgctcgtcgtacacgtcgacgaatcggctttcgtcggcttcgtgcagagtcgggtgcagtcgcacgatatcgtcgagcgacagcacatcgagaatgtccgagaaccgcactcccctggcccattggcagtatgcgagtacccatccggcccagtattcgggtgttgagccggcgcgcagtgcggctggcggcatatcgagaatgcgcgcccaaccggtttgccgcatgatttcggccaccagctcctcgccggacatgccacacacgtatttgggcgtgcctcgcccgaaaagcgcggccgcctcggaggtggcgaagaagtccatgaataggccgaccggcaacccgcaatcgttcagcgcataatcgaaggcgccggccaagttggccatggcgtccggcaagtatgtctcatcataggcggggatcatcgttggtcactttctcgcggatgatgtcgcgcatgaacaggccgtcgagatcggcttctgcacttttgcggcggtaggcttcgcgagctgtgcggtcgcgctcgttacgcaatccgtggtaggtcgaagcgcgggcgatttcgcagccttggaaccgcagtgccgcgaatgcctgaggactggcgagtacgatctgcttgccgagctcgcccaaccgcatcgcctcagcgagttggtcgatggaaatcgcgttattgacaaaagcgcgggcgaacgagaaatacgaatcgtcggcacgatatccgacgatgacgtcagcctgactggcatccggcagaaacacttgtttcagatattcgatgccttgcgcggcgacggcggtggtcggctggaaacgacggttttcgaccagcatggccagccagttcaggatggtgtagggcggctgggacaggtccaggaagaggagcccgtccgtggtcaacgtgtaccgattcgcgaaaccgtcatccagtcccgcacacgcccattccttggccagctcgacgctgcgcgtgcaatagaatccgcggccataatcgttgttcggcttgaccagcccgtattcaggatgcttgatgacatgcgaagagccatgccacagttcgatcgatgcggtctccattggccggctccttctctctctccttacatattcttgattatatcactgtggtgatagtcataagggaaatgcgagatgaaagataccgctgtatacgttcgtacacaacgtgaaatgtatacgaacgtatacaacactgacgtccggagtcatgctccgcagtggcgcagcgggcgcgccactacaatcggaatatgggactgaagacgtggaagaagtggacggactggccgctgatggtgctgtccgtggtgtttctggtggtgtattcgtgggaaattctctcccgcacgcatatcgcgctgtgtgaaaccgtcatcaacgtgatctgggtggtgttcgtcgtcgattatgtggtctcgctgtggttggccgacgatcgctggcggtggttcaagcacaacctgttcacgctgctgaccatcgcgctgccgatgctccggcccttgcgactgttgcgtttgctgaccgtgctgcacgtgctgaaccgcacctccggcatggcggtgcgcgggcgcatcaccgtatacgcggtcggcgcggtgggaatgctcatgtacgtgggcgcgctggccgtgtattccgtggagcgcggggcgtccggatccacgatcaccgacttcggcacggcgttgtggtgggcgttcgtgaccgtgaccaccgtgggatatggcgacttctcgccggtcaccttccaaggcaagatcattgcggtggtgctgatgttcaccggcatcgcgttgatcggtattgtgacggccacgctggcctcgtggatcgtggatcaggtcaatctggagacggatcggcgcgaggacgctcgggagaaggaagtggccaaggaagccgcgcaagaggctattgcgacatcagccaatcccgaaatcgacctattgcgcgaggaagtgcgtgagctgaccgctacggtagccggtctgcgcaccgaacttgagcgacgttgattggcgaagcgggacaaacaacgattctgccaagaaggtccgcgtcagttgttgtcaccgcggattgcggcaggatcattgtcgccacggctgttttcttcagtcggctcaacccagcttttgatattttttatttttttgatatttttgataatttttattttaggttgattcagcgaggaggcggtccacatgaaggcaaaggaaaacccattcaagccaacggcaggaggggaaccgcccctgctcatcggccgaggcaaagttatccgcgatttcgagaaaggtctcgataacggagtcggtgccccagggcgcattatgctcgtcaccggcgctcgtggaaccggaaaaaccgtgatgctcactgtgttcggagaccgggccaaagcgcgcagatgggatgtcatcgaagaaacggcctctgccggactatgcgaacgccttgttgatgccttacgaaccgggcgaggggcccttgaccacctcactatccgaccatcgttgacttttgctggagcgggcatcggcctcggagaagccgaactatccccgaagcgtatgcccgaaacgttgagaagtgccattgccggacggttggatgcgcttgagaagcgccatgctgggttgcttatcaccattgatgagactcaagcggctgagcgatccgacatgattgccatcgccactgccatacagcatcaaatcagggaacgacgcaatatcgccatcgtgttcgccggtctcccacagatgatttctgatttgttcaatgacgaagtcatcacgttcctacgtcgcgcgaaaacgaacatactcacagatattcctcttgatgaagtgcgcgatgctttcgccacaacattccgcgcctccggcatgtccatcaccgacgctcaattaagcactgcagccaatgtgacagccggatacccctatatgattcaactggttggctaccatatctgggatgccgcagacatgcgggactcggataccatcatcgacgctgatgttacggcaggtatcgaggaagcacgtattgaccttgataacgccgtgtgcatcccggagttgcaaggcttatccaaaaacgaccgtaagtatctcgaagccatggcagcgtcagatggtccctctcccaccgtgaatgttgcacagcgcatgggcaaaacgcctaactatgccgccacctaccgcaaacgcctccttgacgccttcgttatccgcgaaacagaacgaggcgaagtcgattttgccgtgcccttcctgcgcgaatacttgcgtcggaatcagtaatcggcacaatgcacagtatcgatatattccgttccatataatgacttttcgcattcagatacacaatggacggcctgttgagtagcactcagcaggccgtccattctatttagctattcagttatcggagacacacctcaggccttgaccggagcgccagcgacctgctgggaggccatcacgccgaacaggtagccgtcttcggagaagtattcgaaggtacgaccggcgaagtcgcggcattcgaatctgatatcgttatcgattcgatcagcggctcacgatactgcccttgcatcgctgtgccactgttgaatgtgcccggctggctcacctttgggtcaccgccgacacatccttgatgccgatggttatagagtcgcaaattcacgactggcgcacctgcccacgcacctatcctgtcatttcgagcgcataatttgctaccacatccggtcagggcaatcgaccttaatggcgtaaacggcacttctcaatacgtaaacggcacttattcttggctcccctctcagagaggggagccaagaaatatcaagctcggcctcccaggagagagccagaataatgcaccagcaaggcattaggatggagggcatgagcgatttgaacgcgttgaatcttgagcccggcgaagtggttggtgggtatacgctgatctcccggctcggctcaggagctatggggtcggtgtggcgggtgcgcgacgacggcggcaccacctatgccatgaagattctgcgcgactccctgaccgacgagtcagtggcaggctccggctctgcgtccacggccctgcacgaccccgacctcaagcccgatgtcacgccgcgcgagcgcctgcggcgcgaggccatggccttgaagaagatcaatcatccgggtgtgtgcggcatcgtggatatggaactcgacgatacgttggcgttcatcgtcactgaactcatcgagggcaagaatcttaaggatgatgtggccgccaatggccggtatgtgggcgacgatctggaacgcttggcccgcaagctcatcgaagccaccaaagccgtacatgcggccggcatcgtccatcgcgacatcaaacccaccaatgtgatggtgtcggccgccggaccggtattggtcgatttcggtatcgcgatgggcgagggcgaaagtcacgtgacccgcaccggcctagtgatgggtacacccggattcatcgcacccgagattattgacggtgccgaatccgacgacgccaccgattggtggtcggtggcgtccgtgctcgcttttgccgcaaccggcgcgcctgtgttcggcaccaagccgatgatggcggtacttgagcgcgaggcctcgggcaacgcgaatctttccggactaccggccggcacattggctgccttccgttctgcactggacccggatcgcagggatcgttgcacgccggatcaattgctgaatgccatcgccttggatgcgttgaatcccaacgcttggcagggcgagcaggcgggaccgttcgccgcgggagccgtggctggacaaccggctgcgatcgttgccgaagccgcggaggcgatgcccccttttggcgcggccggcggcgttgaccgcaataatccccgaaccatctggcgcgcggccgaggaagccgctgaggctcccaccatggccgtgttctccggcaataagggcgataacggcgatggcgaaaccgccgtattctcgccggctggcgccgctaccgccacgctgcccttagccgatatgccgccacgtccgccggccggtgcggagcaggccacgcaactgttgcccgacgctgctgccgatttcaccgacgacgccggcacacaggtactcaccggcgcgaccacaccgatgccggaccaaaccacaccaatggccggcgccaccacaccaatgaccaacaccgattcgactccggccccgaccacgccgctggccgagcgcaccaccgtactccccacgccgcagccgtcatcattccccccgtccggcaccgcccagagcagctgggatcccgcaagcaaccagcccacagcggtggaccccgccattcgcccggcattgcagcgcatcatcgaccaaaccgcccaagcggcccccaccgaaaccatggtccaaaatcctcccatgcccaatccggtggacgtgaagcgaggggaatatctgcagcgcggcaccctgccattgatcctgctggcggcgccgctggcggcactggcggcaaatgctccgctcgtggccatcatcgcggccactgcgttgttgtggctactgctcaccctggcctataacaccgaaccccagcttgagcgcgagggcaaacgcggcggcgagcgcaaaaactccgattcgtggattcgcgtggcgacttttccctggcatctggtcaaagccctgctgctggccattccccgcatactgctgctagtcatcatctatatggcgggaaccgccgtggccaccgcggctctggcactgcccgttcacaccatctcctggtatttcaccgcggattggggtattccggtgccgttgctcaatgatgtgccgttctccgcttccgggctggcgctgggcggtttcatggccatcggctggctggtcactgtgttcgccccacagtcgatgatgattcggctggggggcggcgtactgcgcgggctcaaacacagtcgcccggcgggcgccccatccaccgaagtgggtggggctccacctgctccagtggcgccggcgcccaagggcggcgggcgcggcaccgtgctgttcaccatatgggccatcatcaccgtggccttgtgcgcgatgccgattctgggcatgccgatcaactggatgccgttcgcctagagcggggcggaatctcacacatcagccatccgcacacatggccgttgtgtatccgatacgttcgttccgtcacacttttacagggaattcacctcagatcagctctgggcgcagtcctcctcaggcccggtcattatgatggggcccaaacattgaagcgattgcaaggggatagctatgtcagatccgaagcgtcaggccaagcgtgccacacgcgctgagcgccgagcggccgaggaggccgcccagcaggcacgggccgagcaggcagccaaggagcgtaagcagcagaccatcatcggctgcattgtggtggccattattgtggtgctggtggccatcgctggattcgccgtatacaaggctatgcggccgtccaacaccagcagcagtagccagcaaagcaacatgaccgtggacgaggcctatagcaagctcaagaaagtcagtacccagccggctaacgccgacgacaaggccggcttcgtaatctccaacaaagggtatggccagaaagccgagggggctcccaccgtatccatctacatggaaccgctgtgccccggctgcgcctcggtgaaccgccaactcgacccgacgctcgtcaagctgatgaacgcaggccagctcaacatcgatttgcacttcctcaatttccagaacaacaagagctccgacaactactccaaccgcgtgttcaacggtgccatctacattgccgagcatgatgacgatcccgaccacctcatgagctacctctccaacatctacgctgaggatttccagccgggcgaattgtccaattacgagccggtaaacaacgccaagctggagaagcaggccgtcaaggccggtgtgagcgaggatgtggccgccgcggcgttcagcggcaagaacgaatacctcgactggctcaccgcctccaacaactacacgatcctgcgccccgaactgttcaacagctccggcgccttctcctcccccacactcaccatcaacggcgaatactgggatctgaagcagctcacgctggcggacacgaatatggtggacggcttcctcaagtccattgggctggatgctgaccaggtaggcgtggaaggcaaaatgccatccatcggtgccagcggaaagccgatttcggtcgcctcctgatgctgcgtggccgaataagttgacgccgcgacatatgcaataccgcctgcggctcggcttaaattgaccactcgggaagtaccggtatactagtcatttgttcgcaacgatttacgcgttaagaacaatcgcctctttagctcagatggccagagcggccgccttgtaagcggcaggtcgtcggttcgatcccgacaagaggctcgtcgcgcagaaaaaatggcgtattatgtgatacgtagacttttctacgcatataattcttaccttggg

SEQ ID NO: 911 - DNA, 32029 bp, Unknown
  gut microbiota DNA sequence
tcccccaaccagctccgcaccttcaagggggcgggaacatccccttctctcccgccccctttttctttttttgagctcagaacaatctgacgagcaggaatggtgacggtggccggtgaaaccgcagtacgggtcggaacaaccgttacgatgggtggcgtaatcgttcacccagcaggaagagtatggcaatggcacggcgttggaccccgcagcggtttgttacactgcgtcgcatccgcgtaatcgcctgtatcgcggcgaccagtatcgcgctggctggatcattcgcgttcaccgcgcgtaaatccgtggccctgaacatcaacgggcaaaccacccaagtcaccacatatgcgatgacggccacccgtcttctggaggaacaaggggtggatatcaagacccacgatatcgtgaccacctcgtccggcgaccagctcgccaatcatgccgtggtcaccgtacagtccgcctaccagaccaccatcaacatcgacggcaccgccgtgccgttctggaccgtggccaccagcgccgaccagctactgggatttttcgaggaaaaccagaacaacgccgcgaagatcaccgtcgacatcaagaacgtgtacaaccagctcaccggcggcctggtgatcaaccagtccgggccggtcaccgtcatcgccgacggcaaaagctcggtggcccccaatggcaagctgccggccgcctccatcctcgattccaagggcatcgtgctcaacaaggaggatcgcgtcagcgttgagaaagacggcgacgagaccattctgcgcgtacgccgcgtgacccacggcgaggagacgcgcacgtccgtgattccgttctccacccagaccatcatcgacccgaatctggctgaagggcaggccgatgtgcgccagcagggcgtcaacggcgagaagacgcaggtgtacgacgtcacctatgtggatggcgtggccgaatcggagacgctgaaatcggagaccgtcacctcgatggccatcgaccagatcatcgccgtaggcgccgccaagtctgataccgataaaggttccgataagaaatccgactccgccgataacggcaaggccgattccggttccaacaatcagcacgagtcgtccaacaacaatgccggcaacaccggcggcaacaactccggcaacaccggcaattccggtaacactggcaacaccggtaacactggcaacaccggcaactccggcaactccggcaacaccggcaacaccggcaactccggcaacaccggcaacactggtaacaccggcggcggtacgaacaacaattccggctcttctggctccgattcaggcacaaccaccacgccctccggccgcctgtggcacgccaccgtagcccaggctcaggcctatgccgccggtgccgccgcgcagcgcgggtggacaggcaacgactgggattgtctggtcaaactatggacccgcgagtccagttggctgtggtatgccgaaaacgcgagctccggtgcctacggcattcctcagtcgctaccagcagacaaaatggctgcgttcggtgccaattaccgtgacgatgccgccgtacagatcgattggggtctgtggtacatcgcacaagcctacggcagcccgtccaaggcatggcaacattccgaacaagtcggttggtactgatcggttacgaagcccacaaggaacacacgcttatgaacgacaccattcccgccactggtcacctgttaggtgccgccgatatccgtcgtatcgcggccgatgctggcatcagccccaccaagaaattcgggcagaacttcgtcatcgaccccggcacggtccgtcgtatcgtacgcgaggcgggagtgaccgctgccaatcatgtcatggaagtcggccccggcctgggatcgttgacgctggcgattttggaaaccggcgccaccatgaccgcagtcgaaatcgatccgccgctggccgaacgactgccgggcacagtcgccgaattcatgcccgaagccacgtcacgactcaccgtcgtcaatcgggatgccttaaccgtcaccccggagaacgtgcctgatttcagcgatgacgcatcgtttacgctgatcgccaatctgccgtacaacgtggccacgccgattctgctcacgctgttggagcgtttcgacaacctcggctcgttcttggtgatggtgcaaaaagaggtggccgacagactcgccgccaagcccggttccaagatctacggcacgccgagcgtgaagctcgcctggtatggcaccgccgaacgggtgggcaccatcggccgcaatgtgttctggccggctcccaatgtggattccgcgctcgtcagattcacccggtatcaggccgatgccccggccgccccgggagcctcgaacagcacgaccgacggcggcgcacaacgggaactcgtatttcgtctgatcgatgcggcgttcggtcagcgtcgcaagaccctgcacgcggcattgaagaccattgcgccctccgaggcattctccatcgccggcatcgatccgacccgtcgaggagagacgctcaccatcgccgaattcaccgctctggccaaggccatcgaatcgtgtggagatggagatgaggcacaatgagtccggtaatctcacatccacgcccagccgctgcccgacatcagttcgatgagctctcccccatcaccattacggtggattgcccggcgaaaaccaatctcaccttggaagtgggacctgctcacgacgaatggggcggacgccacgaactggacaccacctactgtgcaatcggcgtatacgacaccgtcaccgcaaccgccaagcaacccggagcgggattctctctggagctcgaaggcgcttatttgggcgacttggcctcctcacgcagcgacatgcgccgcaaccatgcggtactggccctcttcgccatggcccaggcggccgagcgcgagccggatgtggcgttgaccatcaccaagcgcattcccgtgggtgccggactaggcggcggttcagccgacgccgcggcgaccatgctggcggtcaatcgtctctgggagctgaactggcccatagagcgcctgcgcaccattgccgccacgttgggcgcggacatgccgttctgcctgaccggtggccttgcatacggcaccggtttcggcgaacgcatcacggatatcgcccccggcagccgcgatgagctggcgctgatagaacagggattcagcggcgaagtattggtcggcgcataccagtcgcaactcagcactcctgaggtctaccacacctttgacatcgtgggagccgcagaaggcgaccgcaatcatctgcaggctgcggcaatcagcctgcatccccgcagcgggcaggccatcgacgccgccacgcaggcgggtgccagccatgcattcgtctccggatccggcccctcagtggtcgctttcgccgccgacgaggcagcggcacaacgcattatcgaggtgtggcgcgatacagctgtggtcgatcgtattattcgagccaaatctcccgaacaccccaatatcagcgtcagacagtgacgctaaggtagcaaccagccacccgacccatgaaagaagtccaccgatgacgtatcaggttgatgaacgtgaagcccgcaaggcgtacgtgcgccgccgccagaccatcgtcttttccatcagcggcgcggtattggcagtagtgctggtcatagccctactgttcaatttccacgttttcggcctcggcgaagtggagactccggccagccagccgaattacggcaacgcggcgccgtgcgcggtcaaggacagcagcggcaaagcgcaatacgtgtccaacgcttcggtcggcattcgcgtgatgaacggcacctctcacggccaattcgccaaggccgtgggtgaagctttggccaatcgtggattcagcgtgcagaaaatcgataactattccagcaccgacgttgaacgcaccaccatctacttcggcaagaacgccattaatcaggcgtatacgctgatcggcaatttcaccgacgccaccatgatcatgacggctcgcgaggatcagctcatcgatgtggtcatcggcgccacgttcaacgatctgcaggacaccaactcctccccgcaatccggtaagaccatcaccaatatcgagggttgcaaggccgccgatagcatgaccaagctgcccgccgacaccaaacacgacgcatacacggcgcagtaaggcgcatacagcttcatcttcgcgaaaaaccgtacgctgacacgtattcagcgtacggttttttggtatcggactagtatcggactactgaatctcggcgtaccagcgcttgagttcttcgacggccacatcgtggtccaccggaccgttatccaagcggtattccagcatgtgcttgtaggcgcggccgatcatcgggccgggctccaggcccagcaactccataatttcgttgccgtccagatccgggcggatcgcgtcgaagtcctctttcttcttgagttcgcggacgcgctcctccatctcatccatggcctgggagaagatcatcgccttgcgcttgttttgtgtggtggcatccgcgcgcgtgagcctgttcagccgctcatagaggtgcccggcatccttgacataccggcgtacggccgaatcggtccacggctcgtccacatagccgtggaagcgcaggtgcatattcaccagttctgagacgtcctcgaccagatggtggtcaaaacgcagcgccttcaaacgcttgcgggtcattttggcacccaccgcgtcatggtggtggaagctcaccttgccgcccggctcgaaccggcgggtcttcggcttgccgatatcgtgcatcacggcggccaagcgcagcgtcaggtcgggggcgggcaccgggccgtccgggccggtttccagggcgatagcacgttcgagcacaatcatcgtgtgctcgaagacgtccttgtggcggtggtgttcgtcgatctgcaattgcagggccggaatctccgggaagacgatgtccgcaagaccggattcgaccaacgcctcaaggccggcgcgcggacggtcggagagcagcagtttggtcagttcgtcgcgcacacgctcggcggatacgatgtcgatgcggtcgcgcatcgaggtaatcgcctcggccgcgtccggcgcgatacggaagcccagctgggccacgaatcgcacggcgcgcatcatacgcaacggatcgtcgtcaaaggactgtcgaggatccaccggcgtgcgcaacacgcccttggacagatcactggcaccaccgaacgggtccacgaattgcaggtcgggcacgcgcagggccatcgcgttgacggtgaagtcgcggcgggacaggtcgccctcaagcgtgtcgccataattgacctcgggcttacgcgagtccggatcgtacgtgtcggagcgataggtggtgacctccaccttgacctcggtgccgtccggacggcggcgcatggcacccagcgtgccgaacttgcgccccatgtcccagaagccgtcatgcccccaccggcgcagtatcggctcgaactgctcaggccgtgcggatgagcagaagtccaaatcgtggctctttctatggagcagcaaatctctgaccgggccgccgaccaatgccagctcgtaaccctgttcggcgaacagtcgaccaagttcgatggcttcgggccatacttcgaaatccaatgggcaccttcccgcgtgcgacgtttttctgccctaccagcataccgttaccccacctgcacacggggttgagtaaggtggagaatatgattacgcccgccgaccttgcccgcatgctggggcaaacaccagattcggcggatagccatacccaagaccacctgctgtatacgtccgaaactccgcatcattccgccgattcgggcgattcttccgatgtcggcggcaccgcgagccactccaccaatcaggccgttcatcaagacgaagtagacgcagtaccgactgcgcaacattccggtgtgcctggcacacccgcaacgcccgccacacccgaaccatccgaatccgaaatatcggacgccgccagcgacatgcccgcaccaaagccgatgatgcccacaccggccaccgtcttcggcatgcatgccaccgtcaccatcgccactaccagcggcactatcgaggggcaggctgatggtatcgccggcgaggccggtgccgagacgattgccgaggtcgagccgattatcgccacggcacaaacgtccgtaaccatcgtcacgaacgatcccgcggcgaccgctcacgcggccgtagatgctgccgttgcggtcgccaaggccgccgccgcgcacaccacagcgataccgactccgcgcgacgtgctgatgccgcctgcggcacgtaccgcaccggccgcaacgccggtcaccatgccggtctcagcgccgtctgcagcaccagtgaggcccgcaacgtcagcgcatcccacgccggccacggtcttcggccggcacccgtccggagatgttgcctcgccggaaccggcagtgccggtagaaccggtgacgccatccggcccgactccggccatgatgccgcaacgccgtacgtcggacggtccgaccacattcgcttcactggatgcccaggaactgccggtcgtacgcgaatattcggcaggcggtctgattttcgatgaccagaaccgcgtggccattatcgcccgtcattcccgctccggccatctcgaatggtgcttgccgaaggggcatatcgaaaaaggcgagaccccgcagcagaccgctgtgcgcgaagtgcatgaagagaccggcatcctgggcgaggtgatcgattccatcgccaccatcgactactggttcaccggtaccacgcagcgcgtgcacaagctggtccatcacttcgcgctcaaacagaccggcggtgaactgacggtggaaggagacccggatcatgaggcggaagacgccatctgggtgcgttttgaagatttggatgacgtgttgagctatcccaacgaacgcaaaatcgcgtggctctacgccaggaagaagaacaggcaggcaaacgagtgaacctacccggagtcttacgacattgcacacgtctggcacacgcactggcggctggcgtcgccgttgtggcgatgctggccgctccattgaccgtctacgcgaacgatacgacggacacgactgattcatccgatacgacggacgcaacgggcaatcagaccgagaatcagcccaagcagagcattgccatcacgcaaagcacccccatcgtcacctccaaatcgggctatcgtgtcaccgcggtcatcagcaatacggacagcacggccacgtcaagcggcacactgcacctgaccaccaatgcgttgttcacctttgtctcgcgcaccgatattcagaattgggccgagaacaacgcccccatcccaacccccaacgagttgggttccgttgacgtgccatcgattcccgccggcggcactgccaccgtcaccatcgaggtgaacgccaatcagcagacccttgcctccatagggagttggggaccgaaaccgctgatgctgtcgtatatcgttggcaatcagatactcgccgatttgccgagttttctgacccgatcttcggatgggctcaacaccgcgacaacaccggccatgaacctgaccgtggccatgccctacaccgccagcggctggcaggtcgataataaggccatcagcaatcgcattgccgaaaccaccacttcctcgacatcaacatcgtccaagtccaacagcacggacaaggccgacaagtccgataacgccgacgccagcaacgcggccaaagccactgatacgcaagccatatccttatccgaacaggatgccgataccgcgcgatcccttgggcagacattcgccaagcaccgctcgctgcaagtgatcgcggatcctctgtattggcgtcagtccgcagtgcaaccgtccattgccggcatcatgcagcccgccgacttcgacatcaccgcctataccgcactggacgataccgcggcctacgaaaaggccggcatcaccactgagcagtggaacgccaagcaggcggccgcatggtatgccgacggaggcgactccgaaacaccctccgcgtacgcatggcagggcaacaactgttggacgttggatgcgctgaccgcagcacgcgagcagggctatgacacggtgattgccgatgcctctttcgatgccgaccagactgaagccgtacacacaggcacctacgtggtgcatacgcctgccggcgatgtcaccgtgctgaaggagcaatcgaccttgggcacgctggccaagggccaagccaccagcacggacgcgcaggccgagtccagcgatgccggtcggttggcccgactgatcgctcagagcgcgttctaccagatggaacagccctatacatcccgatacctgcttatgacgttctcccgcaccacggaggccagctggatcgatcaggtgatgagcgccttcgagcaggcgtcttggttgaatctgacggacctgaagaccatggccaaggccgatccgtacaatgtcagcgattcggtcaatcccgacaaggccgatgatgccaacaccgccaatacccggtcggcattgagacagttggccgacagccggcatgacatcatgcgcatggccacctccatattgaggaacgagattgattccgacgaggtctcgtcgttggacccgcaggccctggcccggcaggacgccaatgacaccgcctcgcatagcaacgatccgacgcaatggattggctctttactggcgctgcatgacgatatggcgctgcggtccatgtctggctccccccagccgacagccacgcgaaaagccatggtcaaagccacgaaaacactggccagcgatcttctgaacggcgtacgcatcaacccatcggaatcaatatccgtgttcagcgaatccgcgaaaatgccaatcaccgtcagcaatgaccttccctacgccgtcagcgtgcaggtcaactcactgactgactccatgcagatcgtcacctcgcgaaccgctgacatcgatattccctcgcatagcgacgctcaggtgaccttcaccatccgcgtttccacttccggctcatcgacggcccatgtgtcgttgaccgaccgggaaggcaacagcttcggcaacacgcaggacaccgcgatcaccagtgtgatgcgcatcagtgatgccagcggcttcattatcatcggcttcgccgtgctactgggcattatcggcctgtggcggcagttccatcggaagaaggaccccgacgaatgagttcaagcgtaggtcgtaattccctgatcatggccacgggaaccgctgcttcccgtgtgaccggtcagctccgcacgattcttctcgctgcggccatcggcaccaccggattggcggccaacgcctatcaggccggttccatgattccccaatccgtgttcacgctggtgtccggcggcatcttcaacgccgtgctggtgccccagatcgtgcgcacgttgaaagaaaaagacgcccaagaacgactgaatcgcctgattacgttggccatcggcatcctattggccatgaccgtggtgatggcggcggccagccctctgcttgcccgcctgtacgtgggtagcgacgatcaccagatgatagccctgaccacctcgttcaccctgtggtgtatgcctcaggtgttcttctacggcctgtatacggtattggggcagatcctggccgccaaagaccatttcctcacgtatgcgtggagctcaaccggtgccaacattattagttgcgccggttttactggctttattctgctgttcagcaaggccaatgaacagcccctcgaattctggaccgccgacaaaatcgcgcttaccgcaggcacctggactttgggcgtggccttccaagcgctgatactgttcctgccgctggcccgtatcgggttcaagtacaaacccagcttcgggcttggcggctttggactcaggtctatgggtcccgtggcgttaggctctttgggcgtggtgatcaccagtgagatctgcggcattatccttacccgtatcgccacatccgcaccgcagcgcgcccacgaactgacgggtgccagcctgttcagcgtggcaggcaacgcgacctatcagaatgcgtacacactgttcatcctgccctattcgctcatcgccgtatcggtatccacggctatgttccccaaaatctcccgttccatcgcagctgcgaatctggatgaggcacggcacgacctggtcagcgcactgaataatgtgggcctgctcatcatgttcttcgccgccgccatggtcgtgttccccgaaccgatcatccgcgcattgcttccgtccgtctcgatggacgagactatgttgatctcctatgcgcttatcgccttgtctgtgggcattccattggggtcggcgttcctgttaatccagcgcacgttctacgcctttgaggacggccttcaccccttcctgtccgcggtgatgcagtatggattcacctcaatattcatgatcatcggcatgatggtacttcctcctgagcattgggtactcggcatcgcctgctcggtgaccctcggtggattactggcgttgccgctgacgttgatgatgttgcgccgcaagttcgaaggcaatcttggcggtcgggagatcacgaggacatatgccaaggccattgtggcggcactggcttccggagttgtggtctggctgatcaaacgaccggtagtcgcactgttcggcgcggatattcgaccagtaggcgggcacatgagctggtggtctgcgctggccatctgcgtggtgctcaccattgtgctggccgtagtatatgtggctgtgttgtgggtggtgcacaccccggaactcatcagcgcctatcactcgatactggcccgtctacacaagactccggccagtgaggacgttgctgtgacagcccagccggaaaaaagtcgacgatacgcaaatcaatcctgagacggagcccgtcaaggatagccccgcacgtagaatatctaagaccagtctcgaacaccaatcacacggagccgaacgcactatgaaaccgcaactcggagacacgattctcaaccgatacaccttggtgtcatcgttgcgtgaggagcctggcattcaggcatggaaagccaacgaccgtgtgctggcaaaggattgccagctgttcatcattaccaatcgcagcgctttcgccgcaatcgatgagctcgctggtcgcatggccgccactcgccctgatcgtgtgattcccgtactgaaataccgtatggaatccgacgtacttctcattgtcatgccggtggatagcggccaatgcctgactgactacatggtggataccgccaagccgctcagctacagcgccatccggtcgattatcggagaatgcgccaacgtgctgcgcgaggtcattgcggatactcccagcggcatcgtcatcacaaccgacaccgttcgagtgactacctccggtgtgcaaattgccgatgcaccatgtgccacgatgctggccgatacgtccgctaccgatctgcgtacggacggtcctgaacggtatgcgattcgccagcttgcggcattactctataccctgctgacacgcacgccaagccaagcgacacccacattcaatctgcgtgccttgccgcaagacacccctggcgaattccgcgtgatttgcaagcgtggattggccttgagcgagcccgacgagcatacgttgccaatggcagcccttgtagaactcgacgccttgttgggtaattggaagccgctctctgaactgagcgatgctgatattgctttgccgagcgtggaaagcgattgctcgattaccaaggcgatactgaagcctgccaacgagactgatatcgtgcctattcccagcacgttgattaacagcaacagtcttccggaattgtctattaccccttccctgccggttcagccggccgccgtccccgctccgcacgcgatgtcaccggttcctctgcctgatgggtccagtactgctgacggcaaccagtctcagtctgatgcccgccgtctgtttgacttcaacctttctgacgcctgggagcacgaaaatctttccggtgaaggcaccggtgactggtacagcgaaatgaatccggcccctatcggcggtccgggtgataatactcggttgacagtgcctattgttaccggcggtatttccgatgccaccgcgggagagacaaccagtcgtattcccgtgttcgacgccagcggccgtgctgtggctcccggtgaggaatcactgcgtgccttggaagaggagcaggcccgcattgccgaagtaagcgccattcctccgagcttcacaccgaaggatgtgccggatgacgaggttgacagcaagctgcccgatgaacatctgttcggcaaactgtcgaccaaggtcgttgccatcattgtggctctgatattggtagtggcagcggctgtttgggcagtgcatgcgttccgatcctccggagacaatcctgccgatgcttccagcaactccagtgaaggtgactggcctgatatcaatgctgacgctgtgccatttggtggcagcgagaacgcgacgaacggtggcaccactgacgattcttcaaaatcgagtgatgccactcagagcgaatccaaggactcggcatcagacaagtccaagaagtccgagactgctgattcgtcgtccaagaagaccaaggccaagaagtccggcgataaggattccagcgctgttccgcaaccgagccatgagaacaacacggcgtttacgatttccagcgccaactttctgtcgaatcctggcggccaatccgggtacgcatactacatgcaccttgaccagccgcaggatgcgtaccgcatggttatcaccatccgcacatccggtggtaagggctatattcgcgcaaataccactggggaccccactcaaggcaagcaggtggccgaattcacctttgctgaaggtggcactactgaggtgaagttcaccaaagccgtcaagacgcaggatctgctgctgtgggtgccatcggatagcctgccgcagaaccagctgtacatcgaaaaggtggaggtcttctaatcggcatctatgccgataactgacccaagaaggggcggtaccgttcgcatacattcgacggtaccgccccttcttcgcatctggctgaatgacacggaatatcgtatgggggtgtgacaatgtttcacgtgaaacataacgtcatcattatcggttctggtcccgctggctacacggccgccatctatcttggccgcgcaggtctcaatcctgttatggtcactggtgcgttgtcgccaggtggacagttggtcaacaccactgaggtggagaacttccccggattcccggaaggtattcttggcccggatcttatggatcgcatgaaggaacaggccaagcgcttcggtacaacctatatcgcagacgatgtctcttccatcgaggcgtgtgagagtgattcggtcaagccgacctatcgtgtaacactctccgatgactcccaattggaggcatcgtcgcttatcatcgccacagggtcgtcattccgtaagcttggggtgcccggcgaacaggagctgtccggacatggcgtctcgtactgcgccacctgcgatggcttcttcttcaggaacaagcctatcgtggtcgtaggcggtggcgattcggcttttgaagaggcattattcctgacccggttcggttcttcggtcaccttgattcaccgacgcgatagcttccgcgcctcgcagatcatggtggaccgagccaaagccaatccgaccatcactctgatgaccaacacagtggtgacctccattaccggcacctcctcccccacacagaacaccggtgcacctattgccattcctggcttgacgctcaaacgaccggctgtagcaccggccagtgtcagcagcatcgccgtacgtaatgtggtgaccggagaagaaagcacgctggacaccaacgccgtattcgtggctatcggtcatacgccagccactgattttgcggccggtgttgtggaccgtgacgatgatggatatgtcgtggtgcagggtgccagcacggtgaccagtgcgccaggcatctttgctgcaggcgattgcgtggatcgtacttatcgtcaagcgatcagcgcagcgggcatgggctgccgtgcagcgctggatacgcaggcctatcttacggactgatggtggcggactgatggtggcttgctgttctggctgctgcctgtgacataggagcaacgctaggtcagtgttacagcatgccgcccttggatagtacgtatcggtcaaaggcatagaaagacccctcaggcgacggagaatcacgatgtgtgattgtccctccagcctgaggggttttctattgcgacaggggctacagcgcgggcatacgcccctgccaggaatcacgcagaggctataacgtcttgcgcatacaacgcactgcacagcaataatgccggcgacaacacgaatgttcttatcgtgttacacccatttggaatcggcatcgccttggctcggcaccagcagctgcaggatgcgatccatatcctctggtgacgaaaagacgatttcgatgcgaccatgcttggtgctgcccttaatcgacaccttggtatcgaaatgattttccaaactctgctggatggcggaaccaacccaaggattggtcttagacgtcttaggcttcttcggctgctcccccgacgcaatcttcatggcgacgatttcttcggtgctgcgtacagaaagaccttccgcaataatacgagaagccagcttgtccatttcctccggatcgctcaggcccaatagcgcacgcgcatgaccggacgatagcacaccggcagccactctcttttgcacagaagccggcaggttcagcagtcgcaaggtattggcgatttgcgggcgagacttggacaccgacttggacagttgtacttgtgtcaacccgaactcttcaatcatctgctggtaggcagccgcctcttccagcggattcaaggccacacggtgcaagttttccagcaatgcatcgcggagcatatcatcatccgcagtggttttgacgatggcgggaatcgtctccaacccagccaactgagaagcacgccaacggcgttcacccataatgagctcatacgggctgtccaaatgaccggcaaacggattcgtgctggattccgtctcgtcgtgcttggcggctttggccgcagcaatctggcttgccggacgcttgcgcacgactatcggttgcagcacaccaacttccttaatggaagcagacagctcattcaactcatcctcgtcgaagatggtacgaggctgatgtgcattgggcccgatatcagacagtttgagttcagccagataaccaccggctaccggcttgagctcgtccttcttatctgtgtcagcggtctttgccgccgatgcagtcaaagatgtttcacgtgaaacatctttgacagtgacggatgtacgatgtgccgtctgagacgcagacgacttgccgccctgctgaggtgcggcgaccttaccggtttgaggtttctccgtaccgaaaaacaggtcgctaggatgagtaatggtgtccaatgcgggcatggatgcgcgtttaccggcggctttcttgactgccttgctggacgatatcgtctgaggcacggcaggttttgattcctgctgggcagtagccttcttggcgggggttatgtcagcaatggcctccggagtagacgaatcctccgcaatcattgcgggctgctccgccaccggctcctcccctggcaatgtggggaacaaagcgccaaggcccttaccaagtcgtgattttgatgccattacttgttcctcctcgcatcaatggtgtcaaggacttgttgcgaacgctgtgcgatttccaaagctgcttcaccatacgatatggcacctatgccacgaggatcataggcaatcaccgattgggagaaactcggcgcttcggagatcttgactgaacgcgggatggtggtattcagcacaatgctgggatagtgtcccttaacctcgttatatacttcacggctcaataacgttcggcgatcgaacatcgtgacgagcatggtggacaccagcagtacgggattgaaatgctcttgcaccaaaccaatcgtgttaatcagctggccaagaccctccaatgcgtaatactcagcctggataggaatcagcatctcggtcactgcacacatggcgttgatgaccaagaggcccaagctgggcgggcaatcaatgaacacgtaatcatagtgtttatctgattgacgtaggtagaggtctagggcctccttcagcaacgtgtttcggttgggcagatcagccacttccaactcagcaccgctgagatcgattgatgcaggcacaacatcaagtgtgggaaaatcaggacagaccgtgataacatcacccagatcggaacgcccctcgataacgtcatagaccgagggctctcccgatgcatgagatacacccaacgccgtagaggcattgccctgcgggtccatatcgatgaccaacacctgcgcgcccttgttcgccagcgccgcagcggtgtttaccgtggatgtggttttacccactccccccttctggttggccacggcgatacgacgagtccgttgaggctttgggaaatcggttttcttgagtacatcgtagcgtgagctttcatcagccatttggctaccaagcactgaaccgtgaccatcgaatattcgctgaagcgtttcggaagccgattctataggttccgactgatgatccttggtggccatcgctcctccttgcacagacgtaagttccagtgttctcattcgtatggacatgatgctcgttatccacaattgcgatatgcaatgtggataagtgtggataagtgtgaatgacgttgagtgttagattgtgtattcacagacgaaaaacattgaaaaatcaatgttttcatcattatgcacatcgtcccgtaaaaatgtggataacttttacgcacatatggaaatgtggataactcaatcagtactccactcatcgcttatccacaatcaccacgtgggtaggctcaagatccggtccgacagccgcctcaacgacgcgtggacgacgaccaccgaattttgcaatctccttgccagccttgtcgatttcagcctgagcagaccgtcccttcagtgcgatcaactgtcctgacggtttcagcaacggcaacgtccagccagagagtttggtcataggagcaaccgcacgacacgtgacaacagcgaacggatgaatttcccgcttccgtacctgctggatgacggcatcggagcgtccacgaataatctcaacgttctgcagttgcatcaggccaacacattcatgcaaccattcgattcgccgctccatcggttcaatcagcgtgaagtcatgatccggcaaacacgcggcagccaccaatccaggaaaaccaccaccactgccgacgtcggcaactgttttgaagcgaataccattcgtcgcattccgaacgtacggcacaatcgcagcggaattcagaatatgccgttcccaaatgatatcgacgtcacgggggccgatcaatccacgaggttcaccctcttcggcaatcttggcatggaaacgctccaacttcggcaacgcatcacccaagacctcagcaagtacaggtgacccctgcagctgatccgtcatagccatctccctcaccatgtttcacgtgaaacaatcaacatggagaatggcgccgctcattacgacgccattctccatgcggtcactttagtttgttcaaagacgacatccgtcgaacgtccctgtcatctcaaaaaaactcgccgagcaattactcctgatcaagctcgtcgtcttcggcggtatcctcgactctattcttgagatacaccgtcacgtaacgatgaggctcctcaccgtgcgagcgagacttcagcccctcttcccgaaccacatcgtgaacgactttacgttcgaaggaattcatcggcttcaagtcatacggctcgccggaatcctttactgcgtcaatggcatccaaggcgatatcacggaggtgctgacgcttgcgcttcaggaaaccgtcgacatccacaatcagatgagaacgctcgccggtcttctgctgtacagccagacgagtcaattgctgcagagcatcaacgacttcaccattacggccaataagatgtttgatgtcagtatcgtcatcagcaacgatttgcacggtggggcggtcattacgcacgcccatctcaatgtcgccctcatagtcggcgatatccagtaggccttcaaggtaatccgcggcgatgtcagcctcttcgttgagctggtcgatcgacttcacgtcatcctgtgccatacgctactccttcatgtcgtgtttgaattccaagtctaagccctgctcccccgaacagagaaagtaatgtcggtgcgtgttgaatgtttcacgtgaaacatcgaactcgcaccgacatagtcgtcacttctttttgcgcttacgcacgggctgttgacgctgatagccctgagtggccttacgctcggcctcttccttggccttggccaatgcttcttcttccagagagggcaggccggcctttgcgcggcgagcattctcattacgatgatcgcgcttctccttgtccgccgcagccggagagccaggggtcgggaatgcgtacacctgccacaatgtgcggcagaggttgcacacgttgttggtcagccagtagaccagcacggcgaacggcatggcgacaccggagaagatgtacatcaccgggaagagccacagcatagccttctgcatggtctcggtctgcttgttcatcgaagcagctgccatgttgcgcttcatgctgaagtactgcataaaccacaggcagaaacacatcaggaacacgaagataccgatgaccgccttgccactagcggcagcactggtgaagttatcggtcacgctgacaatgccgaacacatcggtttgggtgaattgcttggcggttgctacgtcgaacgcgcccaacgcatcgcgtttaccgttggcaatgtatggaatggccgacagcgtatagaacatggacatgaacaccgggccctgaatgagcataggcaagcaggagccagccggattgacgtcattgtcttgatacagtttcatggtttcacggctcatggcctccctggaagcctgatccgtcttgcctttgtacttgttctgaatacgctgcatcttcggcgccaatgcctgcatcttgcgcatcgacttcatctgcttgtagaacagcgggaagatacaagcctgcaccaccagcaccaggatgataatggcaagcacccatgagacaccaatcgggctcacgcccagcatcacgaagaagtcatgcacgatcttcatgatccaggtctgcaaccactcaacgggagtcaggattttatatagaaatccccaaaacccgctatcaagcagaaattcatttgagttcatcgttgggcctctctttgggttgtggccaatggtgtcagtcgaggctcttcatgagccttcgaccacgaaaacctgtaaaaaacggaataccgttgtggaacatcgtcgattcccccacgactccacggccggcaacgcagtaatctcagcacggcgagcactccccctttgaacgcgccataccgttccaatgcctcaatggcataattcgagcacgttggataatacttgcaacaaggcggtgtgtttgccgagatgtgctgttgataccagcgcaccccaccaatcatcaccgccttgaaagaagctgtcatgcctcagccaccttatgcgccaccgtggcaaaagccttcgcgatctgctgatctagcgaagcgaacgatgcggtcgctgcactgggcttggcgcgcaaaacgatatcgcaatgcgcgggcagcagatcctcatgggctctggccaatacacgaaacctacgcttcaccgtattacgggtgaccgcatgtcctaccgatttggagacagctaatcccaaacggcgatgcaccgtccggtcgtcatcatcatgatggtcgtcgggcaccaaatagtgcacgacgatatccttgccacctgctttgcgccggcgtttcagcacggtgacgaaatcacgatggctttgaagcctctccacctcgactatgcctgtggcactgatcggaatgatcaggcggagagggtcttgcggcccttggcacggcgacggttgatcaccgcacggccagaacgggtgcgcatgcgcaggcggaagccgtgcttcatgtggcgacgacggttgttcggctggaacgtcctcttcataatccattgctcctaggtctattcggcaacgcttcgcgctgccctcacgtgagtcaagctataccaaagtactctcacccctaccctcaagtcaaaacggacggagtattttcacatttcgacacgttgcgagacacaccccaaatctcttataatcggcggaataccaaccattcacggccaaaagttatccacaaattacatgtttgttattcacaatccagttatttcaacacgcgacacggtggataacttgtctaaaccagagtaaatattatctgttgtacgtatttcgccacagcgacagaaggggccaccatggttaacgcttccggcgaccccgtaatcgaggccgcccacatctggtcagacacgctgacggtgctcaaacacagcgcttcgctcagcccacgagaaaaaggctggttggaaggcgttgttcctgaaggcgtcttcggttcgaccatcgtgctgtgtgtggacaacaacgacacgcttcaagccattcagggtgatttgaacgattccctgcttcaggcattgcgtacggtaaccggcgaaaatatgtttcccgcgttcaaggtcgtgccgaaaaccgagcccgaaccgctttcggaggcaaagccggcgcagccatatccttcggaaatttctccgactgtcgccgaattcggtaaagaatcctatggtgcaaagccggcagccgcaccgcgggaaccgatgcccgccaccgagccgcagttcccggtcggtcagcagaagatgaatcgcgatcccgagactcatctcaataagaacttcacgtttgattccttcgtgcccggcgattccaaccgttttgcccgtacggtcgcactggccgtggccgaaggttccgggcaggatttcaacccgttgtgtatctatggcggatcgggcctgggcaaaacccacttgctgaacgccatcggcaactatgcactggtcaaggatcccgggctgaaggttcgatacgtcacgtctgaggaattcacgaacgaattcattgacgcgctgcaaaacccgaaccaaagccagggtcagattgctgaattcaaccgtcgataccgacaggttgatgtgttgcttattgacgatatccagttcctcggcggcaaggaagccaccttggatcagttcttccatacgttcaatgcactgcatcaggcaaataagcgtattgtcattgcttccgatgtagcgcccaagaatttgaagggtttcgaggctcgactcatctcgcgcttcgaatccggcctgaccgtagacgtcaagccgccggatctggagacccgaatcgccattcttcgcatgatcgcctcgatgaacggctcgaaaatccccagcgatgtgttggacctcatcgccgaacgcttcaccgagaacattcgtgaactcgaaggcgcgctaacccgtgttacggccgtggcctcgctgagtaatcagccggtgacccgcgccttggccgagcagacgttgcaggacttcttcaccaccgatgtggaaatcaagcccacggacatcatcagtcaggtggcgaagtacttccacctgacgtttgaggatcttgtcggtaaatcacgaaccaaaaacgtggctgttcctcgtcagatcgccatgtatctggctcgcgaaatgaccagtatgagcctgatggatattggccaggtctttggcggacgcgatcacaccacagtaatgcatgcctgcactcgaatcagtgaccgaatgcagcaaaaacaggagatctataactacgttatggagctcacggttcgcctcaagcaaagcaacaccaactgacacaacgcttctgagagacgaaaaacggcactttttggactgactttccgaaaagtgccgtttttggttgctcaggcggattctggtggatacgtcgaggcaacggattcgagacattagattcctcatggctcccctttgtgaggggatctgtcggcgcagacgactgaggggagtttcgaaggggaacacgcaaaaaaaccatgaaacgagagaatcgattctgaggaccgattttgcgggtttgggcgagcgagacggaaaaagtgccgaaaacggtctccagaatcgattctcctcgacgaaaaacagtcttcaacacgccgtgcgaaagtgcgaaaaccaaaaaagttatccacatagttgtgcacagatgtgggtaaactcggcggataactcgtggattacccactattttgttgtggaaaactcgtgcataaccgcgacctcgatgtggaaaactcaaattcgacgaactggctgtggaaaactcgcccacttatccacaagccatgcagaatttgtccacaattttcagggacttatgaaccgttgcagttgtagggctcagccctacttatccacactatccaccggccttattatggcgattacttactcagttacgtgaaaagcatcatcgccatagtaacagccggtcatccagcgtacgtaagttcgccacctaacggctagaatattcctcagccaatccgacgaagggaacaatcacacatgaaagtcgaaatcgataccgcagccctggccgacgccgtagcctggacctcccgagtcatcgacgcacgtccctccaacccgattctcgctggcgtcaagctggaagccattgacggaacgctgcaattctccgccttcaactacgagatttccgctcgccaccacatcgaagccggcgttgacgaagccggttccgtactggttcagggcaagctgctggccgatatcaccaaatcgctgcgttcggagaaaacgtacctggtcaccgacggctccacgctgaccatcacgtccggcaagtcgaagttcaccttgcagctcatgcccgacaccgagtacccggatctgcccgtggtaccggccatgctcggccaagtcgatgccccgactttcgttcaggccgtgaaccaggcgtgcgttgccgtctcccgcgaagaaaaccgcccggtactgaccggcgttcgcatgcaattccaaggcgacaaggtcgtcatgacctccaccgatcgcttccgtttggcacgcgccaccttcacttggactccgcagaacccggacgtcgacaccaccacgctggttcgcggctccctgctcaaggatgtggcccgtgctcttgacgagcaccagaacatccgccttgatttcgatgccgatagcccgacgctgctcggcttcgaaaacgccggccgcgtctccacctcccagctcatcgacggtgaattcccggcggtcgaccgcctgttcgccgacgaatatccgattcaggccgtagtcaacaagcaggatttgctcgacgccatcagccgtgtggctttggtcgccgaacgcaatgctccgattcgcatgaccttcaccggtcaggaagtggcgctgtccgccggatcggtcgacgaggctcaggccaacgaaacactggacatcgacatggatggcgacgacatcaccgtggcattcaacccgtcctacctgaaggagggtctgtccgccgtaaccgaaccattcgtgcgcatcaaaatgacgaccccggtcaagccggtcgagttcaatggccagcaggaagctgattccgacgagtccatggactaccgatacctgctcgtgccgatgcgctttaacaactgaaatccctgaatttccaacgattcgctaatgcacatctcccgtctcgcactcgaccactaccgctcatggagtcaggtagtgatcgatttcgtaccaggcgtgaatatcctgttcggcaagaacggtctgggcaaaaccaatctggtggaagccgtcgaagtgctgtccaccggatcgagccatcgcacgtccagcacgttgccgctgatcgaacgcgggcagaccacggccaccatccgcgcgaacgtcgctgatgatgccggtcaaaccactacgtatgaagcgtcaattcatgcgcgtggtgccaaccgagcccgcatcaactcggggtcgtcgctgtatctgcgcgatatcatcggcaagattcccagcgtttccttcactcccgaagatcagcggttggtgtccggcgatccgggagcacgccgcaccatgatgaatcaggctgcggctctgctcgagcccggatacatgcagacgttgcaacagttcacgcgcatcgccaaacagcgtgccacattgttgaagcaattgaatgccaatgtcaacaatggccagccgatggatgcggttctgagcggtttggaaatctggaccggccagttcatcgaagccggtgtggcgttgacccgtatgcgcgctcatgtgatcggtctgcttgccgagccatttgccgcgatttacgccgacttggccggtgccggcgagcaggtgacgctcacttatgcgccttcattcgacgaagtgctgatgttcgacgatccgcatccgcagattagcgagcatttccaacgcatctaccccggtgaagtggctcgcggcgtgaaccttatcggtccgcagcgcgatgacatgaaccttgagttgggcggtattcccgcccgcgagttcgcttcgaacggcgagatgtggacgatggcgttggccttgaaaatggcattgttcgaaatagtgcgtgaccggttgggattgcagccgattgtgattctcgatgatgtgttcgcccagcttgacgacagccggcgcacgcagattcttgatttcgccagaaaacaggatcaggtgctgattaccgtggccgctgaaggcgatgtgcccgactatgaatcggcccatcgcatcgacgtggccgcactggacgaaccagcttccgtgatattgccaactctgggcaatttgtccaattcgcgggaaaatgagagtttgggtgggtatgacgaaaaaaccgcggtggacagcgcgtccgtagaacggaaagtgtcatgaacccgccgatcgcccgccaactcaacctggacgagaccaaactgccggccgaaatattcgagcggctctcccgtcgcggggcgaccttgaaggactacagacgccgccgtgaagaggccatcgaaaacttcggcaaaccggggcgcgatccggctgaactgggcagcgtgatgaccaccatcgccggcaacggcgtctggacggcgaatatgaagcttgcgcaattgcgcaaccattgggaccaagtggtgggtcaggccatcgccagccattcggcagtcgccgatttcactgacggcgtactgaccatccgcgccgaatccacggtctgggccacgcagctgacctaccttatcccccaactcaccgataccatccgtcgcaatctcaaaggattgaccatcaccgagattcgcgtgaccggcccggccgccggatacacacgcaaatgggctcgacggcggtagccaagataccaaacaaattcgcagaagcctcgctatggcgctcgtcgggttagacgagtaaaatcacatgcagtatggtcaaatggctagaagagccctttacgggcctcgtaagccatatcacctccgtgaatgaccttcatgacggaggttgaccctgtagtcacggaaggaagcctgttggcagacgaaaccagcaaagaggagcagctgaaggcggctgcggaacgcatcaacaatgcggaattgaccgaaggcgaacttgacgaatccatggcccccgagcattatgaggcctccgatctgagggtgctcgaaggactcgaggccgtgcgtatccgccccggtatgtacatcggttccaccggcccgcgcggtttgcaccacctggtctatgagatcgtcgataactcggtcgacgaggcgctggccggatacgccagccatatcgaggtcaccattctgccggacaacggcatccgcgtggtggacgatggtcgaggcatcccggtcgatgaggtgcctggcgagggcgtctccggtgtggagaccgtgatgaccaagctgcacgccggcggcaagttcggcggcggcggttatgcagtgtccggcggtctgcacggcgtgggtatctccgtggtcaacgcactctccacccgcgtggacatcgaagtgcgccgtcagggcttccactggacccagacgtacatcgaccagcaccccaccgagcccttgaagcaggacgagccgatgaccgaaggcgagtccaccggtacgtccgtgactttctgggccgacccgaagatcttcgagaccaccatctacgacttcgagacgctgcgttcccgtttccagcagatggccttcctgaacaagggcctcaagatcagcctgaccgacgagcgtgagaatgaccaggccggcgacgaggtggccggcgacgccgcggacgagcccggcgcaaagcaccagaccgtcacctaccagtacctcaacggcatcaaggactatgtcgactacctggtcaaggtgcgcaaggccacgccggtggaagaggacgtcatcagcttcgaggccgaagacctgaagctcggcatctccgccgaactcgccatgcagtggaccaccgcctactccgaggccgtgcacaccttcgcgaacacgatttccaccaccgagggcggcactcacgaggagggcttccgcgccgcgctgacctcgctggtcaaccgttacgcgcgtgacaagggcatcctcaaggacaaggacgagaacctctccggcgacgacgtgcgtgaaggcctgaccgccgtgatctccgtcaagctcaccaacccgcagttcgaaggccagaccaagaccaagctcggcaactccgaggccaagaccttcgtgcagcgcgtgatgaccgacaagctcggcgactggttcgacgcccacccgaacgaggccaagaacatcatccagaaggccattgaggcctcccgcgcccgtctggccgccaagaaagcccgcgagaacacccgccgcaagtccatcttcgagtccgccggcatgcccgacaagctcaaggactgtcagtcgaacaacccagaagagtgcgagctgttcatcgtggagggtgattccgcaggcggctccgccatccagggccgcaacccgatcacgcaggccatcctgccgctgcgaggcaagatcctcaacaccgagcgcgccagcctggaccgcatgatgaagtccgacaccatcgaatcgctgatcaccgcggtcggcggcggctacggcgaggacttcgacatctccaaggtccgctaccacaaggtcatcatcatggccgatgccgatgtggatggtgcgcatatcgccaccctgaacctgacgctgttcttccgctacatgcgcccgatgatcaccgccggctacgtgtacgtggccatgccgccgctgtaccgcctgaagtggaccaagggcccgcacgacttcgtgtacaccgacgccgagcgcgaccgcgtgctcgccgaaggcaaggccaacggacgccagctgcccaagggcgaaggcatccagcgctacaagggtctgggcgagatgaactaccaggagctatgggagactaccatggaccccgagcaccgcattctgaagcaggtgcacatcgaggacgccgccgcggccgacgagaccttctcgatgctgatgggcgatgaggtcgaaccccgccgcctcttcatccagcgcaacgccaagaacgtgcgttggatcgatgcgtaacggaatcctccaacctccctcgtcagagggaggtacacaacggacttagacaactaaaggaacaacagtggcagatgaaaacaacaccggcgacgagcagttcacgccggacggctcgatggagccgttgagcccgcaggaggcggacactaccgactacggcctgatggacaccggcgaacgcatccagcgcaaggacctgcagcaggagatgcgcgagtcctatctggcgtatgccctctccgtgatcgtcgagcgcgccctgccggacgtgcgcgacggtatgaagcccgtgcatcgccgtgtgatctacgcgatgtacgacggcggctaccgccccgatcgcggctacaacaagtgctcccgcgtggtcggcgacgtgatgggtaagtaccacccgcactgcgattccgccatctacgacaccttggtgcgtatggcccagtcctggtcgatgcgcaacatgctcgtcgacggccagggcaacttcggctcccccggcgatgacccggccgccgccatgcgttacaccgaatgccgcatggccccgctggccatggaaatggtgcgcgacatcgacaaggacaccgtcgacttcgtgcccaactacgacggcaagacccaggagccgaccgtgctgccggcccgcttcccgaacctgctcgtcaacggttccgccggcatcgccgtcggcatggccaccaacatcccgccgcataacatgcgcgaggtggcggacggcgtccactgggcgctcgaccacccggacgccagccgcgaggaactgctggaaaacctgatccgcatcatcaagggaccggacttccccaccggcgccaccatcctcggccacaagggcatcgaacaggcctaccgcaccggccgtggcctgatcaccatgcgtgccgtggtcaacactgaggaaatcaacggccgtatgtgcctggtggtcaccgaactgccctaccaggtcaacccggaccgcctagtcgtctccattcgtgaggccgtgcgcgacggcaagatccagggcattgccgacatgcgcgacgagacctccggccgcaccggccagcgcctcgtgctggtcttgaagcgcgacgccgtgccgaaggtggtcctgaacaacctgtacaagcactcccagctgcagcagaccttcggcgccaacatgctggcgctggtcgacggcgtgccgcgcacgctgagcctggacgccttcatccgccactgggtgaaccaccagctcgacgtaatcgcccgccgcaccgcgtacctgaagcgcgaggccgaagagcgcgaccacatcctgcagggctatctcaaggccctcgacatgctggacgaggtcatcgccctcatccgcgcctccgaagacaccgacaccgcccgtacgggccttatggggctgctggacatcgaccaggtgcaggcggacgccattctggccatgcagctgcgcactctgacccgcatgaaccgcgacaagatcgtggccgagcatgaggaattgcagcgcaagatcgccgactacatcgacatcctcgccaagccggaacgccagcgcaagatcatcggcgatgagctcgacgagatcgtggccaagtacggcgacgaccgccgcaccaagatcctgccgttctccggcgagatgaacgtcgaggacctgatcgccgaagagaacgtggtggtcaccgtgacccactccggcttcatcaagcgcaccaaggccgacgaataccgcgcccagcaccgcggcggcaagggcatcaagggcaccaagctgcgcgaggacgacgtggtggatcacttcttcctgacctccacgcacaattggctgctgttcttcacgaacaagggccgcgtctaccgcatcaaggcctacgagctgcccgagggttcgcgcgactccaagggccagcacgtggccaacctgctgcagttcgcgcctgatgagtccatccagaccgtgctgtccatcccgaactacgaggtggccaagtatctggtgctcgccacccgttccggcaaggtcaagaagaccccgctggccgagtacgattccccgcgccagggcggcctgatcgccgtgcgcctcatggccgacgagaacggcgagaacgccgacgagctcatcggcgccgcgctgtgcaacgccgaggacgacatcatcctggtctccaaactcggcatgagcctcaagttccaggccgacgacgagcagctgcgcccgatgggccgccagaccgccggcgtgcagggcatgaagttccgtaacgacgacagcctgctggccatggatgtggtccctggcgactccgacaaggacctgttcgtggtcaccaacgagggcttcgccaagcgcaccgccatcagcgaataccgtctgcagggccgcaatggcctgggtatcaaggccgtgcaactggtcgagggccgtggtgctctggtcggcgcgctcgtggtgtccgaagacgatcaggtcatggccatcatgaagtccggcaaggtgattcgctccaacgtggacgaagtcaagcgcaccgggcgcaacacccagggcgtgacctttgccaagcccgacaagggcgacacgattctctccatcgcccgtaacgaggagaaggacgagcccgaggatggcggcgatgccgcggcgaacggcaccgccgagaccgcacaatccggcgagaatgtgaacaacgcggacgaggcgtgagcagcgtcctgaaaagctggtagcctcgcatacagcagaggctaccgccaagcctgttaaggagaaacgatgagcgagaatctcgaagacaacgagccccggatcataccgccggcagtcggcaatacgcagaacgagcatgtcgagccgctgatcggtactgagcacgctccccgcgtggcacgctccgtgtccagcgatccggaagaatccgcgttgccttcttcaggtgccgccactcccgtgcgtccggcacctcgccgtagcgcccccagggctcgccgcatgagcttgtcgctgacccgcgtggatgcttggtccgtggccaaggtgacgttcatgctgtccatcgccgtggcgattattcaggtcgttgcctccgcgatcgtatgggtgctgcttgatgtggtcggtgtattcagccagattacgcagattgtgtcttccaccggtcttgatgcaggcggtttcgatctcaagaacgtgttgtcccttaccaccgtggtctccggcgtcaccatcttctcgattgttgaagtggtgatcttcaccctgctggccaccattgcggcactgatctacaacgtggtcagctcgctggtcggcggcgtgcacgtcacgctcggcgacgactgatatagctatactggcagaactcccctcagtgaaccgcaccccggttgttggactgaagtaattcagattcgatgatcggaggtgcggtttcttatgtgtggggttcgtaggcgtcgttgctgggccgagacttgggactccggcgacgctgggggtggcaggcgtcggtgttgggacagattttgtatctctgacgacgctgtggagggcttaccgtcgtcagcggtacagatcttggagttctgccgacgctgagggtgcgttctgtgtcgtatgcgtccaattcttggccctctgccgacgctgggcccagcaagcgtcgttgctgggccaagttttggactgccgccgacgcagag

SEQ ID NO: 912 - DNA, 56158 bp, Unknown
  gut microbiota DNA sequence
gaataacggcgaactactcatcaacggcatcgacaaaggcactgccgtacgcgacgtggcttctttgctgggctactccgttgccgacaccatcgccatcggcgactccgacaacgacaccgccatgctcaaggccgccggcatatccgtagccatgggcaacgccatccacggcatccaagccttctgtgacttcaccaccaccgacattcaccaggacggcctggccaacgccttcaagatgttgggactggtgtgaggctatgtcgtttgctctcagacgaaggatcctttcgtgctgtagtattaataaataagttgaatatactgaacggggaaggagggaacgatcttatgccgacgataatgaaagaacggatggaagtcagcattcgtgtcactcctcagcaggcttttgatttcatcaagcagcagatagacaccaatgaaggctttgatgaggatactcgaccagtgcgggtgcatgattcagcttatttgaagcaacttctggagagctgatgagctccgccgtatgtgtcattttcgactgcaatatttatatcgatgtggcagaagccctaggttttgacgcgtcgctagctaatttgcgtaatttcagaactgcaagtaggcctttacaagccgaaatcgatgcttttcaatgcgtgctagcaggaaaatttggtccgtatgatttaaagcttggcagctcgctgcacatcaaagacacggtacagcatgagctaagcagattgccggaatggtcggaatcctcggcgaaatcattcctcgatcaattccatgacaatcttgttgatattatgttgaccggatttatcggagaagaacacgtgccacccttggatcatgaagatggagtggtattcggcacatgccatgaaatcaggaatactccgggcatcgtgcaaacgatccttgtcacacgagataagcagttcgcggattcattcaaagatgtgccttcccatactacggtgcttcatccgattggcttcatgaaactttgcgacgcggcacaacgtatgctgcgccgagcatagagaattgtgaattcaaaatggtttgttcatcatgcgaaaacagtggtcatctgtccgtcgcggttgcgcaatttacggtggcagaggaaccggaacggaatctggagatcatcgacggattcgcgcgtgatgctgcggtgggcgatagggaagccgatctcattactgctgagctgagtcgtgagtgtcttgattccgcgcatcgaacattgccggtgttgcagaatcgccgttttgccgatccgcagttgtgtgactgacctctgaataactttactagcgctgttgataagggttctatgatgggaatcatgaccactactgttgatagctctgattcaatgccggaacgtctgcaagaggggagcgtggcgcccgatttcactctgccggcggttatacctgggtttacagagagcggatcaatcaacctgtctgacgtgctcgaggccggccgcaaggtagtgctgtatttctacccggccgcgatgacgcccggctgcaccaccgaggcttgcgatttccgcgacaatctcgcccgattggcgtcgaaaaacgttacggtgcttggcgtctccaaggactcgcttgacaagctgcgcaagtttgcacagcgcgatcatctcacgttcccgctgctgtctgatcccgacctgaccgtgcacaagctgtacggcgcatacggcgaaaagaagctctacggcaaggtgcacgtaggtgtgatccgttcgacgctcgtcatcaatcctgacggttccgtggttatcgcccgctacaacgtgcgtgccaaggggcatgttgattcgctgttgaaagcgctggataagctggagaagtaattcttctagctgcgaatgttggcagcgaaattctcaaacctttagtctgcttcgccggcgatggtgagaccgtgattccgtagtatttcgatagcgggcatgtagtcgagtgacacagtagtggaatcgagcatcagggcacgtgacgtgggcgatgcgttgtcgctctcgtcagattccgaagccgggaatagcaaatcgacaatcatggcgatgatgtgagtgcgtatgtcgctgtcagtcacggcactggcgttgttgccatcaatatgcagcgcagtgtgcaatgcgttggcgagtggttctaggttgtgcttggttgcttcgtcaatgtcatcaagttgatcgaacaaggcgaacagccatgcgcggcgatctgcttcatcagtggtgtctgcaagcttttcctgcgtgatttgcactaattcgtcgatcggcactgccggcgttgttgtggggtcgcgatgctcgcgattatcttcgatatcgcccataagatgatggatcttgcactcgtcctgcagcacagttgtttcggcgaacgcggtggcgatggcgtccgcatcgatgaacttgccgccctcggactggaagcgcacgcgcttcggttcgctgtagtaatgtgacatgccaaacgtgataaattgcggcatctcgtcctgcagctgtttgaccgccgcggccaccttgcgcatatccccagatgctggtgcaccacgatgaaagcgagcagtaccttggcgtcggcgagagtgagcggctgaccgatgctggctccatgatggtgctcatgatgcgcgaacatgttcttcagcgaatcaaacaatcccataatatcctccttcggactgggcgtaaccggccgacgtgcctcacgttttttgagcgcgtagtgcatagtggtgcctcatcgggaatgagcgcgaacggtaccggtcctgtttggcttgtcttatggaagacgggatcagcatggcgacgaagcggcagatcaccctgagattcagggatgagtacatgaaggcatcgaagaaggacaagggacgcatcctcgacgagatgtgctccgtgttggcaatcggcaggagcaccgcaagacgcaggctcgcggaagccggatgcggcaggccgtcgccgccgcccgaggagcggctgaagcggtattcagagcagtcgcgcgacctgctggtgcgggtgtggctgatgatggatctgccgtgcgcgaagtatttgaaggcgatgctgccgacgtggctgccgatgctgcgcgcgcatggcgagctcgccgactatgacgggttcgcgttcctggagctggagaggatgagctcggccacgatggaccggtacctcgaaaagacgcgggacgccgccaggcccaggggaaccgtgccgacccggcccgcgggcgagctgctgcgcaactccatcgcgatcaggaaggccggcgacgaattggacggcctgcccggcaacgtcgaggccgacaccgtcgcccactgcggtccgagcgccagaggcgagttctgccgcaccctgaccgtcgtcgacatcgcgaccggatggaccgagaacgcctcctgtcgcaacaacgcgttcgtgaacttctccaaggccgaggagacgatcgaggggcggatgccgttccgcatccgcccctacgacacggacaacggcagcgaattcatcaaccgggacctgatcgcatggctacaggagcgcgacatcgagcagacccgctcccgcccctacaggaagaacgaccaggccaccgtcgaatccaggaacaaccacatcgtgcgccgtcacgcgttccactaccggtacacggtcgacgagctcggccttctcaacgagctatgggagttggtgcgcatcaaggccaacctgttcaccccgtccaagaagcccgtcggccgggcctgcacccgcgacgggcggccgcggcgcgtctacgacgagccgcgcaccccgtgggagaggctcaaggagttcgacgagaaggaccgggccgcgggaggaccgggattcatcctgcccggcaaacgcgaggagatcgaacggatcatcgccacgacgaaccccgcggagctcgtccggcgcatccacgccatacaggaccgactcgaagccctggccgcgccacgcactgcacagctcgccagacgcgccggcccggacatggcatacttgaacaagacgctcgcccggatcgcgggcgtcgaaccggaagacgacgaaacccggcaggccgacgaggactaggatttcgcgctcacccccggtgaggcaccactccggattacgcgctcactttcaaatgaggcacctcgaggcaaggcgacgaaggtgagtttgacatcagaacgtgccgagtgagccgcttgcacttatatgcgaacacactgatgaaatctgcgaatagaacctatattttgtccttaaactccaatactcggttggttctcggttgcaaatactcaataccgtatcttctctaaaatttccgataatgtgaccccaaaaaactttgtctcacgaattaattgtctcccttatactcagaataagtttcgagccttttgcgaccttactatttccccccatatcacggtataaattatagacctgatccagtgcagattgaatctgctcatcttcgatagcagaaaaatcaatattcatgaaatctgcaaaagtaatatctgttttctggcagattgaagcaacaagaaaataaagtacataaaataatatatcattttgatctcctcttggcaaatcagagcccttgataaagcgttctacccttttgcctaattcggcacttctccaataaacttgtataccaatatcatttgaatatagtgcctcgtagtgattatcatcgtttaataatgtcgacggcctagccctcgccgtattgggagcggatttaaagatcgacataaggcattgtcctaaaaaggcaacactaacaatttcagaaggacgtttaccctgattgcggtagtaattcttgcggcgatcatagtatagaccatgatacttaagacacatttctatgttgcgatgaattgcgtcagtggttctcagtgctacagctggaatactagtctgactatttgttgcaagtattattttatcccgcgaagactcactttcggcgacaatcactctgactagaatattacgatattccatatccaatttatctggattattcttaaaaaatgaaaaaatttcattagatgtttgaagtccattaacaatttccggatcagtaatcaatagtcgctttgatgtttcttgaatcgcgtcagaagcaataatggtgactccattgttgagccaccagaaatcatctttatcatttgccgacaatgtatgttgtattgccttgttcacattgttgtatccttgataatcacgtacatttgattcaaaaattgatttccgaatatttccattatcgtcagaaataaacttataatacgtgtttagctttacgagagcgacataatcttttcgctcgcctaatgcaattggaatatccgccagaggaagactcagcttcattgttggggcggaattcactaaggtcataagttccttagcgcctatatgccgcacatggacttcctcttcaggaaaaagcttctgtatttcttcttttagttcggcttcctgggcgagtacattaggatgtacttcctcacctaaagagacatacacgaattcaaatgaaattgaaacggttttacccataaggtcctgacgcagtctgcgaaacatcgcgaaaaaatctattaacctcgaatcatatcgatctctgaaattgaaaagctctttatcaaaatctaaaacattggaagcaagagtcttccatttcataattacattttcattgaatgaaagttcatttttagcttgaataatcactactcgcaattgcgcttcgcgtgaacggtcggccacactcttaatctcatcctcatgtaccaattccgaattacagaatagataggcgccatcacatccgccatccccactgcgtcccatcagccctagattgatatcgtcagcgctgagttcatcttccttaagagttttatcagcagcgaagaattcaaaataatcggaaactcgagtgtagtcggatctattaaactctcgttcgataaatcccctcagcagcgattgattgttacttaatttttttgtcatgcttaatacctactttctagtctggcgtcgattttacttcttgtgcatctatccatcaagctgttcgatgttcatgaccgtgtttgttcttccggaaaaaagggaggtaagacaggaagcgactggagaccgcttattatgtccagaagcttctaaatcatttctcgctgcatcatcaggacaacgaacacagtcaaagtgtcaaagtcgctgtgtttgcttaccaagtgtgttgagcggctatgctgatgttcgtagcatgcatggcaatgtttgaacacacgtacgcacaggcgtggtgcggtgttatcgtgtgccgtgtcatgtagagcgtttgcggttgctggcgatgatgtgggtctgtgtgacggtagagtctttgccatctcttatgcagtcgtcctgtgcgttctgcctcaatgtctgttcgatgggctcgacagtattttttccgcagtgtaggctggtttttcctggtttccgatatgattatcgggggaaagcataggctcgcatgtctgtatattcttccaagtcgcaattcgaattggatttaggctggttgccgcttgccgaggctcaggagaggaaggaataatgatacccaccgtgcaggctatcaggagactcgacctgccggggctgtagcgagcggagatagtgtgtcatctgcatgtggaccgaggggcggccaaagttatgcggatatggaggatcgctcgccaagtccgaaaaaaggaattgcaagcaggtaatcgaccataacgcaataggttagggccgcatccgaaagccgttcgtccacgatgagcttctcataagcgggattgcgccagccgctgtgacgctgcgtgccgcctttggtggtcatttccggctggtacttgatgcggtcgatgatgttccgggcacaatctctggccagcccatcagccacgtcatgccattcgtctgcgctaagaccgccgtagatgcgtaacagattgcgtagtttactcacgtaatgggtatcggatctgtcgttgcaggaaagaatgtagtaccgatacacgttggcgagcaggccaacgtcattgagtccctcggcgcagcattccatgatggtatgccatccatggggcagcaggtccggcagcagaccgttatgccgggcatcgatatcgacatcttccatatcccggctcgacagaaggaaaccttgtgcgagcatgtatgcggaacgcaagtgcccttcatgaatcatgttcgcagcgttcatcagtgtgagggccattgactccgagtattcgctcagaagctgctcgcgtccagcgtcatcgtcggacagaacatacagatcgtaggcgttcattagcgtgaacagttgcaatacgtgcaacgattcatccgaaatgaagtcggtttcgtcgtctacttcgctcgtgtcctcgttatcctcatcctcgtcgtcctcgtcgctttcttcgctctcttcgttgaacgagtattccagattacgcgttatcgcgttgtcgatcacgtcataggcccacatgcgtttgtcgtcatattgggcgaaagcgagcgcgctggaaatcagcaacatactgttcaatggttcgtattgccgcatgtctttgtcgttcgcggcctgcgcaatggtgttcaatgccttgccggcggtaggggagtcggcgaattccgccacattctccatatagcatcgcacgcgcatcgccagatcatccataatcgtgagcaaaggttcggagccatcgtcgttctcggacgagagcagaagcgcgtggacttcgtgtatgcacagtcgcaggttgccgcatgcgctcgcgtaatcactggattgcagggcattgcccgcgatagcctgcacggttttgatgaattctgtgtagtcacaggatttgctgtacgcatcgctgtgcttactgatatgaataatgaaacgttcatggcatcggcggattgtgtcggagagcatggtttgtgcgtcgatcagcgggattagcggtcgttcttcgtctggctgggcgcggaaagtctttgcggctttgcgcagctgggcggaccacaggaacagcagatggcctttgccttgctctgcgcgcgcgtcgaggtgttgctggatgggatccagcacggtgcgggggagtacgatgacgccatcgtgagcgttggcggtgtcatcattgtggtgattgccgtgcgcgccaatgagctgtttgcgcagttcgtaaagcacggcacctatatgcttgcaatatggtgttctctgatacgggcaggtgcacgcggcggattgtatgcgaatcgaattgtcgtcgattgtggattcgtggtcggtgttactgctggtagtggcttggtcatcagtgtttgcttcattggtgttctcgccgtgagcgtctttgctgaggcggatgtcaacgtcgtaatagtcatcgtcgctgccggccacccgcgagtgatacagctgcggcgcaatctcctgcaccgaactcactcggcctgattcccagtaatcggtggcgcgttcgagaatcagcggcgtgccttcgaacatgacttcgaattgagccaacgctggcttttgcggaacaaccatactgctgattgtagcgggtggagtgttactcgccgcttggcggtgcatactggtctgatgtagtcttgtttccactgggtaatcgcattcggggaagaggcgtcaatggctgtacttacagatgctgaagctcgtcgtatgctggaactgctgaaggaagctttgtctccgaagtccatcaccctgaataaaggcgagaagcaattccaattgcatcagataagtttgtagtcaaatgaatcgtggtgtttacgacgagaagaaagtatgacgagttctgattttgactcattaattcgaagctacggaaaatggctgtctgataacacgacttatacgcaactggatgagtggtatgaagttaatgttccgcttctggatgaagacaacgactatacgcagttctatgtgaagcccgggaagaacagcgtaacgttctctgatgactgtgccacaagtcgcatgggatgactgtgacggaatcacgtttggcagtgctcaaagatattctgaatcagtttggtattgaacgtaacggcgacgagcttactctgacgagcgatactgctgattttgctgatgccaagaatcggttcctgcaagctatcatcaaagttggtgatatgtctatgctggccaatcccatgtgcagacgtattttgcagatgacattcgtatgttctttaatgcgaacaacatacggtatgtggaagacgttcaattccgtggcaagtctggtttgctgtgcccgtatgactttgtgttgccgttcacgagtaaacagccggaacgattctgcacatctattacgcggccttcccagcgactcatttccagtaccttattttcatgggaggatacgcaggcggcacgaaagacaccaagtgaactggttgttgttttcctcaatgattcggatcggcgcattgacaatcagctaataaccgctttggaaaagtacaatgcgtatcccattaagtggagtgagcgggaatttaaggagaacttgtacaagcttgcttcgtgagtggtgtttgtggctttggtcgggagcgaggtttctgctgtttgccgtgtcgacctcccctcagtcgcctacggcgacagctcccctcggggaggggagttgaggaagcgcttaacgagcatagggcttcagccgttccctatacgcccgaatcgcgccgaacgaatacaccgcgatcgcgacccaaatcaccatgaacgccgcatagccctgcgcgcgcatcggctcgtgcagcaggagcacggccacacagaactggatcagagggttgagatattggatgaaactcacggtcaggtaatggctgtgctgcacgccgtaggagaacgtggccagcggaatcgcggtggccaggccggagaacgccaccaacagcgcgaccacggccgccaacgtggcgaccaaacgatacgcgagcacgctgatggcattcatactggacagcgtgcgccagtacagcggcagcacgccccagccgatattggacacgagcggcgcggctatccccattcgcgtctgctcgacggtacgaaccaaagtcgcatctccccaccatagcgactgatcacatgagtgtcccgcacctggtcacatggcatattggacttgctgatgatgaacagtaccggttattgttagagtctttcccgcaggacacggagattgaacagatgattcggccttttctgagggcgcgaatcagattcgtaatgcagtggtttgccctggactctgttacggtgataataacttcatcgttgataagggagtcttcatggcaggcaatggcaacacggcatttcgtttccgagtcactttgcgccttgacgggcacgaatgctggagggagattctggtgccggcatcattgacgttcttcgatttgcatgcggtattgcaggaatgctttatgtggtacggcgagcatctgttctgcttctgcgccacattcccggatgggaagcaggtgcaagtggaagaattgtggggagaagagccctcataccatgaggcgaaatacgaacaatatatgccggtggagccgttgccggaagttcgcgttgcttcggaaaccgagctgggcgacgtgtttcccaaggtgcgtaccgctcgctattactacgattatggtgacgattggatccatgatattaagctgctgcgtacctaccgcagcgtgcacgttgcggatcctcagctttgggatggggctggggatgcgcctccggaggatgtcggcggggtgtatgggttcgagcggttccttgataccttgggcaatcccgaagatgaagaacatgatggcatggttgagtgggccgaggaccagatgtgggatcgtttcacgctgaaccgccatcgtgagcgtctgttccgttggcacaagcaccgtgacatgatgttgcatgggtgatgctgaacagatgatagccgaactgcattaggctactacgtcccacaccgtaatgtatgaccaatcattaggaggcccgtcatgactgctcatttcgacgagttcgaagaggagatgacctcccgcagcctggagcgagcatatgattacgtggacgagcataggatcggtgggttagaggaagtgtcggccggactattccacgccgaagtgcacggttctgaactctacgatgtcgatattcgacttcgtggcaacgatatcgtgttcgcatcctgcacctgcccctacgactatgacggatactgcaagcatattggtgcggtgctcttgacgttgcgtgattacaaacacggcggtaatcatcagcagaacgtgacatacgatgcgatgattgcaaagcaggacgactctcggccagacatacccgtagcagcaaatcctctcgcatcgaaacctgaagtgttcaatcgagtgctgcaacatattcgagaacgagtgggactgcgcaaatcagaacggtggacgcccgctcagcatttctatctgatttggaatcaggacgaaatcaatgccatcatgactgcgaatccggcaatcgcgagcggcatggaaccattgatgcccgaaagcgccgtggatcgcgtcatggaatctcccatgcggcgacatctcggcaaggactacggctggaaattcgaatggggagatgccgccataaacggcgtgatggccgtattcgaggaagcagaacaatcgaacgactatccgctggccatgagacgcatgtgcgcggctttgcgaaaaacagtgtggttcgcgagacaagtcgatgatgaagagggtgcgctacagacatatatcgaacacctcaatgagcggatcctcgcttatacgtatgccgcggcaccaatcgttacaggcgagcaagcgcagcagatgctgattgcagcgttgggattcatacgtgatacccctatgatcgagatgctgttttggccgcacacgccgctggaatgcgtcatcccattcgcggatattcacgcacgaggtacggcggacatagaacagatggagcatcagccccgcgagatcggcacgacctcgttcatgtgccgcacctatgcgcagtccacattgaatgttgcccaacaattccttcatgacaagaagggggattccattgacggccatcgaacgagcctgaccgattacgattggcgagctgcacaggactatctgctaaaactccatcatgactttctgctgtacggcggcgacgcaattagtgccgatgagctactgtccaaaaacacggacgtggccgaatgcagatttgccgtcatcgcacgtaaattcctggacggggattatgcctgggccgccgctttcttggaacagacttacgattgggatgccgcgcaaaagcatgcggggtattgggagctcaccgctcaactgccgcatggcgagcttaccatgctggaggcctgctatgaacgactgaacgatgagaacggcatcaaacaattatatgagtactacgtcgctcacagtgattcagtggcggacgaacgttgcattcccatcctcaaatcgatggtcggcaaatcgggctggcctcaaagcgttcagaacatcctgcgcaactatcatgagcatgatttcggtgggaaagtccttgcacgactcatgactgaagagcgcctatccgatgaggccttgaccttagccgggcagcggccggaactcctgcgtgatttgctcaagcccatcagcctcaatcacagcgcggaagcagaacgactgatcagaaagcagctgccgctggatcgcgatctgcaacagggaaatcgcgacgaataccgattcgttgccatgtggatcgagcaatatcgcaacgttttcggactcgaccaagccaaggctctcgccaaggagatcatggcaaagtacccgagacggtatgcactcaaagaggaaatcggccgcgtgctaaagtaacttactgatgccaaaacattctagcactactccgacgatgcccgccaccgcggccacaagaatgcacgcaataccgaatatgcgcagcgcgccgcctttgacctgcgcattcgggcggaagaaaatacaccaccaaatcagatacagcgaatgaccccacatcagctgccgcgaacggctaaatctgccgagttcactgatttcgccggccctattaagtccctcaactccctcaatcgccttctgacccatcacatcacgctttcatacacattgccgattgacagtcctagaacacagtctagaactgtcatggcatgttcacgcagataggggctccaacaaaattggctaaaagagaactcggcaacctataacaaggacgcgcccgtgtgcccttacgttcagctccgctcacgaatgaaatcgaagatcacgtcgaagacctgctggctccagaaatcgtactcatgttcggcgccgtcgactagcaccagctgcgcgtccacgccgtgctcgaccagttggtcgcgcatcttgacggattgatgataggggaccacggtgtcggcggtaccgtgcaacaggagcatcggcggatactgctgatcatcccgcacctgcaggtagggactcatatcagccgcacgctgacggacctcggcattgatgccggtctcatgggtcgcacccaccacggccgcgaacgggccgaaataatacagccggaatggattggtctcatcgtcgaatgcgtcgacagcttcaagcatgtcagtgggcgggaagcagctgaccacgtacttcaccgcatcgctttcatcggcattggtgccatcctcatacctcggatcgtcggcggtcaaccccaccagcagcgacgtgttgccgccggacgacgtgccccagataccgagacggtcggggtccacgtgccattgacgtgcgtttgccctgagatagcggatggctgctttgacgtcctcgagatatgcggggaacatgtcgtgggggtcgctcgaggcatcgcgatgattcaccgtagccaccacaaagccttcgcgggccaaagccgagagctgcgggatctcgtagtcgcgatgcggcgtggtccaggcgctgccttgcacgaataccacggtggggtagcggcggtcatcgtcatcgccggtggattgtggtgagatgatatccatcaccaggttatcggccccggttttgtacgccacgttgcgggtcagcgtggccaacccggtaagcgtgggattgtgcgggatatggacgacattgtttgcgccggcgttggcatcactgactttggctgaatcggtagtgttcatggaattcccctagctctgttgctataggggtcatcatacaagaaataggcatgatcacggcacaacgatgtctcgatcacagcgaagacatgaagacgcgaagacgcgaagacgcgcccggcagcgcgcgctgcctgcctgcgagttgccttcaagtgcacttcaagcgataaggtggcataagccgcggcaatggagattgctgcccggcaacgaggcggacagtgcccgttcgccgattcacgataacagaaatgagacactatgaagactcaggaaatcggacaatccggcatgattgcgtcacgagtggcgctgggtgtgatgcgcatggacgcgctggatgccgccgatgcggcacgtaccgtggccgtggcccatgattctggcatcgactatttcgacacggcggacatctatggattccatgatcatgccgcgcacgccagttcgaagcgtttcggccaagcgtggaaggacgcaggactcgaccgcagcaccatcttcatccaaaccaagttcggcatcgactacagtttcggcgaaaacgatggcggcgccaacggatatgacttcagcgccaagcatctgattgacgcactcgatcacgagcttgaggctttgcagacggattacgtcgacgccgtgctgctgcaccgtattgacacgctgtttgagttgaacgaggtcgtcgaagcattcgacgcgttggaatcaagtggcaaagtgcgtcatttcggagtcagcaatatgggcccgtggcagatcgaactgttgcaaagcggccttcgtcagaaattggaaatcaaccaactgcagttcggcctgatgcatacgcagatgctcgacgctgaaatccaattcaatatggcgagcgatcccgcagccgatcgcaccggtggcatcctgccttattcacggctgaagcatatgaccattcaggcatggtgcccattccaatccggcacggaatacggtccgttcgtcggcaacgagcatttccccgagctgaacgccgaattgacccgtcttgccggcaaatacggttccacgcccaacggcattgccgtcgcttggattctgcgtcatcccgccggtatccagccgttgctcggctcaatgacaccggagcgcatccgccagatggcggccggtgccgatatcgaactcgaacgccgtgactggtggtcgctgtatcaggcagccggcaatccgttggtgtgagcgagagatgacgagaccactgccgttgaggcgcgtgttcagcgtgcatacatctcaacggcagtcaatgctgtgccaatccacccacgacgagaacaatgacacgaacattccgcgaatcacatcagaacgatggcatatcgagcgagggaactgaatcatcggccttactggtcccgttcgcgggcgagccgacatcgtgattgcggaaccactcgacaacccgtgtttcactcaccggcatcaaatcccaagcatccaagccaacattcagtgcctccgggcgtgcaccaccgagtccctcaatctcaaccgtatcgtgcggctccaaactttcgaacaggttaagtgcggggcggtcttccagccaccagtcgtgaaatacctcatgacagtcgccttcccttttcggcgtgcagcaatcatttcccatcctaggcgcagacggcacctgtcggttcgcgttgccataatgaggcgcattgcaggggaacccgtgaacgcaagctgctggccatcgtggcggcgaacgggttgagaaaggcgctgtgcctgacccttggaacctgttggccaacaccatcgaagggagcaaacgatgtcttttgacgccgccgcattcggcccgatcaccctgaaccacctgccgccgttcgcccagcgcctacgacatgcagtacacgtggaaacccgaatgggacgtgtgaggcgcacgatggatgagcggtgggcgcgtgctttgcgcgccaaaggcattgatattgacgaggctgacggtgctggtgggaaacgggcacacgacgacaaacggcataccaacatcacgggtactggtcgacgccccgagtcccagccggttgccgggctccgcggtcgatccaataccagtacgaatctgccggggccgaaggtgacggcacgcgccacgccattcaaggccaccggtcataagggcggcatcagccggcaggggaattgatctgatcgcagaaccatcgcgcgatgaatgggcgtggtcaacgccattccgccattgttgagccgcttctacttggaccggtacctctttgaacggagatattccatattgaagctattccagcatcatatggcacgtaggaaatcccggatatcggcgatttcctcatcacagatggcatgggccatgccggaatactcgcgataggtcagatgtccggcccgttcaaggacctgatgggccgtttgctggtcgggcagcggaatcgtgcggtcctgcgcgccatacgccaggaagaatcgggtaggggagtcaagcgccgcctgttcctcgcccatgaacgaaggactgagcaggatcgcggcatcgaacaacgtcggatgcaccttgaccagacgatacgacagataaccgccttgggagaaaccgatcaatatcttcctgcgatgggcgaatgccgaggcgtccagcagtgaagccaccgcatccccgaccgccgcgcattcgcgttggcgctcgtccacgccgcagccgtcgggataccagtaattgccgcccatatagggcctcgcgtaggtggcgcggaacgagatatagctgggtacggcggcaattgcggccggggccgcatcggctcgcgtcggcgcatatacggcgtcgagaatccgcatcatctcgctttcgtcgttgccgtaaccgtggaacatcaggaaaatggggtcattgccgccggcatcgatctggcttgtcatctgcattcgcatcgtcatcacctcaccagcgagcttacatgcattagacttgtagcgattgacccaccgagcacgcaaggagcaagttatggagccgaggcgcgggcctctcaccgcaggcgagaaagtgcagttcaccgaccgcaagggcaagaagatcaccgatcagcttgtggccggcggctccacgcagaccgagcatggcctgattctgcatgacgatgtgattggcaagaccgaaggcaccgtaatcctcaccgtgcatgccaagcgcgaggcacaggtcaatcaggtctaccccgagaaagacaagaacaagccgtggaaatcgtcgcgcgccatcggcggctgggagtatgcggtgatgcgcccgcgactggccgattatgtgctttcgatgccgcgcggcgcgcagatcatgtatccgaaggacatcgcccaagttattcagctcggcgacatccgctccggcatgcgcgtgcttgagtccggtgccggctcgggcgcgatgagcgtgaacctgctggacgccgtgggcgagcgcggccacctgaccacgatcgagctgcgccccgaattcgccaaggtcgcccaagccaatgccacgctgtactatggcgaggcccccagctggtgggatctcaaaaccggcgacttcgattccgttgccgccgaactgcccgaacactggttcgaccgcatcatgctcgacatgctcgacccgtggaacaggctcgagcaggcataccgcgtgattgcccccggcggcgtgttggtcagttacgtaactaccaccacgcagatgagccgcatggccgaagccctgcgcgcggccggctgctggaccgagccgcagatccaggaatcgttcgaacgcacatggaaggcccagggcctcgccgtacgccccgaccaccagatgatcggtcataccggtttccttgttatctcgcgcgccatggcctccgggttcgaggcgctcagaaagcgcgatcgcgtgaccaaggacacacagaccgacatcgactcgctcaccgacgaacagcgtgaagcgcagatcgaggaactggaactgcgcgacatctccgaccacaaactacgtaaggtgttgcgcgacctcgaccgtcaggtgggagaacttggcaatacgcacgaataaccgccaaacgatgagtttgtgaacgctcacacacctctatactggaagcaataccacaccgccacaccgccacaccgggcagacggttcgtgaagggagccacggatgggcatcaagctgagtaaagtcgccaaagcggcgaagaaatacgaccatattctcatcatcatgaggcatgccaaggctgagccgttcggcgacaagggtgactcggagcgcgagctcaccgacaaaggtctgaaacaggcgaaggccgtgggcaagggcatcgagtcgttgggactggtgcccgaccaaatctcctgctcgtccgttacccgcacgcgccagacgttggaccgcatgctcaagacctttggcgacaagccaatcgtcgactaccgcatcagcctgtatgacgggggagtgcaggcggtgttcgacgagctcgcccacgtcaaggccaagaatcgcgtgttcatgatcgtgggccacgagccgactgtgtcgatcagcgcccaatggctcgcctccgccgactccgacggcgaacgactcgacctgctgaatttgggactttcgcccgcatccatcgtgatcatgggatcgaacaaaccgttcgacgaatggcaggtgcacagcggcgaactgctcgcggtcatcaatgtgaaagacttcgactaaagcggatataaattccatctataacgacactctgcggccatttataagggccggaatccggatgttttgctaccctaagtcgggttacgaacgcatacattggaggattcatgtccactctgacttccgtctccggcttcccccgcatcgggcagaaccgcgaactgaagaagatcatcgaaggctactggaagggtgccaacgacctcgccgccgtcaaggccaccgccgccgaactgcgcgccaagcactggaagctgcagcaggccgccggcatcgacctcattcccagcaacgacttcagctactacgatcagatgctggacaccgccatccttctcaacgtgattccgcagcgttacgcacgtctctccttcgacaaccaggaggacacgctcttcgccatggcccgcggctaccagggcgacaagggcgacgtgaccgccctgccgatgaagaagtggttcaccaccaactaccactatctggtgcccgaagtcgagtcggccgcggagatcaagctcaactccaccaagccgttcgacgagttcaacgaggccaaggcgctgggcatcgacaccaagcccgtgttcatcggcccgtacacgttcctgaagctcgcccgtaccccggaagccaccgaactcgagctcgacaagggcctggtcaacgccgtggccgccgtctacgtcgaagtgctcgccaagttcaacgagctcggcgccgcatgggtccagctcgacgagccgtacctcgtgctcgacaaggagccgggcgacgttgaactcttcaagaccctgtacaccaagatcctgtccgccaagggcaatgtcaaggtgctgctcaacacctacttcggccacatcgccgacgtgtacgagaccgtcaacctgctcggcttcgacggcatcggcctggacctcaacgaaggtcgcgaggagaacctcgaagccgtcgccaagtatggcgtggcctccaacaccaccatcttcgccggcgtgatcaacggccgcaacatctggcgcaacaactacgccacctccctcggcctggtcgacgccctgaagcaggtcaccgccaacgtggccgtctccaccgcatcctccctgctgcacgtgccgttcagcaccgaaggcgagaccggcatcccggccgaagacctcaagcacttcgcgttcgccgtccagaagctcgacgagctcaaggaagtcgccgccctggccgacgccaccgaggacgagaagaaggcatccgccgccctcgccgccaaccaggctctgttcgacggcacccgcgtggccgccgacccggccgtcgccgagcgcatcggcaagctgtccgacgccgactacgtgcgtcagcctgcccgcgaggagcgtcaggccctgcagcgcgaggccctcggcctgccgctgctgccgaccaccaccatcggctccttcccccagaccaaggagattcgcgccgagcgtgccaagctgcgcaagggcgaggtcaccaaggaagcctacgacgagttcatcaaagcccagatcgacgccgtcatcaagaagcaggaggagatcggcctcgacgtgctggtccacggcgagttcgagcgtaacgacatggtcgaatatttcggccagaacctcaacggcttcctgttcaccaagaacgcttgggtccagtcctacggcacccgttgcgtcaagcccccgatcgtctggggcgacgtttcccgcgccaacccgattaccgtggaatggtccgcgtacgcccagtccaagaccgaccatgtgatgaagggcatgctcaccggcccggtgaccatcctcaactggtcctggccgcgcgaggacatcacccacgaggagcagaccaagcagctcgccctcgccatccgcgacgaagtgctcgatctcgaggccgccggtatcaaggtcatccagatcgatgaggccgccctgcgtgagaagctgccgctgcgcaagtccgactggcacgtcaagtacctcgactgggccgttccggccttccgtctggtgcactccgccgtcaagccgaccacccagatccacacccacatgtgctactccgagttcaacgacatcatccgcgacatcgacgcgatggatgccgacgtgatctccttcgaagcctcccgtggcgatctggtggtgctcgacgccattcatgacgcgcacttcgagaccgaggccggcccgggcgtctacgacattcactccccgcgtattccttccgagaaggagatcgaggatcgtatctacgagatccttgacaagatggacgtcaagaaggtgtggatcaaccctgactgcggtctgaagacccgtggtaacgccgagacctggccgagcctggagaacctggtcgccgccgccaaggccgtgcgcgccaagctcgacaagtagcggaaatcaccgagctccctctggatgagggagctcgggtttatgtaaggaaatcagcatgcattccccgatgttcacccttgaggtctttcccccgaagcgcaacgcgcctgtcggcaccatctacgacaccctcgacggactcgaagggctgaaccccgacttcatctccgtgacctacggtcacggcacccattccgaccgcaccgccaccgcgcgcatcgcccacacgatcagcaaggaatacggcatccctgcagtcgcccacttgaccgcgctctactccgacaaggccaagatcgatgaggctctcgacatgttcgaggaagccggcgtgagcgccgtgctcgcgctgcgcggcgactacatcgacggcgagcagctggtcggcgagttcaaccacgccagcgacctcgtgtcatacatccgctccgtgaagccggacttcaaggtgtttggtgcttgctacccggaaggccactatcaggctgactcgctggaccaggacatcgaaaacctcaaaatcaaggttgatgccggcgtcactcacctgatttcccagctcttctacgacaatgaggacttctaccgcttcctcgacaaggcgcgcgccgccggcatcaccgtgccgatcgaggcgggcatcatgccggtgcgtggagccaagtccgtgcgtcgcatggccgagcgcaacgcctcgcgcatcccggacaggctcaacaccctgctgaacaagtggggggacgacatccagtccctgcgtgccgccggcatcctctacgcttccgagcagatcgccgacctcgtggcccacgacgtggacggcgtccacctgtattcgatgaaccaccccgccaccacgcgccgtatctggcgcaatgcggaaccgttgttccgcggtacgcaaggttgacgcatatcgcggcgcggcgcatctcaatgcgtcgcgccgcacgttaatctgctggcgaaacccagagttctcccagcggccgatgggtatcatgaacgtgcaagccaaccaaagcgatggaagggagtccgttatgtgcactggtgtccgtttctccgatgatgagggcaacacctatttcggccgtaatctcgactggagtttctcatatggggagaccatcctggttactccgcgcggctaccactatgacacggtgtttggtgcgggcggcaaggcgaagccgaacgcggtgatcggcgtgggtgtggtcatggccgataggccgatgtatttcgactgcgccaatgaacatggtctggccatcgccggcttgaatttccccggctacgcctcgttcgtccacgaaccggtcgaaggcacggaaaacgtcgccacgttcgaatttccgctgtgggtggcgcgtaatttcgactccgtcgacgaggtcgaggaggcgctcaggaacgtgacgctcgtctcccagatcgtgccgggacagcaggagtctctgctgcactggttcatcggcgacggcaagcgcagcatcgtcgtcgagcagatggccgatggcatgcacgtgcatcatgatgacgtcgatgtgctgaccaatcagccgacgttcgacttccatatggaaaacctgcgcaactacatgtgcgtcagcaacgagatggccgaaccgacttcatggggcaaggcctccttgaccgcctggggtgcgggtgtgggcatgcatggcatcccgggcgacgtgagttccccgtcgcgcttcgttcgtgtggcctacaccaacgcgcattacccgcagcagaacgatgaagccgccaatgtgtcgcgcctgttccacaccctcggctccgtgcagatggtggacggcatggcgaagatgggcgacggccagttcgaacgcacgctgttcaccagcggatattcgtccaagaccaacacctattacatgaacacctatgatgaccccgccatccgttcctacgccatggccgattacgatatggattcctcggagctcatcagcgtcgcccgatgactccttcccggctcatgccccattcggagggcatgagcgtatatagtggaatcttatggaatcgtcgatcttcaaacccagctccatggacctcatcagggcaggtctgcaagacctcgacaaggcccgcgccttgttcgaccagctcaaggcggacgacattcccgatgagcgatgcgccgaactgctgagcgcgctggcccacgcctgcgaccccgatatggcattgagcaatttcgtggatatcgtcaacgcgatgcaatccagccagcgcgatctggaacacgtcatccccgacaacgacgccctgaagcgtctggtcacggtgctcggcgtctccgacgcgatgggcaagttcatgcgcttcaagccgcagcttgtggaggcggcagcagtcgacaactgcaacagccatctgttcaatcacgcgcaacgccgtgcacgtctgctcaaggcggtcggcgcggacccggacgaaccggccatgcccgtcgcctccaaggatctggccgaagcggccacggccctgcgttccagctaccggaaccaactggccgccatcatcgcccaggatgccgtggcggacgacccgacctccatccaaccgaccatcagccgcgaactgtccgacctcgcggacgcggcgctcgaaggcgcgctggccatcgcccgccacgaaaccgagggcagcgagcacgtgcgcttcaccatcatcggcatgggcaaactcggcgcacaggaactgaactacgtctccgacgtggacctcatctacgtggtcgaaccggccgacaaggatgtggaccatcagacgctgattcgcgtgggcaccaagatgggcaccatgttacagcgcgtctgccagtccgccatcatgggcgtggccgagcagccgctgtggcagatcgacggcggcctgcgcccggaaggcaaggacggcgcgctggtgcgcgtgctctcctcgcacaagaactattacgagcagtgggccgagaattgggagttccaagcgctgctcaaggcccgcccggtggccggcgaccccgacctcggtcaggcctacatggacatgacccggccgttcgtgtggagcgcatccaagcgcaagaacttcgtctacgactgccagaaaatgcgcaagcgcgtggaggatttgattcccgcgcccctgaaggaccgcgagattaagctcggccgcggcggtctgcgcgatgtggaattcaccgtgcagatgctccagctcgtacacggccgcaccgacgaatcgctgcgcaccagcaacacgctcgactcgctgcagcgcctgtccgaaggcggctatgtctcgcgcaagcaggccgtgcgcatgtcccaggactaccgcttcgagcgcgtgatggaacatcgccagcagatctggtccctgaagcgcacgcacctgttcccggacctcggccgggcctcggtcggaggcctcgaaaagaagcgcgacatcgacgtggacgagctcaaccagaaccaggagctgcgccgactcgcccgcgcattcggcctgcacccggaagaactcgtcgacaagtacgacgacacccgccgcgaagtacgccacctgcacctcgacatctactatcgcccgatgctgccggtcaacgcccagatggagaacgaccagatcgtcctgagcgtcgaggcagcacaggaacgattcgaatccatcggtttcggcgacccggacgccgccatccgccacgtgcaggcgctcaccgccggcgtggggcgcgcggccaaaatcaaccgcatcattctgcccgccgtcttgcagtggctgggcgagggccagaacccggacatgggcctgctcaactggcgcaaactggaggagaacttcggcaccgaatccggctacctcggcttcctgcgcgactccacctccgccgcccagcgcctgtgccacatcctgtccaactcacgattcctgggcgacgcgctcaacaagtcggtcgaatcgatcagctggcttggcgacgacgacaatctgcaggcccgcacgcgcgaggccttggacgtgcagaccggctcggcgctggaacgtttcggctcgaacatcaacgagttcgccacctccatgcgcgccatgcgccgccacgaaatcgaacgcatcggcctgtcttggatgagcggtgtgatcagcgactccgacagtctcaaggccatgaccgacgtgtatgacgcgatcatcgatgcctccctgacctgggccgtgcgccaccagatcgccgagttcggcgtcgaaaccgcgccggccggcatcaccgtcatcgccatgggccgttacggcgggcgcgaagtgaacttcagctccgatgcggatgccattctcatctaccgtccggccgacgatgccgacgacggccaagccaacgccttcgccaagaaggtcgtggaagacctgcgcaacatcctgcaaggaccgacgacgctggaacccaagatcgaactcgacctggacctgcgcccggaaggcaagaacggcccgctcgtgcgctcctatgcctcctgcgaggaatactacgaatcctgggcttcgacctgggagcgccaggcgctgctgcgcgcccggtacgcggccggcgacgctgaactggcgcgggacttcctgatcaacatcgccgacccgctgcgctacccgaccacggaactgactgaagcagaattgcagaacatccgcaagctcaaggcccgcatggaagccgagcgtctgccgcgcggcgtgcgccgtgaacggcatctgaagctcggcaagggcggcttgtctgacgtggaatggaccgtgcaactcatgcagctccagcacgccggcgatatcaaagatctgcgcgtcaacggcacgctggaggcattggacgtgctggaagccaagaagctcatcagcgctatcgacgcgattcagctgcgcaaggcatggacgttgtgcaccgcggcccgcaacggcagctatctgtggagcgggcgcgccaaccaggccgatattctgcctgatgacatctattcgctgggcggcatcgccgtctacctcggctacggcgcccaccgcggccagcatttcgagaacgacctgctggccgtgatgcgcaaatgccgtgacgtatgccagcgcttgttctatgggaagaccgaaggcgaggcggctgcggcaaccaccgccacggcctccgccgcaacgcagcagccgcaaaccgcccctcgcccgcgtatgcacgtgatcgcaccgcgactggaacgaaatcgacgccgcgcgcagcgataaggcagcatattcgttggattttcaggtggacactcggtgaatgcggctgtccgaaaaatggcgtaagttagattaggtcacgcaagggtggccacctgaaaaccacgagcgaaaaggtgagccttgtctgaagaaacgccaatggtcggcaaaagcgtcgtaacgctggacggcctgtctacaaaccagattctcgacctgctgcataaggccgaatacatcgattcccaccgcaaagagattgcccatacctgcgatgggcgagtgctggccacgctgttctacgagccctccacccgtacgcgcctgagctttgagaccgcaatgctacgtctcggcggcaaggtcatcggattcgccggcgcgcagctggcctccgtgaccaagggcgaatccatcgccgacacgttgaagaccgtgtccaactacgtggacgtggtcgccatccgtcacccgaaggagggtgccgcgctggtggcctcccgcgccgcatccgtgccggtaatcaacgccggcgacggcggccacatgcaccccacgcagacgctggccgacctggccacgctgcagtcgcgcttcggccgcatcaccgacctgaccgtgggactgtgcggcgatttgaccttcggccgcaccgtgcactccctgatcgagaccctgtgccgcttcggcaacgtgcgcttcgtgctcatcagcccggacgagctcaagaccccgcagtacgtgatcgaccgcatcaacgccaccgacagctgctcctacgtggaagtgcgcgacctggcctccgtgatcggcgacctcgacgtgctgtacatgacccgcgtacagaaggaacgcttcttcaacgaagacgactacctgcgcctgcgcgacacctacattctcgacgaagagaagctgcagctcgccaagccgtccatggccgtgcttcacccgctgccgcgcgtcaacgaaatcgccgtggacgtggacgacgacccgcgtgccgcctacttcgaacaggtcaagaacggcatgctcgtgcgcatggccctcgaaagcaccgtggtgggcgacgaactgcccggatacgaaccgctcaaccccaaggaggttcaggcctgatggaagtcaccagcattcagaacggcatcattatcgaccatgtgccggccggaacctcgctgaaggttctcgaatacctgaaaatcgacccggccaaaaccaagcttgcgctcatcatgaacgccgactccaagcgttacggctccaaggacatcatcaaaatcgaagatgacaaggacatcgacctcgacgtgctcggcttcgtggcccgccaagccaccgtggacgtggtgcgcggcggcaagatcgtcgaaaagaagcagccgaacctgcccgagcacatcgtcggcgtgatttcctgcgtgaacccgcgctgcgtgaccaccgccgagcccggcatcaagcagatgttccacctcgtgcactccgagcggctcgaataccgctgcgactactgcgacgaggaagccaaactgtgagcatcaccctacgcaacatcaaggtctggaacaccggcgaggtcatcgacctcgtggtgcccgggaccgctgccgcctacttcgccgacacctccgccgtggctgacggcgccgacatcgacgccaccggcctgaccgtggcccccggtttcgaagacccacacgtccacttccgcgatcccggccagacctacaaggaatcgatggtctccggctgccgtgcgtccgcatccggcggatacacgaacgtgctcatcatgccgaacacgttgccggcactggatgggcagaccgtgtctggcccggaagcgaccggtgcaaaagaggttctggatgccggcttcgacaacgtcatcgacttcctgcagcagtacgatactgcgcatgacgttcaattgccggttcgttacgatctgtgcgtgtgcgcgtccaaggatcgcgccggtcatgaggcaagcgacgttgccgattggctcaagtacgtgcccggattcgaggacgacgccaagacgccggccatgctcacgcaccccatcaccgcaatcagcgacgacggttccgctgtgacgccggagatcctggaccaggtgctggagaacgtcaaggcctccgacctgtacctgatcgagcattgcgagcatcacgatacaggtgccgtgaacgaaggccccgtttcccgcgagcttggcgtgcccggcattccggaagacaccgagctcaagatcgtggcccgcgatatcgaagcggcccgccgcaccggtgtccacgtgcacttccagcatgtgagcactgccatctcgttcgaggcgattcgcagggccaaggccgaaggactgccgattacctgcgagaccgcgccgcactatctggcgttgagcgacgaggcgctgctcaagtacggcacgctcgccaagatgaatccgccactgcgctccgaagcggaccgcaaagccaccatcgcggccatcgccgacggcaccgtggatctgctggccaccgaccatgcgccgcacacgttggcagagaaggaactcggcttccttgaggcgcccaacggcatcatcggactggaatgcgcgtacggcgtgtgccacaaggtgctcgtcgacggcggcttcatttccgatgagcgtctgatcgagctcatgtccgttggacctgccgaactcatggggcatgtgccaaccgacgtagccgcgctggtcgaggactacgccgaacccgcgcccaccggggatgatccggatggcgtgattgcgggggagagcgacgctcagccgcagcgtgaaggcgtcaaccgactgctcgacttgagccgcgtggatgacgccgacaatgtcgacctcgtggtgctcaacgccgccgaggaatggaccgtggaccccgaacagttccactccaaggctcgtaacaccccgttcggcggctggcaggtcaccggacgccccctcgccacaatcatcggctcccagctgatgttcagccgtctgtagataacacaaggagcagcatggatcgcctgatcgaagcgattgacaacactcagaaccccagcgtcgtgggccttgaccccactgaggcgctggtgccgccgcaggtcgtggcgagctttgccgacgaggtgcgtgactcggtcgaatccccggaggaagtcgaatccgcgcagctggccgtcgcctacttcgaatacaaccgcacgatcattgacgccatcgccgacatcgtgcccgccgtcaaaccgcagatcgccatgtacgaggcgctcggccccgccggcgtggacatctacacgatgacctgcgaatacgcggcccagcagggcctctacgtgctcggcgacatcaagcgtggcgacatcggctccaccgcagccgcctacgcccaccacctgaacggcgtgggcgacttcgacccgtggcatgaggatgcggtgaccgtcaacccgtatctcggcaccgacggcatcaccccgttcgtcgaggccgccgccgaagccgacaaggacatcttcgtgctcgtgcgcacctccaacccttcctccagcgaactgcagatgctcgacctggccgacggcacgaaggtctacgagcacgtggccgatcttgtggaaggatggggcgccgagaccatcggcagccacggctactcccgcgtgggcgcggtggtcggcgccacccaccccgaggaaggcaaggcgttgcgtgaacgtatgccgcacacgttcttcctcgtgccgggctacggtgcgcagggcggcacggccgcggacgtggcaggcatgttcgacaagcagggcagcggcgccatcgtcaactcgtcgcgcggcattatcggcgcatggaagaagagcggcaagtactccgaatccatgaccgccgacgaggcgctggaccttgtggcgagcagcgcgcgccaggcggcgctcgacatgcgcgataatctgcgggttgccgtatataggtaggtagattgtccggctgtgggctatacgtgagtgtgggctggaaaccggagccgagtgtgtttaactacctctcagtcaacctgcggttgaccgctcccctgatagggggagcttgatgtgctgaataggaatgaaatgacaactttcacccccacccatgatgtggttacggaagcgactgcggccggattcttcccgccgcgccacaacgtcgaaatcacgcaggttacggaactgaccgaccgcgtgatgcgactgacgttccgcgacccgttcatcgcctcccatgccaagcccgcccagttcgtcaacctgttcacgcacgacgacttcatgctcatgccgcgtccgttcggcgtcagcgaagtcgacggcgacgaagtcagcgtgatcttcgccgtcgtgggacacggcaccgaacagttggcaggactgcaggccggcgacaccgtcgacgtgctcggcccgctcggccgcggcttcaacctcaaggaagacgccaactacattcttgtcggcggcggactcggcgtgcccccgctaatctacgccgcgcaaaagctcgccgaacacgacgcctcctttgccaccgccgtattcggttaccgtaacgaccacttcgccgaggaatacgtctcccggtacgcggactggtcgtggagcatcgacgacgccgaaggcaacgtggtcgacctgctcaacaaactggaacaaggcgacgacctgaaggcctacgatcgcaagccgatcattctgtcctgcggaccgctgcctatgatgaaggccgtggccgactgggccgccgaacgcggcatccccgcgcagctgagcatggaacagcgcatgggctgcggctatggcacctgcgtgctgtgcaccatcgacaccgtggacggccgcctcaaggtctgctccgacggacccgtgttcacccgcgaacagctcggatgggggaagtgacgatgagcgcaaacaaccagtccgcgcagggcggcgacaaccacatcaacctgtacgagccccacgtgtggaagcaccacaccaaggtggccggtctggaatggaagaatccggtcggcaccgcctccggcaccttccagtacgccgccgtccgctggttctacgacgtcagccagctcggcgccgtatgcaccaagggcgcctcgcccgtaccgtgggaaggcaatccctcgccgcgcaccgccgaatcgccggccgcgaacatcaacgccgtgggcctgcagaatcccggcatcgaccattacttggccgaggacctgcccaagctcaaggccgcgggcgcgttcgtcatctccaatgtcgccggacattgcgatgacgattacgcggcggtcgtggaaaagctcgccgactccgacgcggacatgctggaaatcaacgtcagctgcccgaacgtttccgccggcggcatgagcgtgggcaccgacccggtggccctcgccaatcttatggaccggctgcgcccgatgaccgacaagccgatgatcgtcaaactcacgccgaacgtcaccgacatcaccgtgccggcgcgcgcggccgtggaacatggcgccgacgcgttgagcatgatcaacacgctcaaaggcatgcgcattaacattcgcaccggcaagccgatcatcgccaacgtcaccggcggcgtatccggcccggccgtgctgccggtcggcctggcagccgtctatcgggtgcgcaccgcactgccggagattccgatcatcggcctcggcggcatcgacagcggcgagaaggcgctcgaatacctgtacgccggcgcgaacgccgtcgaagtgggtgcggccgcgctcttcgacccggtggccccgctgcgcgtcgcccgcgaactcgacgacctgttggacagccgtcccgaactcgctgctaaactggccgcaggacagacttggaggtaaggaacatcatggcagaaacactcgcacatcgcttcactgaattcctgttggaatccaacgcgctgaagttcggcgacttcacgctgaagtccggccgcaagagcccgtacttcatcaacgccggcgccttcgacgacggcaagaagatcgccgcgctcggcgcgttctacgccgaaaagattagccaggccatcgtgcacaacacgattccccgcaacatcgacaccgtgttcggccccgcctacaagggcattccgctggccgtgtccaccgcgatcgcgctgaccgccggccacaacatgaccgtcggatacaccttcgaccgcaaggagaagaaggaccacggcgacggcggctggatggttggcaccccgctgaccgacggcatgaaggtgctgctcgtggacgacgtgatgaccgccggcaccgccgtgcgcgaagtcatccccaaactcaaggccgaggcgaacgtcgaggtcgtgggtctcgtgctctccgtggaccgcatggagaagaccaaggactccgacatgtccgccgtgaaggccgtggaagccgaattcggcttcccggtgctctccatcgccaacgtgcgcgagatcttcgacgccgccgccaagatgaagaaccccgacggcaccccgctgctcagccacgacatccagcagcgcgccgccgcctaccttgaggaatacggcgcctgatcgtcttcaatctaaaaaccaaaagcgggcttgcgagcccgctttttttattacgttccatgaacagcagcaccatattaaggcaaaagctttggcaaggagcgtgctatgaactggttagttgatatagggctgtttgcgctcgtggggatatgcagttacttcggcatcgagcatcatctggacagcaaagcgaacaagttgtcgcaaggtaatgaagaagaccgccgagatgctgatgcccaagtagaagcagcatgaaaatggcggaatgacgttggggtgacgccgctcatactcgggatatgacggatgaacagcctcttgaaacggagataaatgtctccagaaggccaaatcagctcccttgaaagcgagatagggttctaaactctgggaccgactcgcctgtgatgaaaacccgctcggcgtagaattaccgtaggttcgttgcattcgaacaaggaaggccgctatggggaacatcaccgacgatattcggcaacatttcgacactttcgccgaactgccgttcaccgaggcggatagcctcgctttgtcccagttggcctatgctcgcatgccggataacgtgccgcgctatcacgagaatgcagagaccgccgacggcatgatcgccacggttccgattcacgatttgctgcgtgccgaatgctatgacgacatgttcggcaaggtgtggtcgccttcgatgaatgtcgatctgttacgtgcgatgagcgagagcccacgttggaggaacctacgcgtgggcgcatacgtggacgaattcgatgctgcaaccaccaagcagttctcggcctgcgtgttcgaactgggtaacggcacgctctatgtggcttttcgcggtaccgacagctcaatcgtcgggtggaaagaggacttcatgatggcgttccgccgcccggtcgcctcgcaggaggccgccgcgcgttatctgaccgagctggctggccattgggccgggccgattatggtcggcggccattccaaaggcggcaatctggcggtgtatgcggcggccaatgtgcctagcgagattcaggaacgtatcacggtcgtatattcgcacgatgggcctggattcgatgaggcgttcttcgatgaggacgggtacgtacgcattgcgtcgaagattcataaatcggtaccgggctcgtcgatcatcggcatgctgtttgagactcgtgagcatgtggaagacggctatacggtggtcagcagcgacggtgccagcatcatgcagcatttcgcattgcactggcaagtcgatcatagccaattcgtacaggctgatggactgacaagtagcgcgcaatacctggcacgcacgatcaacggatggatggcaaaatacgacgacgagcatcgccgcaagttcatcgaaaacctgtttgccatcttcgaggctggcggatacgacacattcggcgacctcacttcgcatttgacacagtcactgccgattatgctcgccgcggcccgcaacattgatgtcgaagatcgcgacgtgatgattgaagtgctcaaaggcttcgccgcgacagccgccgcgtcggtaatcttggccaagtagtcggaggccatcaaactggttttgccagtcagtctcaatagcgcaaaagccggcccctgagatactcaggagccggcccttacttccatttccccagcggggttggcttaatcgcagtatatctcactgctgaccatgcctgttttacttactcctaatcaatgagcttgtagccgtggtcggagactacggacttgagcttgtcgagataggtttcggcggccttggagagcttggaacgctcgttcgtgatccagccgaccaacatcgtttcgtcggtgtcgagcggcacggtgacgatcttctcgttgttgaggtcgccgttgtcgatgccggtgcacaccgtgtagccgttgaggccgatgatgaagttcaggatcgtggcgcggtcggtcacgttgatctgcttgggggagtactccggccagaccgcttcctcatagaagtagaacgagccttcctcgccctgctcgtactggatgaacggataaggtttcaggtcctccatggtgatgaccttcttggcggccagcgggttgttgcgcgagatgaacacgtgcagcggcgcgcggaagagcgggtggaattcgaggtgcttctcgcgcaggagcttgccgatcacgtccttgttaaaatcggacaggtagatgatgccgatttcggactgcatgttggcgacctggttgatgatgtcgcgcgtgcgggtctcgcggatggtgaactcgtattcgtcggacttgatggagttgatcatctccacgaacgcctcgacggcgaacatgtagtgctgggtggagacctggcacagctgcttgcgcggtttggcatgcttatagcgctcttcgagcaggtcggcctggtcgagcacttggcgggcgtaggtcaggaattccgcgccgtccacggtcagggcgatgccctgcgaggagcgggtgaagatctcgatgcccagctcgttctccaattccttgaccgacgagctcagggccggctgggagacgtacagggcatgggaggcctcgttcatcgagccgcactcgacgattttgacgatgtatttcagctgcagcagtgtcataaagtctatttatatcgctagggatagtcgccacacggccggtcaccgtcgtcaaggacgggtccatagacttcaactgccgcgatgcaacgtttggcgacttacagacgtacgccgagttctgcgagcgattcgcgtgcctgcaacgcgttctcgaagaggatgccgtggatgccgacctcgttggcgccgacgatgttcttggcggtgtcgtcgaagaacacgcagcgctcggccgtgaggccgaaacgggtcagggccagctcgtagatgtcggcgttcggcttatgcatcttctccacgccggagaccacggtgccctgcaacagctgttcaaggcgcgggtacttctcgaaggccaggtggaaggtctcatgcgaccagttggtcagaccccatacgccgtagccgtgggccttcaaatccgccagcagctcgaccatgcccggaagcgtgcggggcagcgcgtccgcgtagtggccgatgtagaacttgaagatgtcggcgagttcctggccttgttcgcgtaccacatccgggtagatgtccgcgaaatcctcgccggtgtccatgcggtcctcgtagcggaagaagccgcaggggtcgtcgtcggcgcagatgcgttccacgatctcatcggggaatcggccttccaggcatgcgcgggtgttccagtccagcagcacgccgcagaagtcgaaaatcacgtcggtgatgggggagttggccatgatgctccttgtgttgttggggccgttgagtggggcctgcgatttagtatagggggtttcatacgttggctcccctctctgaggggagccaacgtacggaatcatgcgatgacgtcggcgatggcttcggggatggcgtgggccacgtcgccggccacaatcgggtggccgagcgtcatgaagcgctggcgatgctcgcggccgatcagttccggctcctgccagccttgttgctcggattcggaggcgatcgccgccgccaggccatgcaggtaggcggccgaggccacggtctcgcccgtggtggccacgtcatcctgctgggcgagcagggcgccggtcagaccggccagcacgtcgcccgcgccggcggtgcccagccaggccggtgcgctacccgacgcatagacgtggtcctcatccaccacgatggtcaccgcgcccttcaacaatacggtggcgccggtgagctcgtgggcacgcttcgcgctggccaacgggttcaaccgcacgtcgtcggcggtgtacggctcgtgcgaatcggcatgctccgcggtgctggcggcggtttcgaaccggttgagcagtttcgccatctcgccggcatgtggcgtgatcaccacctggccgggcacacgctccggcagcaggtcgagtgcgccggcatccaccacgattggcggcatgtcgtaggcgtccttgttctcatcctcgctgccgagcgcgtaatgcttgagcaatgcggcgatggtgtcccgctgcatatcgccgtcggtgccctcgacgctagcctcgggcacgccggaccccacgacccaggactgcacatgtcccttgccgatcacggcttccggcagtgcggcgagcaccatgttctgtgcgcgctccgggcccagataccggaccatgccggtgttcgcgcgggcggcggcgctggcggtgagcacggcggcaccggggtagcgctgcgagccggtcaccagaccaaccacgccccgggagtatttggaatcctcgaacctggggagacggaccgcgtcggacgcgaacgaattatccaccacctcgacgtccggatccttgtcgtcgatatcgaatccgaaatcgagcaactcgatacggccgcaggcgaacgtggcgggcggcagcaccgcgcacggcttcatcgcgccgaacgtgaccgtgaccgtggccggaatgtacgggccgggcagagaaccatcgttcacaccgacgccggatggcgtatccacggcaagtaccagcggaaaatcgcctgacgactcacggtttggcagggcgggctcatcgggagcctcgccgtcgagaccaagggcggaggcgagtgcggcggggatgccgcgtagcgagccttggatgccgatgccggtcatcgcgtcgatgatcagatgcgatttcctggccacggcgatggcggtctgcaatcgctcgccggcctcaccggcggaaaacccggacgcgcaaccgggaatatcagccgcgggatcaagcaccagcaccttgcctccggcgcgcacgaatgaggcgaatccggcctcatgcaacgaccggcccacggcgatggcggtgacgttcgcgccctcctgggccagcgcggcggccgcgaacagaccatcgccaccattgtctccggccccggccagcagcacgatcgacgtgtcctccagcgccagatcctcgtcgtccagcataccggccgccatgtgggccgcggcctgggcggccatgcgcatcagcggcacgcctttgtccagcaggggtcgctccatggcccggaccgtatcggagtcataggcgctgtgcagcagcagttcgcgacgatcggcgtcttcggtgtattccatggcaacccctttcttgtgtttgttacttgcggtccgtgtttacaggccgtacacctcgtgggcgaacttttcgaacacggggatcgagcgcttgaccttctccgtgtcgatgcagtaggccatgcggaagtatccgggcacgccgaagctgtcggacggcacaagaatcaggtcgtattccttggccttcatgcagaacgccacggcgtcgtcctccagcgccttggggaagatgtagaacgtgccgccggggcgtaccacgtcgaagccgatgccggtcagcgcatcgtagagcaggttcatgttcgtctcgtagacgttgagatcggcggtctggtcgatgaccttggccacgcccagctgaatcgagctcggcgggcagttgtggccggtgccgcgcgagatctggcccatcatgggcacgagcaggtcggcgtcggtggctgtgggattcaccgcgacatagccgatgcgttcgccaggcaggctcagcgacttcgaccacgagtagcaggtcagcgagttcgcgtagaagctggccgggtagggctgggtggcgccgtcgaacacgatttcgcggtacggttcgtcgctgatcaggaagatatcgtggccgtattcgacctgcttggcggtcaggatcgcggccagacgcttgagcgtgtccgctgaatacaccgcgccggacgggttgttcggggtgttgataagcacgacctgcacgttcgggttaagtgcagcctcgaatgcgtcgaagttgatttggaagttctcggtgtcggccggcacgatggtcagcttggcgccggcgcccttgacgtacggctggtattcggggaagtagggggcgaaggtgatgatctcatcgcccggcttggtcaccgcacgcatcgcgtgggacagcgcgcccgccgcgcccgtggtcgggaagatgtggttgccggtgtatgccatgccgaaacgttcgttgaggttttcggcgatcgcgtccttgacggatgggataccgagcgagggggagtagccgtggatggccaccggatcgccgttttcgtagaggtcgaccatggcgtcggtgaaggatttcggagccggcaccgagggattgccaaggctgtaatcgaacacgttctggtagccgatttcggcaccgcggctcgtggcgtactcgctcagttcgcgaatcacggacttgccgccaagcatggccttgtattcctcattgatcatggctgttctcctcgcatggttgtactggtatgcaccacgctactactatcgcggccggtttgcgccatttgccgcgccgtgcctaagccggctgttctatttgttctattagttctattagtggagtttggaccggcatatacccttgcaataaagccatttgtagggtctgaggctttccggggttgcttgtctcatagattttcggcctcttgatatttgcggttgatagctgtgatgtgtgtgggcgatggctgttgaggcatcatggggatctcttcgactgtccgccgtcgccatgccgccatgatgcctacagaaagtcgagttgcgtatttccgccaagcagggcggtaaccggtgggggcgatcggtgggggtgaccgacacccgctataggcagcaggcagccgcacacatcccaatatctgtgggacggcagacgagtcaatcgtttgtcgtccgcgccgtccctcaagagcgcgggatggcagacaagtcaaccgtttaacgtccgtagcgtcccacaccgacgactgtagaaaccgcggaataacgccgattctcgctgcagctccatgattatgcacaaccgttcatagcgagcgctgtgggacggcgggcggaaaacggccgaatccgcgtgccgtcccacacctcgtacaatccgcgttttggaaaagcatcaccgtaaggctgacgcgcatccgcatccacagcaggagccttaccggccgtaatcccgcactcgattattttttctgacaggaaatcgaacccgaaacactaacccatgcccgccccaccgcaaacagcgaataaccaaaaaaagcatgatctatccttggcgccgaataatgagagcctgactgtagtggctacgggtagctatatcggagaaggattcgatcagaagcgtttcgacacgcttctgcttgccgctccggtctcgtttgagggtactctctcgcaatatgtagggcgacttcatcgcgagaatgatggcaagaccgaggttcgtgtctatgattacatcgacgtgaccgtgcctttatccgctgtcatgtatcgaaaacggctgaaggcatacgcaaatcaaggatattcggtaaatcctgaccatactgagaaaatggacatgctcagtgcaaaggcggaagcgttgcgcgcttgcatgacggccgcgacgcagggcgaagatgctgcggatgcgttgctcgacacccggtctgacggattattcgaaggcagcatcgttacagccacgaattatgcagagatactccgcaaggatattgccggttgcgcacgttccctgattatctcggctgaatatgtatcacaacagggactcagcgcaattgacgatgaattgctccgactggccgacaggaaagcgctcatcgaagtttatgtccgtttgccggcgactgctgcggtggcaaccagaacacgaatagaacggaatattaatcggctgcgtgctattgggtgcattgtccggaccgtcgaatcgtgttccgattttgccataatcgatgacggattgatttggtttggaggcatccctttacttggcaatccaaggagtgacgactgtgcacttcgattcaaagatacgaaaatcggcgagaatctagcagatggactgaaacgacggtcgtcctgagtcaatattcagttaagataatcgcgcagtacgagggcgtgattgatgtgcgggtccttggcggcatagagcagggtcacgtcgggatgctccgcgcagatgtggcgcagattgtccacggcggcattggcgtcgagctcggcgatgtaacgcatgcggaattccgcgaatttggcggggtcatggccgaaccatttgcgcaggaggggagagggagcgacgtccttcagccacaggtccaacgccgcacgctctttcgtcatgccgcgaggccacaggcgatccaccagcacccgatacccgtccgacgcagtcggctcttcatatatacgtttgattgcaatacccatacgccccatgattggcgtgcgcttgccggaagtcaaggggagacgcgatccatctacccgttcgatttctgggtgttctgtctaaggccttgtgctatgacagctagcgattcagcagcttttggtgatatcgtccaaccggaccgccttgcccctgtcgaaggtgttcatagtgagatcgacgggtttggtcttgatgaacgctgacagcgcggtgtgcggcgggttgtcgatcaagtgggtgatgggggcaatcgccttctcgacgctgacgcccacaatggcgtaaatggcacgcgccagcagcttcatcagtggcgaatcgaaactgttcaatgcctcattgctgcgcacggcccaagggttgaacaacacatagtggatgcggcctccggtctgctgttggttttccgcgaagagcactcccagcagatcgttcagacgactcgtacagatagtcgcgcaatgctagaacgtgattgatgtgcacccttcattgacggtctctcaattgatctcctgcgattcatgccgtataaggaagttctcgaccaaggcgatcatcgtgtccttccccgcaggtgcggacagcgcaatcatcagcgtcatcgccgccaaggcgttaccctccacaagcaggggagtcatcgtcgcccagtatactgttgccgttcaggaaatacacgaacagtgcggcggcacaacgtttattgccgtcggagaacgggtgatccttgacaacttgatacagcaggttcgcggctttctcctgggtggaacggtacagttcttcgcctccgaacgtctggtagagtcctgcgacgattccttggaacgaaccgttgcgttccctcccgaacagatcggattgcgtgtagaacggcatcgaccggatgaacagcatcgcgtcctcataggtcaagacccactgggactcgtcgcccttgggtatagggacattgcctgtgtcatagtcgttaagcagcacaagactcggcaaatatcgttccaagatctcggcggtgccagcaatttccggttcggtggacctcgatagcaccttgacgacggcgtgaagtgcgtcaagccgcttgcgattgatggtataaccatcaacgagatgctgcttcagaactgagttggcccatcgccggaaatagatgccttccttggatttgacgcggtatccgaccgacaggatcatatccaggttgtaatgctcgacttggtatgtcttaccgtcagatgcagttgtcgcaaattctgcgacaactgaaaatccattgagctcttccctcaatgcattgccgacatgcttgccgattgttttgatatcgcggccaaacagcaaggccaattgctgtctgttaagccacaccgtgtcctcgtccaccttcacatcgaggtgcacggtgtggtccgcgctctcatacaaagcaatctgctgcttcagttcctcgccagtcatgagattacctctctttttcggctgtctgtaaatcatgtcgttggcgtcgccaaattatgcatccagtttatcaggacagtcgaacatttgttcgattactgtatctctcatctttgtatgactttcccgacgacgtattggctatgacggaggtaatgggcacggggataatgctgatgatgggcatttccatcatgcaaaaacctatgccccgtattgaaaaaagctattggaccaagccgttgggcttaggccatgataattgggccattgcgcggcttatccgttcgacggatgttccggatttgcgatggcgttgaattgcaattatcaaatgaaagagcaaattgtatgagcgaaaacaatgatgccaaacacgtgctgttggtgttgatcagtcactccgatttgggaggtgtgagacctactggcttttatgttgatgaggccgcacatccttggcaggtgttcagacgaatgggcttcactgtgggccttgcatccatcgctggtggcgtaccgccgcaggctggccgtcatcccggtgaccctgtgcaagagcaatttctgcatgatgcggatatatcacgccagctagtgaatacgcgcgccttggctcaagtaaacgcgaaccgatatgatgcggtgctattcgttggcggtcacggtgtgatgtgggatttccccaacaattctgtggtgaacgccgtcggccggaacatctgggagcgcggcggcattgtgccatgggcctgcggcattggtggatatgacgttgtcggatggcagttatctgattgccggcaagcaggtcaccggattcaccaacggcgaagagcaaaatctcgggcgttatccgtggctgcggcgggcgaatagaagggagattgagatagagacaggggagatgccgggtgcatcgccggcatcacgcctccgtgaaatactcgttttcgtccgcaagccggccgcctttgatgaacaggaatcgctcgcacaactcctgcagctggagatgagcatggcgatgctgcggtcggaagcccactgtctgagcacggcgatgagctggagcacgccgtccgggtcgaggtccacgaacggttcgccgagaatcaggaactccggatcattgaccagcgcgatggaccaacgcaagacgctgtttcatgctgaacgagaaaccggcgggcctgcggtcgcggtacggccaaagtcccacaagttcaagcaccgggcagattgggaggcgcgagcggtgggtcggacgattacagtgtgagccgaatacgttcatgaatcatcgaatcacaaggcgaggcggaccgcaagtattcgagagtcgccagttcggtcgatttcaatgacaatggtgtggacgattacgcggatatcgtggcgggtgcgcgcaaggacgccgaaaaccatccggcttacgattccggctactatcagggcggctatccgccggccgatcgcggggcgtgcaccgtacgtgattcacaacatggcgcagcggcagcgcgaaaacgactacttcgccttcaagaagcacatgacggtcaccgggcactaccgtttcgacgcttcgaaagtgctgtagagcgtactcagggcttggcgatgacggtcggagcggcgtcggcattgccggctttggctccggctgcatcagctgaatcggtgccggccgcactggcgttagcactatcgtcagcgttggcaccgccggctttggccttggcatcagccgcgctcccgccatcgatcaccagtcgcagataatcgcggtcggcggacttgcggcgtggcacgaaacgactgatgatggagtccttcttgccgcggttcttcacgtacaggaaaccgaacacggagaacacgaccgcgccgatgaagttgacgaccagatcctccatcgtgtcgatcagaccgatgtcgaggtagccgccgaggcccaggtcttggccattgaccgtgacctgggtaatgtcgttgatgcgaatcgcatggttggtgtgcgtggggtcgagcatcaccgagctgatggaatgcacgatggcgtccttctgcatgtcgaacccgaacaactggtccatgccgaattcgaagaactcccagatcacgccgatggtcatggagaagcagaaggacacgatcgccagatacaggggcgaaagctcgaacttcacccggtcggaccggttgagcaggtcgaccagcgagaagccgatcgccgcagcgaggaagccgttcatcgtatgcaacaccgtgtcccagaacgggaagatctcatagaacgaactgatctcgccaagaatctcagccgagaacacgaacaccagcacgatgacttccagcaccgaaggcagctcgatgcggaactgcacctggatgaacgccggcgccaacagcagcagcaacgtcaggatgcacaggaacacattttcgtagtcgccgttaaagaactggagtattgccatggcgagcaccagcatgcgcagcaccacatagaccgcgaatgagcttttgtgttcgcggatttccatgcccacggctcggctcatggttttccagcgtacgcgccaggacggtttgcgttgtgcgtcgtgctgttgcgactgtttccgggtcatccttgcctctttctcgcattgttctcgcgccagtctatccgaacctgcttacaggcaatcggcaagaacgggcgatagtctggccgcacgaaccgaacggaaaccgatactgtctcgattgtgggccacgcgaatcatccgacaatgctcgatgaggccattacgccggctcctcatggctactggtcgtagggctggcaatcatggccatgccggtagtttgggctatcgtgaggtgtgcgagatgggctttgtgccggctggcagcaaatccaagcagcgaaacaacggaatgaacgaagcgaaaggaacggtatctgatgactccgattgaattgtcaacccgacgccgggttacgggactgacttcggatgagttcgccaggctgttcgtctctttgcagcgtgaagtggacggcgaagccgcgcattggagcgccacggatgtcgaatcctgggagctggtcggcccgccggtgaccgccgaacagcatctcatcgacacgttcgccgcggccaacgaattcgtggccacgcttgcggaccgcctgtaccacacgattatgccagtcacggaagaatcggtcatcaccgcatacgctgatgacctcacattctgggcatcgcatccggaccttggcggagtgccgtgcgcattatggaacatcgccgcactgcaggcggccgaatgggcccgcaaggaaaccggcatcgcctgtgaactggacgtgcgcgaaccgctggtgtgacagctgagctcaaacatgcgtaggtaacggcatggtttgaggactatggtgttgcgttatcggtcggaaaggatgtgatggtggggcgtcatagcaaaaaagcgcgtggccagtcgaggagatatgcgcgaaagccctccgtttggagcgaaattcgcggctatctgctgacagtgatcgcggtgatgctggtcgtgttgctgggacgtaccttcgtgttcaacgtatatgtgattccatcccgcagcatggaagacacgttgcaaatcggcgaccgcgtatttgcctcgcgattgactccgagactctttacactgcaccgtggcgacatcatcgtgttcaaagatcccgcagactggatggagggggagcagcttcccaccaatctgatgtcgataatcgacagcaatcgttacctaatcaaacgtgtcatcggtctgcccggcgataccgtcgcctgcaagggatccggggagcccatcacggtcaacggcaaacccattgatgaaagcgcttatcttaagtccggcgtgaatccaagcgacagccctttttccgtaaccgttactgacggcaacgtgttcgtgcttggtgataatcgctccaattccagagattctcgataccatcttgacgacggcaacaatgggctagtgccatacgacgatatccaaggtgtggcgttgttccgcttctggccatttacgagaatcggcatactgaactgagtttggcgtgaatccacgagttgatacgtgccgcacggtccggtgcatcctgcagccggaccgttaccggaaccctccccccgaaatctgacgacccccctgtctcacagctatcgtacagctccgatacgggaaacgtgcgggtgattccataacgactacgtacttcaggaagtgacgtgtatcacactatggtcatgtgttcagtcgcgcgcgacccaaagcgtatcgaggtcgtcggcctcggtcgcctttttgcgcttgcgtacccactgttgcaggaaatacgccccatagcaggccacgatgaacacgagctcggccacgagcgcgaaccgttgctccacgtcgaaaatcaccaatacgaacgatgcggtgcacaggatgaacgccgcccaagacacgtacggatagccgggcgtgcggtatttgagttcgctggtggaatggccggactccagccaacggcgacggaacacgatctggcagtaggcgatggcgatccacaccaccacggcggacaggccggaaagcgccaccagcaccaggtacacagtcgaggcggcgatcacggaagacaggagcgccagcaggccaccggccatcgcggcgcacaaggcgagcatcggcacgccgcgacggttcgttttggcgaaccagcgcggaatcatgccttcgttgcccatcgaccacaccatgcgcgtggaggcgtacaggccggaattcgaggcggaaagcacggccgtcagcaccacgaaattcatgatgtcgcccgcataggggatgccgatgctgttgaagacgagcacgaacgggctttcgcccacgccggcctggcgccacgggatcagcgcgcacatcacggtgatcgagccgatgaagaacagcaccaggcgccacagcgtggtgtggatggccttcggcacggtggtttccgggtcgcgcgtctcgccggcggtcacgccgatgagctcggtgccggagaacgcgaagttgacggtcagaatcgtggcgaacactggcatgaacccgttggggaagatgccgtccttaacgaggttgccgaacatcggagcatgctggtagccggcaatcggaataacgccgaatatggcgagcaggccgatgacgatgaacgcgcagatagcgaacaccttgatcgaggcgaaccagaattccgcttcggcgaagagccgcaccgacaaggcgtttaaggtgaagatgagaatgatgcacgccgcgctccacacccatgtggggctgtccgggaaccagcgttgcatgagcaggccggcggcggtgaattcggagccgagcgccaccgtccaggtgagccaatactggattgcgatcacgaagccggtgccggggccgatgaacttttcggcatacacgtggaaggagccggtcactggcatggccacggacaattcgccgagcgtaagcatgaccaggtagacgatcagcgcgccgatgctgtatgccaggatcgtgccgatggggcccgcctgctggatggtgtatccggagctcaggaacaggccggtgccgatcacgccgcctaatgagatcatctgcaggtggcgggattccatgccgcgcttcaggttggtatgtagggcgtgctcgtctttgccatcatgtgacgactcggactggctggtttgcgctggttgattcatctgttccgaatggcttcgacggccatccgtctgaatctgcggttcctgttgcgaggacggcgactgtgccgccgtgtcggtgtcgggctgactcatgtttctctctttgccatgcgtgcgttccataggcgtcgtcgtgacggcccggaatagtatacccgcaccgaggatatagctgcgctgcatgatgctgagtcaaaatcagcttcaaggggctgatttggcgtttgccggaggtctacttccgtttcaaggggctggtcaactggcggaacgcagatagaaatggcattgttctatcgctattccgccgtttttaaccagtggctactttggcatcagccccttgaaacggaagtagatgttccgcaaagtcaaaatcagccccttgaaacggagataggcactcgcagcggctacttcaccttctggatacgcagcacgaacacggcagcgcacacggccatgacgatggagatggcgaacgccggcgtgtaggtgccggtcgtggtcttgaccacggaggtgatggtgggaccgactgcttggccgagcgtggtggccaggttgaggatgccgaggcccttaccggcctcttccttgttcggcagcacgtcgacgttgagcgcttggtcgatggctgagtacacgccgtagccgaagccggcgatgcccgcatacaggtacatgcccgtgacgctcggcatgatccacggcatcgcggtgccaatcgcgaacagcagcgaggcgatgatgactggtaccttgtgcgtgtgcatcttgtcggagatcgggccggagatcagcgaagcggtcagggaaacgaccatggtgatgatggacatggtggcgatggtgccggcagcctcggtcttggtctggtgcacgtaatcctcgacgatgtagagttggtacacggagatcatctggtagctgagcaacatgcacactcggcagccgaacgccttgtagaagtcacgcgaggtggagaacttcgggaagtggaaggagacagcgagatccttgagcgtcatcttggtgcgttccatgtcctttgaggattcctcgcgaggtcagatgtcaagcgccacgaatccggaagcccatgatcacggcgccgatgatgaagccggcttgcgcattgttgatcatgcgagagccgatcatggtgccgatgggctggccggtgaccatgccgccgccgtagaaggagtcggtgccgcacagcttaggcatcgcgattatgtgcctcgtgctcatcatccgtatctgtctattgcctctcttcttctcccaaatgcgcgcgacgcagcgtatgcaggtgctccaaccgcaaatccaacgtatccaacgcaagtacgccgcgcgtaaggatccgcgttccaaagaagccatgcaacgtgaaattatggctttgcagcagcggcataacgccaatccgctcggttcatacctgcttcgctgattcaggcgccgattctgtgctcgctgttctacacgctgcaatccctgcccgcaagcgccgccgggaatgcggaaccgttgagcggcatcgaccgcgtcatggcgggcgacatcgaatcatcgtccatattcggcgtgcgcatcgccgactcgttcggcacggtcgtctcgccgcagtcgcacgtcgtcatcggcgtggccgtggcgttgatgtgtctgatgttgttcgcgatgcagtggctgctcatccatcgcaatacgccgaaggacgccatggattcaccgcagttccgcacgcagaagctgaccgcgtttgtgttcccggccatctacgtggtgtcgggcggcaccttgccgttcggcgtgctgctgtactggctgaccaataacctgtggaacttcggccagacgctctgccaactgcgatggtttccggcgcccggatccgaggcggggagcgcaaggccgaacgcgaccatgagcgggagaaccggcaccgcgccgcctccggattgccgtctttggaagaagagcgcgcggcggccgcgcgtgaggaggcccacgtgcgccgcgagcgtgaaaagtcggtcgccagccgcaatcgcagacagcgcaagaacgtgcagctcgccaagcgttgatggcacatgggagaggttacgggggatgcactgagaccctcgtccccggaacggttcgaagtgctatactgcttgcactacgctgcgatgcctgagcgcaaacggatccaagaccttacgatgacaggatgaacgatgatggccacgaaccgcacattactggaacaggcccgagaattgcaggcgctggcccagaccggactgatgtactgcaaggaccccttcgaccgggagcgctacgagcgtatccgcgcgatggcggtcgacatgctctccacgcaggttgatgcgccggccggacaggtgagtcgactgctcagcgccggatatccgacgccgaaactcgacactcgtgcggccatcttcgatgaagaaggcaggatcctcatgacgcatgagaacagcggggaatggtcactgcccggaggctgggtcgacgagaaccagtccattcggtccaacgccgtcaaggaggtcaaggaggagactgggctcgatgtgaggggcgagcgactcatcgcggtgcaggactgcgccaatcacaacgcgctgacctatccgtacggggtgctcaagttcttcgtattgtgcagccgcgccggcggttggttctcggccaacatcgaaacgacggaaatccgctacttcgaggaagaccggttgccgcggctttcggaaacaagaaacaccgcggaacaaatcgccatgtgttttgcggcccaccgcgatcccgactggatgacgctatttgagtgaaccccgtgaaggcatccgcacatgcgcgttgcgcggcgccgcctggtcatcgtgccgacggcgagcatcggttccgaacactgacgccgaaccgtcgaagccgttcctgtggaaaatccgtgtccaggccatgcagaaccaggtggccatcgtcatgtgcaaccgggtcggcaaggaaggcgatgtgacgttcgccggccaatcggtggtggtggacccgtacggcaacgtcgtcagcaaggccgacgaccaagaacagttgattatcgccgacatcgatctcacacagaccgcagcagcgcgcaaacagcggccattcctggaactgcgacgacccgaatggtacgactgaaggggcgaatgggtaataagcaatgtcacgattcgccgcacccatcagccgcattcgtgccggcctacagatacatgaccatacgcagattgcagccagctggtgcaaggcgggaatgtgaagtcattgtgcgtttgcttcgcgaagccgcgcaatgccggattcaaagcagctgctcatcattgctatggatgcgggactgaatggtcacttctcttggaccgccggtctcactgggagctagcgcgtcaccgtcgttgttccagaagcgcaatgcgccttgtcgggtctcatcgttgacggatagcaagagatctccctcaaatagtgtgcgtgctgtgcgatgctccgaacgagcatcttgatgttctgcacgaagcatgaggttcctgccccaacgatccggcatgcagtcttgaaagatgcgatgcatcgcattatgctcggccgggaacgttccggggggagaggggcatctctggacagagggatactgcgtttgaagagcgcatataggccgtatcgtatgtgaaatgtgccgattcgatgccgcgcctgatactggtgaataatttcccgacggtgacgtctgtgccgttgaactgcagggtgacgattgcttccatgatgtgttgcgcctcctgctgtactatcgaatacgttttggagtgtcttcgtcggcgcgtaatttgccgatatctgtgttaagagggtccgtcgcttgctgtacgccgtccagcagtccaagcagacgagcaatgcggaggaagttctcaaagctgccattacccgtacgcagcattttggtgaccgttggcatggataatccagcccgctcggccagcaaggctacgggaatgcgctgttgtctgcgcgccaaatcgaggttggcggatatctgacgcatcgcccgactgaccgggattggtgtgcgtgtcggcatattggcacctcctatcccaaatttaaacataaatttgtatggactagccttatgcggaggttacgccaatatacgacaagaacgaaccaacgtcagcccggaatcttttcgacgatggtgttcaaggtgtcgaaagtctcatcgatttggtccactacctgcttgccctggttgaccatttcggtgatctgttccgtgcggggttgcggcagcgcatgaatcgacgtcttgacgcgcttcaagaccgcaccggcgtcggacaggtcctgcttgatggaagcgattttgggaatggaaagcgtgccgtcggagaagttcatgccggacagcagctcttcgatattgaagtccaccaacgtgccctgcgcggcactgtcgattttgggcagggcgttggtcgcggcgtcggcggccgcatccagcatgccgcgcaccgccttcacgtccgaaccgtaatacagcacgtattcggcggcctgccatagcatgccctgggtttcgtctcgcgccgcgacgatgtgactgccagcgctgtccatctgctcaagcgcctgcttgaagtcgccctgcccgacggattgctgtgcttcagccgcatattcgcccgcctgctgcgcctcgccgatcacccgttgtaccgactgccagaacagccagccggaaacgcccgacgccagcagagccgcgaccagtatcgtgagaattacggtgccgatatgtttgcgcttagccataggaccaatgtaccttttgtcccatctagcgccattgtgttctggcctttagtccatcaaagtgtccaacagacttgtcttctctgaagaagcgcatggaaatcagttatagtcgattctctcctgtagctggcgaaaaacagatatagttgaattggactaacgggttttatgtagggatgccgaggaggacaaccatgaatcagggaagggctcgactggaacgaattcggtgatggagggctttgcgaaatccccggtcaatcgatttgctgactggttgggatggggattcgtcttcctcggagcgggtataggagcgtttctgggtgtcgtcgcgtacgttcaacactggattagctgacggcttcgaatagttctccgaccgcttctcggatttgccgggtggcatgaggttttcgaccgctcacgtagtggcggcgacctcacgctaatcagtaatacacactttgatctagcagaccctacggctaaggctaggaggccgacgatgggaaaccgcgtatggaaaggtgaaccttccgccggtggccgggccggaacgatcatcgctttgggcatcgcggcgttggtagtggcgggagtatggttcggatggactcgatactagggctatagtccggtttcgaatctgtcgcagacgttctcgatctcattttccgaggatgcgcgggcaatcgtcagcaaggacgaggaaagctttcatggggacggataccggtacgtgaaggtcgccgctgacccagaacaagtcgacggcaccattctggacggcagggattactccagtggccaactgccccaggagaacatccgcataatcaaggaagcggatgcgaccctgcgattgaacctgggaacacagctcgatgcgctctacgaccggcctcataaggagataaccaacgagggcggcacgctgatcatcatccatgatgccgattcctcggaatggcatttcttcgaatgcctcgtctgaaagctgagcactcccgaaacatatgcgattgtcctgaagaagagcccagaccaaccaagccccgattatccagataaaaaagaaacccccagtgcatcacggctgagtcgaagaccgtccggagaggccctttgggggaattcttgatatatcataatgagccatgagccgacagtcaaattcaacaactgatttcctctcacggactccaaggaaaggaagtccgcgggagaaggcgctgcgcgcgtgcattaccgatgaacggcttgccacctacaattatgaggctcaaagacgttcatgcccagcgctagagctgtacctgtgggatcacgacatggccagcgcctgtatgggcgacatcgccatcctcgaggtcgctctgcgcaaccgcatggaccggcaactctccctcctcgctctggagcagaatggcactgaagactggtatatggcagggctacaattcgatgaccgaacccagtaccagattcgtgaagcgtggaaccatctcaccccgcaccagcgaaaaaatcatacgcatggccatctcatagcgtcattgacattcggattttggcgcaatctcttggaagacggcggaacaatccacacgaagtggccagaccagcgccgtgcagattatgagaacgatttatggcgcaaaggactcgataagacattctccaatgggcgccagtatgcccgtgcagtggaagaacgctggacgagaaagtacgcgctggatatcgtaaaaacagtgcatgccctgcgtaatcgggtcgctcaccatgagccgcttgtcaacggcatacctctgccgggtgagaatcgacggattgcattggagaatgcgacgcaggcgt

SEQ ID NO: 913 - DNA, 3163 bp, Unknown
  gut microbiota DNA sequence
tctcttcagtgggaatggcaatgagctgcagcgacaccaacagattccttaggatccgacaccggcacgtccggcctggtatgcgggttatggcagtgctcgatcgccaccgcgggcgaacccgtgccccacatgacatggaagtccttggatacggccgagatcatcgcgcacatcgcatccagggcgaacggatcattgtccaatacgggcgatacggatcgaccgcgccgcagccccggtcatgtcatcatgtcccatgccgctcatcgtggccacggtcgcagccggacaaaacctgctatcatgcgattacttgacacgatgttgcgcttttggccatgcgcaggttgaatgggattgcgccacgaaaggatatgccatgaacgatctgctgattatcgacatgctgcccacgtacgggctgctgttctacctgctgatctcggtattcgtcttcgtggggatgccgtggtctgcgccggaggacctcggatcgtggcctgctgcgttttgccgtaggcgcgttcttggttgtttccgcgctcggcgccgtgttcgctgcgctggtgtatatcatggcagcgcctttggcgcagccggatatggtcgacttctaccgcatgtaccggccaggagctctgatcttcctgctgggattgttcatcatacaatttgtcttcggcgtcgctgccgtgtatcggggaaagtaacctggtatatcctgcgataaacgcattgacagacacttgctgcctatctgtaaacacaccctagataaggcttgcggccgttggccgagcacagtagtagtgtggtctgctgtgtcaacaggaggagtgtgaccaatgcggctgatcgagacatggctggcggaccaggaacgcgcgtttgacttgttcgcgaaattcccggcggaggagacgggattcgagaacccagcggccggcatgaatcgtgaacaattcgccgcatacgtgcgagggttgcgtgatgagtcgcttggcgtcggcctgccggacggctgggtgccagccaccaaatacattctcgtcaacgatgagggcgactatgtgggcatcttcaacctgcgtcaccggctcaccgacttcctgcgcaacggtccgggccacatcggctacggtatcgcccgcgaataccgcggccacggctacgcgaccgccgggctcaagctcacgctcgccaaggcccgcgagctcggcatcgaggaggcttacctgagtgtccacaaaaccaatccggcaagtcttgcggtgcagcagcattgcggcgcacgtatcgaccatgaagacaagacggaatactacacacgcatcgccacctgcacggagagcgatggcctctatgcgcgaggcgattgacggcgcctcttgcgtgtaaatggccgattatcaatcggttttaatcgatttcgcctcggtcgataaagtcgccgtcgaggaaccaataatcgtgcggatttccgcgtaacgccatgaacggcgtgagttccacgccctgtgtctcagatctgctcagcagataggctcggataatccacggatactccagcacgcccgacttgagggtgatgatttgctccactctgctgccgctgacgccaaaaaccctgccgccgttcggcggtcagacccagccggctcatgttctcctgaaattcgcggatagtcgccgcgcgttgctcactgttcaaagacatggcttcatggtagcgccggacgcgtgtgggaggtcgggctgctcactggaatacgccgtcagagtagttgatcatttcgagttccgggcccatgtcttcggtttgagtcaggccggtctcatggaagccgatgtgacggtagaaaccttgggcgttggtgttgaatccggcgacccacaaggcgagccgatcgttgccgatggcgcgttggcccgcctcaaccaaagcacggccaacaccatgacgatggcaagattccaacacatatagcgaagccagttccgcagcctcggaccgtttgattggcgaacgcggcgtttgcagaagctcagcaaaaccaatcacgtggttgttctccaaagcgaccaatacgacctgattggggtctttggcgtggctgcgcgtcagtttgagcgcgaattcgggagtgatcgcatccacgatttcctgcggaatatgcccctgattgagttcgcgccacgtgcacgactgaacttgggccttttcctcaaaccatggcggctcaatcgaaacaatacgaatcgtcatgccgcccatagtaggccggttcgtgagtacagtgtcacttgttgtcatgtgattgcttggcatcaggttgtattgaccgtaatggaggccactggatcagcgccggaaactcatggaattcgggctattatgatgggagtaagaaaagcacagcacaattgaacataaagacgatctggagcattgcatgagcgtcaatacggcatttgaaaccagtgatttgcccaaagcggagtttatgtttcctgggcctgaacgcgatcgcttggtgaagctcattctggacggcgtaaaaaccgccaccgctgcgctgatgattgaatatgaggaagaggtcgaaccgctgccgtgcgttggcgcgcattcggtgttggtggattccgatgaacgacccgtagccgtactcgtcaccactgcggttgacgtgattccgctcggaaaagtcactgaccggtacgccatcgatgagggtgaaggcgacgtcacggcggcccaatggcggagcgcacacgaatctttctggaattcggcggaataccgcgatgaattcgccaacccaaactttccgttgaacgacaactcgctcatagtattcgagcatttcgaagtcgagcaacggttggagtcgaataacgcattaggttaggcgatagcaaaacttttcttcaggcaactctccgagctccgcaacatctgaaggagtgcccatgtccactagagcgacagaagcggaaagcgtgttgaaggagcatatgggatatcttccggtatcggaaatggagcgtcgaggagtttcccgcacggagatttcgcgattcgtgcgtgaagccaagcttgagaaagcggcaaagggcttatatgtttcaccgaatgcggagtccgatccgctgttcg

SEQ ID NO: 914 - DNA, 2664 bp, Unknown
  gut microbiota DNA sequence
cagacgggaaaccaaccagaggaaggaacccgccgcgctgagcggcaacaggtgaataacttacacgcatgtccggattcacgcaaatcaaggcgcacaaaaaccccaggaatcggcataacagcgcggttccctcggcgtgtcgcacagagcccactttgctctgatgaggctaggttaacccctcaaatgtttctgaaaagcatcaaatccactattcggctggcgtgtcgcgagagttttcagcttgtcggccctgcgttcatctctcggcaaccacactgccggcgcacaatcggcgcatgacagcgctccgtcatcggatttcgttcatgaatcgcgggtatacctgtagttatgaccaagaagattgctgtattaaccggggcgggcatttccacgtccgccggcatccctgatttccgcggtccggacggtgtgtggaccaagcatcctgaccaaatgagcgtttacgacatcgatctgttcctgcgcaacaaagaggaccgcgagtactcctggcgctggcaaaaggaatcgccagtatggaatgcgcagcccggcactgcgcataaggcgctggtcaagctggaacaagccggcatgctgacgctgctggccacgcagaacttcgatgcgctgcatgagaaggccggcaacagcgacaacgtcatcgtgaacctgcacggcactatcggcacctcgcattgcatgaagtgccatcaggaatatgccacggcggacatcatggcccgtttggatgaagagcccgacccacattgccatcgcaaactgaagtatcgtggcgatatgccgtgcaatggcattatcaaaaccgatgtggtgtatttcggtgaggcgttgccggacggcgcgatggagaagtcgtacagtctggccaccaaagccgacgaactatgggtaatcggatcgacccttgaggtgtacccggcggcgagcattgtgccggtggccgcgcaggcgggcgtgcccatcaccattatgaatatgggtcacacgcaatatgaccatcttgcgagccgcttgattcatgaggatatcgccgttgccctgccgaagttggtggacgagacgattgcggagaacaagtagccctcagcataacgaaagcgccggtgggtgggttaagcaactgatgattgtcggttaaccacccaccggcgcttttgcgccacctcccgccagcgggaggtattggagcacacttctgcgcggcttcccgccagcggtattggaatcagtagatgcgcttgggctggaatccggcttccctgagtgccgcgaggatgcggtcgatgtgctcggggccgttggtctcgaccgtgacgccgagagacaccgcgttggtgtagtggccggatgccttgaactggtcgtgatcaagctgaatgacgttggcgcgctgctcggcaagcagggtggccaccttgacgagctggcccggagtatccggcagctcgacctcgaagttcatgatgcggccgcgggcgatcatacctttctgaatcaccgcacccatggtcacggtgtcgatattgccgccggacataatcggaaccaccacgtgcgggccggtggcggcggcgaacttgcgcgaacgcaggttcaggtgttccagcgcagccagcgaaacggcgccggccgcctcgaccaccagcttatgcttctcgagcatgagcagaatcatttcgttgatgtcgcgctcggtgacggtgaccagatcgtccaggaactcgttaatcagagcgaagggcaggtcgccggggtgcttgaccgcaacaccttcggcggaggtaaccacatggtcagccggagacacacgacccgcggccagtgagtccttccaggccggtgagccctccggaatcgcaccgattacgcgcacttcaggcttgaatgtcttgatggcgagcgccacgccggcacccaggccaccaccaccgagcggcacgaccacgtcagtgacgttcggcacgtcttcaaggatctccagaccgatggtgccttggccgcagatgacttcgtaatcgtcgaatggcggcacgtaaatcatgccttccttgtcggcgagctcagcagcgtgggcggcggattcatcgaacacatcgccgtacagcaccacgtcggcaccgtaggccttggtggcatcgaccttcagcggcggggtgatctgcggcatgcagatggtggccttggctccacgttcgcgggccgcataggccacaccctgggcatggttgccggcagacgcggtgacgatgccgtgagcgatctgctcttcggtgagcgaagcaatcttgttataggcaccgcggatcttgaaggatccggtgacctgcaggttttccggcttcaggagaatctcatggccggtcatctcgctcagcaccggagaaggaatgatctccgtgtggcgggcagtgcctttgagtcgttcggcggccagcttcagttcggctgcatgatcacgttgcagcgccttcaaaacatccttttgttccatagctttccattgtaagcaccacaatgccgagagacaccagctatctcgcttcacagaggtacattcggccttttgcagacagctatctgttttcataggggtaccgagcatcgaaaaccccgagtataagccttgatttt

SEQ ID NO: 915 - DNA, 50678 bp, Unknown
  gut microbiota DNA sequence
cggttggcgagaccatcgttattgaatcgcgcctgatcggtgatttcggtgatgcagaatttcggaatcgtcagattggtaaccggcccggatcgttcggcctcggctacgatgagcggcgcattcggcccgccgaacacatccacgctccagccgtcttcctcaatccacacggaataccggttcttgatgattaccgagccgccgcgcttgatgagttcggccgcgatacgcgtatcgatttcgcgctcgacttcgtagcgcgtgccgcccacggacggacctttgacggtgacatatgcttccgagaaccggtcgcggtattcgtccagcacggccaccggatttacgtcgggcgtcatgtcgacgtgaaccttgcgcgagaccagccgcacgcgcaaggcgtaattgtcggcatgcacgtagtagctctgaatgatgagggtcggggcgtcgccgtcgtcgtattccgccggcagttcgcggcagaagaagcggcgttcgtattcgaagtcatctgtaggttccgacataaccccattgtagagccgataatggcgattttctcgttattttggcgacgtatgtgccgcatgcaacgtgatgtggtgtacagtaaagaagttgctcgggtttgtagctcagtggatagagcgtctgtctccggaacagaaggtcgtgggttcgatccccatcaagcccaccagcatggctttcggctaaccgccggaagccttttgcatattcggcgcgtgcaaggctggtgctggtgtcggcaatggcaaggccggtgatgccggctcgcttgggtcgtggaaaaaccgtccggtttggcgagaacggtagccgaatcgtctggaatcgtctggaatcgtctggaatagcaaggaatagtctgttgatggccgtatgccgggcatcatgcgcgctaaacgcgactttgctcagtagactgctacgtaatcggcattgccaatcgttgctgatcgtgcgattggtcgtagccggtggtgatgtgtaccggcgccggccgcagcaggtgggcgcccccaagatgagaaggagcacaatatgagcgaaaagatggaagccgtagccacttccgaggcgccggccgcgctgggcgcatacagccaggcggtgaaggccaatggcttcgtgttcgtatccggccagctgggcattgatccggccaccggcgaactggcgggcgagaccgctggagagcaggctgcacaggcgctgaagaatattaagcacattctcgacactgccggtaccggcattgagcatgtgtgccgcgccaccatctacctgaagaacgtcgaggacttcaaggaagtggacgcacgttacgctgaggtgttcatcggctccgtcaagcccgcccgcgtggcctttggcaacaacatgattcccaagggcgcgctcgtggagattgacgccatcgcggtggagtgattcgaacgttttcccggcggcccgtctgcgcgcatggtgtgtgcagacgggccgccgcgtattgtgcgacgcattcccgggaatgttgcgctggaatcgttgggcggtggtccgtgccacaatagagaccatggcatccaaaggaaaaccgtcgccgcgttcggccgtaagcccgctgagtgatgagcaggtcaagcgtctggccgcccgccacacgcttgtggactcgacacagtattacccgaccggcccccgcacgcccaatcagccggaaatcaacgcccagaatcccaaggccaccaaacgactgctgggaggggtgtccattgtgttccgcgccagctgcaagaccaaggcctggggcttggaacaggtgccggaaaccggaccgttcatcaccgccgccagtcatgtcaccatgtttgatgtgttcgtgccaatgatgagcctgttccacatgggccgccgcccccgttacatggccaaggccgagatggcgaagtggccattgatcggcaagtggttccagttggtcggcatgcagccggtgcagcgtcattcgggcaaggccaagcagatcgaagagacctcgattgatattctgacgtccggccgcccgctgacggtctggccggaaggcaccgtgacccgcgacccgaaaaagtgggtgatgagcattaaggagggcgtgggatatatcgcccttgaatcctcgcgcagactggggcatcaggtgccgctgtacccggcggtgacgtggggtgccgcctccatcaaccactggtggccatggccgcgcaaaaacgtggtgatgtgctatgaccatgcgctcgattactccgatctgcttgccgacatggactcatggggtgaagagccgcctgccgaggccgtgaacgagctgatgtggcgcgtgctcaaacgcatgaacacagtactggaggaaattcgtggcgagcagttccccgctgaaggctactgggactaccgcagtatgagtcgtaagccttggcctgaagccggcggcccgttcccggctgagaagtagccgcaccggttcccgtacggggagcctaggcgagtagcatggcacaagattgtgccgatgaagttgcgcgacaagcgaaggtaggaatttgatatgggtaaaaatataacggttctcggtgcaggagcatggggtactgctttcggccaagtgctggcggacgcaggcaacacggtgaccatgtgggccaaggagcagcagattgtcgagggcattcgcgatcaccaccacaacgccgtgcgcctgccgtccgtcgaaaagttgccggacaacatgaccgccactggggatcgcgccgaagccgtcaagaacgcggacatcgtagtcgtggccatcgccgcgcagttcgcgcgagtggcactcgtcgaattcaagggactgattcccgatcacgccatcgtcgtcagcctgatgaagggcatcgagcgtggcaccaacaagcgtatggacgaagtcgtccgcgaatcccttgacttgccggccgaccggttcgccgccatttccggaccgaacctgtccaaggaaatcgccgatcgtcatcccgccgccaccgtggtggcttgcacgaacctcgataatgccacgaaggtggccgaggcatgcaccacctcctatttcaagccgttcgtgaccaccgacgtcatcggcctggaaatgtgcggcagcctgaagaacgtgaccgcgctggccgtgggcatggcccgtggtgccggctacggtgagaacaccgcagccatgatcgaaactcgtggactggccgaactgaccgcgctgggcgtagccgctggcgccgatcccaagaccttcttcggcttggccggtgtgggcgatctcatcgccacctgtggctcttcgctgtctcgtaactatacgttcggcgcgaatctcggcaagggattgacggtcgaagaggccaccaaggtcagcaacggtgtggccgaaggcgtgcccaccacggatgcggtggtggctcttggcgatcagcttgatgtgccgaccccgttggcgtatcagatgagccgcgtgctgaacgaaggcatttcctgctcggagatgcttgccggactgttcggtcacgaggttaccggcgaataacgagagaagcgacgtatacgtggcgtatacgttgtacgtgcaaagtcgcgtggcgtatacgtcgttgacgtgcacgagtagactggtgtgcgtctcttgtgcgcggcgttccgagcgcggttcggtccggttggcggtgcaaagcataggcttgaaaacggttgtagtttcaacaaaaggatggttatggccaagaagcgtgttgtggtgctctatggtgggcgtgcagacgagcattcgatttcctgcatctccactgccggtgtgctgggggccatggacactgaacggttcgagccgattccggtcggcatcaccaaggacggcaagtggatcatcaatggcgaagatccgcgtggctggaacttggacggcggcgagctgccgaccgtaaagatcaccccggaatcgcgcccggtgatgcttgacccctctcgcggacaggacggtttcttcatcggcgagcccagccacatcaattccgccgattccggcttcggcaccagcttcgtcagcatgtccgacccggaaatgcaccatgtgctgacctcccttggccatgtggacgcggtactgccggtgctgcacggcccctatggcgaggatggtacggttcaaggcctgctggaaatgatgggtgtgccgtacgtggggtgcggagtgtttgcttccgccgcctgcatggataagcattacaccaaggtggtactggatgccgccggcattcccaccgcgcccggtgtgacggtcgatgcgcgcaacttcaccgccgccgatgtgcttgccgagatcgaggacgccggtcttacttatccgctgtttgtcaagccttcgcgcgcaggctccagcttcggtgtgaccaaagtcgagaaagccgatgaccgcgagacccagcaggatcgtctggccgccgccatcgccaccgccggcgagcacgactggaaggtgctcgccgaacaggggattgatggtcgcgaaatcgaatgtgccgtgctgtgcccgaaggccggtgacgagcccgaggccagctggcccggcgaaatcgtgctcgatcatcagaacgacgaccagttctacgatttcgactccaagtacatggatgcctccgccagccacgtggaagtgcctgccaatctgccggtcagcgtgcttgaggacgtgcgtgacgtggcccgtcgcgcgttcaaggccgtggatggtgccggcttgagccgtgtggacaccttcgtgacgcctgatggcacggtgatggtcaacgaaatcaacaccatgcccggcttcacgccgatttccatgtatcccaaggcttgggatgccaccggagtgagctacaccgaactcatcacgcgattgattgagggcgtgctgaggtaagtgtggtgcggaatcggccgcaggtcggttccgctattgacacatcgcccatacctgtcagtaattcatgccaagttttcctaagttcaacaggcgtacagcaaatggcgaacgcaattcacttgcgcgccagtgtcaggacagattaggcgcatagtttcttttcttggattcacgggccgcgcgaatgccgcgcataccaagcccgactccccagactgtcgtctggatgatgttgagaaaaggaacattatgaacaacctgcgtaagatcgcggccggctccctcgccgccgtgctcgcgttctcgatggccgcctgcggctcgagcaacgcctcctccgatggcaccggcgaaagcaccggcaaggccgtcaccgtgaacgaaaagtccgccaaagccacctccctcgccgacttcggcaccatggaagacctcgagaaggccgccaaggaagagggcgcgctgaacgtcatcgcccttccgcacgactggtccaactacggcgaggtcatcgagagcttcaagaagaagtacccggagatcaaggtcaccgagctcaacccgaacgcctcatccaaggaagagctcgacgccgccaagaccaacaagggcaccgacgccgcccccgacgtcttcgatgtcggccaggccatcgccgccacctccaccgactacttcgccccgtacaaggtgcaggcctgggacaagatcccggacaccgccaaggacgccgacggcgcctactacgccgactacaccggcatcatgtccgtgggctggaacgccgacaagtacggcgacatcagctccctggacgacctgctcgacccgaagttcgccggcaccgtggccctcaacggcaagcccgccgaggctggcgccgccttcaacggctacctgatggccaaccagctcgccggtggcgacatcaacaacctgcagcccggccttgactacttcaagaagctcaaggaagccggcaacctgaccaccgtcgacgtgaccaacggcaccatcgactccggccagaccggcgtggtcttcgactggacctacaaccaggcctcctacaagaaggagctcaaggacaagggcgtgaactggaagtacaagaccttcccgaaggcccaggtcgtcagctactacaaccaggccatcaacaaggacgcgccgcacccggccgccgcccgcctgtgggaggagtacctgtacaccgccgacgcccagaacctgtggttcaagggcggcgccaacccggtgctgctcgattccatgaaggaagacggcaccgtcgaccaggccactctgaaggacgccatcaccatcgaaggcgagccggtctcctacaccaacgacgactccacccgcatcaccgagtggctccagaacaactgggacaagacgatcggcaactgaggcacagaccgatgaccgccgcaatcgcacccattgcatcgaacggacctgctgccgccaaggctgcgggtccgtccgctactcccgcttctcctctctcctcggcgatggccaagcaccgccaggagctgggcacgctcgccaccacgctcccgttcttcgcctacaccgcctgcttcctgctcgcacccaccgtcatcgtgattgtcggtgcattccaggatcgcagcggcaacttcacgctcgcgaacttcaataagatgttcgaggccaacaccatcgccgcattcggcacctcgattctggtgtctttagcatcctctctgatcggcgcagtggtgggcgcgctcgcttcctacgcactggtcattggtgccaagccgaacggcctgctgcgtcgtatggtctccgccatctcctccgtgcttgctcagttcggcggcgtgatgctcgcgttcgcgttcatcgccaccatcggcatcaacggtatcggcaccatgcttatcaagacactgaccggctacaccgtgaacccgaactggctcagttcgttgccgggcctggtgaccatctactgctacttccagattccgctgatgatcatcatcttcctgcccgcggtcgattcgatccgtccacagtggcgcgaggcatgcgaatccctcggtggcaacacgttccagtactggacgcgcgtggcctgcccgattctggcaccccgcttcatctccgcgttcctgctgctgttcgcctccgcgttctccgcatacgcgaccgccgcggccctgttctcccagcgttcgattctggtgccgcttatgatccaaggtgccatgcgcaacgaactggaccccaaccagcagggctttgcccaggtgctggcattcgcaatgatcatcgtcgtggccatcgtcatgctgttgagccacgccgtggaaaagagggccggacgttggcaatgaccgaaacttccgcaaccaagccgccgcagctgcgcgccgctcgtgcgcgtaaacagagcatcatcaaattcgtgatcctgttcgtcaccctggcgttcctgttcgtgccgctgctggccatgctcatcttcaccctgcgtcacccgctgtccggccgctggtcggccgcgccgtggatcgcgattttcaccggcaacggcgagtcgctgggtgccgacctgaccgtgctgtggcagggcatcggcacctcgctggccctgagcgcggtcaccgtggtgatcatgctggtgctgctggtgcccaccatggtcatcgtgcatattcgctccaaggttttggagcgcgcgatcgaatgggtggccacgctgccgctgaccatcccggccatcgtgctggtggtgggtttgggcccgatctaccgctggctgtccgccgacgtgctgagcaccaacccaatctggctgtgctttgcctacgtgattctcgtgatgccgttcgccttccgcgcgctcgccgtggggcttaactccatcgacgtcaagacgctggtcgaggcatcccgctcgctcggtgcctcctggcccaaggtgttcttcaaggtgatcatcccgaacctatggcagtcgattctctcggcatcctttatctccatcgccgtggtgctgggcgaatacaccgtcgcctcgctgctcggccgtatgaacctgcaggtcgcgctctaccagctcggccagtccaattctcaaatctccaccgccatgtcgctgctggctctgctcttcggtgcggtgctcctcgttgcgctcgacctgatctccgacgcaatgcgcaagtcaagggaaggtaagtaacctgatgaacagcaattcgattttcacccgtcgccatgccggtgccgatgccgcggcttctgtttcggcgcccgccaccacgtccgctgccgccgaggacgccttcaagaacgatcccaccgccaccctcgaaggcgtgcgcggcaaggacgtgaccaaggccgccaaggccctgctcaaagacagcgtcaagcgcggcggcggctccatccagatgcgcgacgtcgtcaagatctaccccggctccaccgttcacgcgctcgacgacttcaacctggacatcaagcccggcgaaatggtcgtgctgctcggcggctccggctgcggcaagtccaccgcgctgcgctcgctcgccggcctcgaagacatccagggcggccgcatcatggtcggcggccaagacgtcaccggcgtgccggtcaacaagcgcgagatggccatggtgttccaggcctactcgcttttcccgcacatgaccgccctggagaacgtggaattcggcctcgaagtgcgcggcatgggcaaggcagaacgccgcaagatcgccatggaacagctggagctcgtgggacttgccgatcaggccaagaagtacacgcagcagatgtccggcggccagcaacagcgcgtggccctggcccgcgcgctggccgtcaagccgcgcgtgctactgctcgacgagccgctctccgccctcgacgccaaggtgcgcgtccagctgcgcgaccagattcgccgcatccaactcaccaccggcaccaccaccgtcttcgtgacccacgatcaggaagaggcgctggccgtggccgaccgcatcggtgtgatgaacaagggcaagatcgagcagatcgccgctccgcagaacctgtaccagcgccccgccaccgagtacgtggccacgttcattggactcaccaaccgcctgcccggcgcatccaatggcgacgaggccgtggtcttcggccagcgcgtgccgctgctcgccggctccgccaagggcgattccgtggccgtgctcgtgcgcccggagaacctgacgctggccttggccggcagcagcgattcgcacgtcggcgaacgcgcccgcgtggaggtcattcacttccttggctccttggtgcgcgtggatacggtcatcacctccggcgaataccagcgctggaacaagggcgaacagctcaaggccaccgtgcagctgcccgccagcgagctgccggccggtctggcggtgggcgatgacgtgattgtcaccccgcgtccggtcgccgcgctcgcctgctgaatggcgttgcgatgatcgtgcggttctgttctgtttttgtgactgtacgatcgtcgaatggcttatcggcaatgatgtgtgtgggacggcggcgatttttgggcgattatcgcgtgccgtcccacagcaatcttgcagagtaggggactttctcggcattgggaatgattgacgttgatcattccttgcccattgatgatttcctcccccattcccaatgcaatcgaaacgccgtgccgtattcttgaagagtattgcacgtgtgatcggtccgtttgcggccagtaactatgggggataagtatgagcgaaccaatgccgccggcgcagcagccgcaggcacctcagcaatcgcagcagccgcaacaatctccacgcgattggtggttcacggcccatcgccggttttcgacaatcggctcggcgctcgccattatgatggtgttctggatcggactgaatattctggccactgaagcactacgaacgctgcttggcaccgatgtgcccgcttgggctgtgctgctcgcctcctccggaccgctgtatgtggtggccatgccgctgagtatgttggccttcactcgcgtaccggttattcgcacccggcagtaccccatgaaggcgggggagttcattcagattttcgtcatgtgcattccggtaatgttcttgggcaatatgattggcaatatattgtctgccggagccactgatggtcaggccaccaatcgcatcaacgacgtgattcttggcagcgactggcgggtgaacgcattgttcataggcctgttggcaccggtttgcgaagaatggatttttcgcaaggagattatctcccgcctgcgccggtacggagagaagaccgcaatcatattctccgcattggcattcgcgctattccatatgaacgtgttccagttcttctacgcctttggcctaggactgatgttcggatatgtatacacgcgcacctcccgactgcggtattcggtggctatgcacatgctgatcaacctgaacgggtcagtactcgccccattggtgatacaacagatcgatccccgcatcctcgacggcacggtcagcgaggccgaaatcatgcgtatggctgaagccggcaacatgggcgacatgggcatcatgatgttgtacggcacagtgatgttgggcctctgcattgccggtatcgtactgcttatcaccaagcgcaagagctgggagttctatcttgcgccagaggagttgcctgcggggcttaaaatacgcaccgcctatgccaatcccggcgttatcgcgtacctactgttgactgtgatgcttaccggttggatgctgttcgcatgactgtcatagccggacccagagaggcgagccgggagatatcacagattgcctgacgagccgccatcttcaacaaggtattcggtgcccgaaccggcgatggctcgcgccgccatatctttgatggtggaaggcagcacaccctcgcgcgcgaacacaagcacttggccggtcatgccgtaaggggagaagccggtgaacttgaccaatggcggctgaccctccagcgccacgtcggcggtggctttggttacgcggtcgagaatatcctgactgatcgcagacgggtcgccggaggccttggccgtgaactcaagcgtggccatgccttcgctgaccggcgtgagcttggtcagggcggccgtattgagtaccgaattggggatgaccatcatgtctccggaacgggtgcgcaccacggtctgacgccaggtgatgtcgtgcacggtgcctgtgacgccttgaatggtcaccagatcgccgggttggattacgcggcccagcatcaggccgaagccgccgatgatgttggcgattgtatccttcagacccagcgagatcgccacacctccaacaccaagggcggtgataagtgtggtcggattgatgccgaatacgggctgcagtaccatcgctgcgccggtgacccagatggtcacgcgcgtgaggttcacgaaaatcgaggcgctgggaatctgagaattgtccagaatcttgcgcaacacgcggctgatgacgcggtcggccacaaatacgatggccaatacaatggtcagccagatgagtttgccggcgttcacctgaaaccagcgtgcgatgccttctgcatattcagtcatacgcctactgtatcggtcgtttctggtgaagtcgtggagacggggtggcagaaagcggaatcggcctacggtcgattccgctactcctggcgttcgcggcaggtctggccgaggccgcgggccagtcgaatcggatcgagaatctcgtccaactgctcggcgggcaggtcggtgcgttcgccggccacctcgcgcacggtacggccggtatgtacggcttcggcggcgatgtcggccgcgtgctcgtagccgatgtagtggttgagcgcggcggaaatcgacggtgaggactgggcgtatgaacgccccaggtcagcattgatttcgatgccttccacgcagttgacgcggaacgtctccatggcgtgcgtcagcaacgccatgccggtcagcagctcatgcaccatcaccgggtcgaaggcgttcagctgcaactgtccctcggccacagcccagttcacagtcacgtccatgccgaaaatcgtgaagcagcactggttgacgcattcggggatcacagggttcactttggccggcatgatcgacgatccggcctggcgagccggcacgttgagatcgttgaaaccgcagcgcggcccggaattgagcagtcgcaaatcgtcggcggccttcttcaggtgcacggcgaggctcttgatggcagccgacgtggccacgtacgcgcccatatccgtcatggcggccaccggatcgggcgcggcggtgaccggcagcccggtgatttgcgccagatgcttgatagcggacttgcggaatcgcagatccgcgcaaatgccggtaccgatggcggtggcaccgaggttgagctgggccagcagcggcaccacgcgatcgaatgcagccaaatcagacttcaacagcgtggcaaacgcatgaaattcctgaccataggtcattggtacggcgtcctgcagctgcgtgcggccaatcgtcacgtcattgatatgtttgtcggccagatcgtggaaggccttggcgagtttcttggtggactcggcgagcggcccgatcgcgtcgataagcgcgagtttgcaggcggccgggtaggtgtcgttcgtggactgcgacttgttgacgtcgtcgttcggatggatgtatgtgtaatcgccgcgctggcggccggcgatttccaacgcacggttggcgatcacctcgttcatgttcatgttcgacgaggtgccggcaccgccctgcatcacatcgaccgggaactgatcggccagtttgccggcctcaatttctaggcaggcggcgcgaatggcctcggccttggctgggtcgatcaggcctaattcctcattggcgatggcgcaggcgcgcttgaccgtggcataggcgcgaatcagctcgggatgttggctatcggtgatgccggagaccgggaagttgccgatagcgcgctgggtgtgaataccccagtagacgttcgccggcacctccatctggccgatgcagtcatgttccagacgggtcttgttcgatgtttcgctcatgcttccatcttcctgtgcgtgggttggaaacgccagcatgagaggctgattgcgccttgtgagaaacctcacgcgaggttcgtgcggcggaaacaatccagactcgctggttttcggtcaagcggtgtacccggggaatcctgcggggccgttcgacgatgagatggtggatggcgcggcatgcgtggcggcgaccggcatgccgggggcggtcgaatcctgcgcattgtgcacgaagatgcgattccagtaattaagcatgtccttttggctcatggccaggtatatgcccatggccagcacggccacatcttctttaagcaggtctttgatttcgatggtgtcgctcaattcgggccaacgttgcagcacggcgagcatgccgcccacggtgaactcgaccatgagatcggttttcaggtcaaggttcttggggtcgcgttgcaatgtgctgagcatttgcagacggcagaagtcgcgcagcgattcggtcagttcaagcgtgctgtgcgggcctgccaacagggccaggtggtcgaggcgctgacgctgctctggatcggagagcgtggcggtgacgcggtctcgccattgttcctcgggattgccgttcggatcgggggtgcggttgatcggaatcgattcgacctgatgcaggatggctgaatcggccaattcgggcaggctggagaagtgatagtagaacgaattacggttcacgccagcctcacgcaccacgtcggtaacggtgatcttgcgatagtcgcggtcggcgagcaattcccagaaagcgttctcgaggcgttctttggcgggcagcacctcggaatcatggcgtggacgtggcatctcttcctcctgatgcaccagcgtgatatggtcacgctgtctaataacttattgggcagtataactattatttgtggacatgtctatgagctaatcggcgatttcagttgcgtcctccgctgatggcgaagctgtggtgccggcatcggcatcagtatcggctctggccggagctgcgctatctgctcctgctgcagtttctgctgggatctcggctgttgctttggaggtcgcagaacttggtgcggaagccggggcgggcgtcggcttgcgtttggccgtggacgccttgaacagtatcgccagggcctcaaccaaatgacgccggtctgcgggggtcagcccaacgtacgcgccaagcatcgccggaatcgaagcggggaagttgctcatcacctcgctgaagctggtggcgccgttggcgtgcagcacggtgaacagcgcatccaccgcacgctcgcgctgttcgggcgtaagcgtggcgatccaatggttcagctcctcgttaaacaactgcgagctggaactcaaatccggctcggtgatgaactggtcaccatccaatagccaggtgaaggcggaatgctgcatgatgccatccgaatcggaagagaccacgcggcaaggctccggggtctcgaaaatcatgcccacaatcgacgaactcggcacgattttcgtcaccttcggctggatggtgcggtaggcggggctggtcacaatctccggcgggaaaccggggccatccagtgaatagacatgctgaatgcgcttgcgcaccttgggatcggcgttcatggccgcgtaaatcgccagattgcctcccttggaatggccgaccagaataatcggaccctcccacagtcgcgccaccatatccagataggcgctggctgaacgttgcgccggcaccggatactggaaagccatattgaaatcttccttccatccgatgagcgaatcatcggtgccgcggaaggaaataaccaacgtgcctttgtaggtcggctttcggcgcttgtggccgtcgggcagttggaaggtggcggcggcgaattgggtttgctcaccctgattgatgtgctcgaccaccgcgcccaggcgaacgttggcgtagcgggggttttcgcctgcggcctggaacaggtcgtgggtcaggtccgggttgaccactgaaaccatttgggcttcgtgcggcttgtcgtcggcatgtgtttccggcgaacgatgcagctcgcggttggcctcgtcaaggcttaccgattcaagctcgggatgccagatacccttcagccagatcagtggatgcttgggttcgaaagcgcgaatgcgtgcggcgaacgagcctgaccgcgtctcatccagcatcaacgtcggacagacactggccacatcctcatagatgagcgtggagatgatcaaggcgtcgatttcgttgaacggcaagtcggcgaaggagcgcgtttcggtgtgcgcgtaatcgataatgccggtcatgcgcacctcctgcttccgttgatattgcatatccccttgggctgcgtggtcttgcgatcgcgtgcggccgtgcggctgcgcgcagcaattaaccatatgcattccattgtagggattgtacggttttggccggcgcgatcgagcaagactgcaccgacggcgaacaattcgtggaaggattcccgtcggcttgtcgaaaattgtcgggtagcagggttgcgatgccagccagccgaccgccctccggcgctacgcgccatctcccgccggcgggagggttaaccactcaatcctttttgacgaggcggaccgctgggcccgtcaaaggttcggcagatcgaagcgcgccagatccacgccctcgagttcaagcaactcggccttgatgtcgagtcggccgccgtagccgccaaacgcgcggcccgagccgactacgcggtggcagggcacgatgatggtaaccggattgcgcttcactgcgcctccgaccgcctgcgcggccatgcggccgccgccgcgtcgttcggccaattcggcggcgagttcgccgtaacttaccgtcatgccataggggatttcggccaccagattccacacttcatgttggaatggcgtgccggcgggatgcaaaggcggcacctgatccgagccggggcgttcgccggcgaaataggcggtcagccattcgcgggttatacggaatacgtcgggttcactatcggattcgcgattcgaatcgagaacggcttggtgatcggtggcccaccaccagtcttcaagacagagttcggtaagtccctcgccgtcggaggccatcatcatccggccgatgggcgtttcgactgtggcccgcatcagttgtcgttgcgtcataccgccattatcgcgcgttgagggatgaagcccataccgtgcctgattccatgaaggacggcacgtcggcgtagtccgggaacttcacttcggcgctcgataatcgttggaaaaccggtgggacacgcgggggcttggctttttcctgagattggcgtatctttgtcacctgttgcctgtgaaggtaacacatgcggacatagcttagttggtaaagcgcaaccttgccaaggttgagaccgcgggttcgagtcccgttgtccgctctcggatggttgattcatgctgattgattcgaccggatgatgacccgggcggttggcgcagtggtagcgcacttccctgacacggaaggggtcacaagttcgaatcttgtatcgcccactcgatgaatcgccggcagaatgttgccggttttttcatcacaggctcgggcgattggcgcagcggctagcgcacttcgttcacaccgaaggggtcgtaggttcgattcctacatcgcccacccgagattcacgctcgttggccatgtggccgcgagcgttttttcataatcgatgtattccgattatgccggtccaatcggggtgcgggctagaatgccgcggagccggcagaatggcgggattccgccgatgcaacctgtggttgcgcgcgaatatgcaacctgaagatggtggcgcggaactggtttgccgtggcatagtgagggcatcggccgaatatgtcatgatgagcattacctatgaagggacactccgatgagcttccgcgccaacctgcaatacctgcgcgcacaacgcaacatgccccaggaacagctggccatgttgctcggcgtctcgcgccaggccatctccaaatgggaatccgagaaggcctatcccgagatggacaagctgcttatgatctgcgacctgttcggttgcacgcttgatgacctggtacttggcgatgtgagtgcgagcgtgaacgtgggtgcggccgcgcgcggcgcagcggagggcgaccatggctcggctgccagaaccgtaaccggggagggagccggggaacccgcgtatatgaaggatgctgatgggaacatcggtgaatcagcgcggtccggcggtgacggcatcaatggcccgagctccgcaaatgcattgcccggcgaaatgttgcacggaaccagttcatcacgtcccggcacgctggctaatgtggctgccttaccgcaggatctgaccggctacgatgaacaccgctgccgattcgcgctactgattgccggcggtgtcgcggcgattatcgcgggagccggcatcggcaacctgttcgattccgataattccattctcggcgtgacgccactcaacgattttctgacattcctgggcatctgcgtgggcgtgattatcgggctggcgatgctgattccgggcggcatgtcacataccgacttcaaacggcggcatccctatgtcgaggatttctatgctgcgagatgtcgccctcggcacagagttgccgagggccggcaaatcactcccgcgtcgggtccttttgcaggagcaggaagacgagtgccgcgacgagcaggacggcgatggagagcacgccgagcgaggcgttgccggtcagggacgtggtggtggccaccaggaaggtgccgatgatcgaggcggtcttgccgaagatatcgtagaagccgtagtactcgttggcgtgatccttggggatgatcttgccgtagtacgagcgggagagcgcctggatgccgccctggaacatgccgaccagaatcgccagaatccagaactccacggccgacttcaggaagaacgcggcgaagaacacgatgcacatgtatgccacgaccgccgccgtgatcatcactttgcagccgaaccggccggccaaacgaccgtagagaatcgcgcaggggaaggccacgaactgcgtgacgagcagtgccaccaccagctgggtggagtcgatgccaagctcggcaccgtaggaggtactcatcgaaatcaccgtgttcacggcatcgatgtagaagaagaacgcgatcatgaacatccacaacggcttgttcttcacgattttgccgaacgtgcccgccagttcgctgaacgtgccgcgcacggccgagcccagctggtcacgggtggcgcgatagtgcacttggcggtagctggtaagcagcgggatggtgaatgccacccaccagatggcggtgatgatgaacgaggcgcgcgtgcaagccaccgtggaccagtcgaagagcgacgggccgccgaagatcagcgcgatgcagaagatgaacggcacggtggagccgatgtagccccagccgtagccatgcgaggagaccttgtccatgcgctcgttcgaggtggcgtcgatgagcatcgaatcgtagaacgttagcgagccgttgaggccgatggtcgccagaatgtagacgactaggaacggtagccaggtcaggggcagggccattgcgcagcaggtgaccacgccagtgccgaagaagccaaggaagaacttgattttcatgccttgcacgtcggcgatggagccgagcaacggcatgagcagcgcgatgaccaaggaagcaatggtttgcgcgtagccccaggcggacacgatgttgccgtccgccggcatcagcgatttggcgtaaatggggatgacggcggtggacagcagcacgaatgccgagttgccgacgtcgtagatgatccacttcttctcgcgggcggtcagtttggcgctttgcggcaccggttcgtggacattcgtgggatcagtcatatacactcctcgacagtattcaactcaatctatcgtagaagcgcggactagggtaggggagccattccggttgaacggcggatgaataatgccgggcctctttctaaggggagccagagcaaaaatagctcccctcgctgaggggagctggccgcgaagcggactggggggagctacctatagtcgactattcgccgatcagcgcgatggcctcgtcgtaatcggggcattgcggcacgccgttgaggctgtgctggatggcgatggatgccgccgcgttggcgatctttaccgattcggccagactatggccctttgccagcatcgcgcacatcacgccggtgtggcaaccgcccgccgaacgggtgtgtacggccttggtcgggtatccctcgatatgaatcgtctcgccacctggctcacgaatccaagcgccgcgggcgccgacacgcaccaccagcggcgcgcgcagtgtagcgcccaagccgtcgcacaactggtgcatgaagtcgtcaagtccgccgccaatggtgactttgctgtcgtcgattggcgcaccaagtcgctcggccagcgtcatggcctcctgacggttgcaggaccagaccgggcgtgcgagcaccaggtcctcaagcatatggtcgttgaccaaacgcaacgtattggtggggttgatcaccagcgtgtagtcgcgtgcagccgggtcggtaccggccttgagcaggaatccgtccacgccggtggccgtgtggtccatcagtgtgttgccgctgatgtgcaccacgtctttgggctgcggctccagcgtgtcgaacgtgtccgagtcgccatgagcctcggcgccataggaagcgatgaatgtcttcttcggcgcgccggagctcagcaccacgcggaagccggaatcctcatcaagacgatcctggccgatatgcgtaatgccgttgtcttggaatgactggcggatgaaatgcgcccacaggccgttgcccagaatgccggcgtgctcggtcggcacgcccatgcggctggccgcctgcagcacgcgatagctgccgccaatggagggcttcggatgatcggccacggcgaatccgccctgtgccggcacctcgtccacattgagcatgatgtccacccagacttgacccagtgaaatcacgctgggctcgtgagtgccgatacctcgcctgagattcaacatgacagcctccttcgtcgtaagttgcacgaggcccccttcgtcccttgccgtctcttataccgagattatatgagagtttgctggatgcggaataggcaggccggcgtgttttatcgggtaaacgctacgatttgcagcgtaattcgccgctggcgaactgctggcgaactacttgcggaccgctggcgaaccaatgccgaaccgctcgcgaaccgctgatggcccactcgcaagttacgctcgaaccgcgcgtgaaccgccgaggttcgcccatgatacacgcaagagttgcggttgtcggtattgggctatatatttgtgaagttgtgtgttcggcatgtcgggtgaaaccggcggtcgaatgcgtgaaagacttgacacatcaaggttaagggagtccatcatggcagctcgttgcgcagtgtgcggcaagggaccgcagaccggtttcaccgtttcccattcgcaccgtcgtaccaagcgtagcttccgcccgaacctgcagtctgtgcgcaccacgattgatggcgagaacactcgtctgcgcgtgtgcgtcaagtgcctcaaggccggcaaggttcagcgcgtggccgcgtgaatcgcgtactaacgtggagcaaaacccgtttgagcttcggctcagcgggttttgttgtttctgcggcctaaagaggccgtgcgaatagaataggccaatatgagcatcactatgggcaccactctcgcttcgctggtcaccaacaagcgtcgcgtgtccgcgctcaaatcgctgggaatcgtcactgtcggcgacgccctgacctactatcctttccgcgtcaccgaaccggtgccgcttcgcgccatccgcgaggccgcacccggccagcagatggcatttgccgccgtgatacgagatatgcgcgtggtgccgatgaacgctcgccgcggctaccgactcgaagcgacggtcgatgacgccgacttcgcccggtctcgtcgcgtacccggcagtacggcccggctcacgttcttctcgtatcgtaaatcgtatgtggattgggtcagcgtgcgactgcgcgccggcacgtctgtggtggtctccggtatgcccggcgaatacatgggtcagctgcagttcacccatcccgaaatcctcactgtcgcgcccgtgccggccggagcaggagcggggcttgagggttacgctcggggcgcggcatccggcaatggtgcgtttgcgggaagtgccgatccgtatgccagtgcgcagtccgcgtatccgccggccgcgactgccccttccggggccgcgttgaaatacgacgccgataccgtgcaagaggcgcttacccgcgtctgccggccccgcccggtatatcacgccagttcgcgtatctcgtccgaacatattcatgagacgattctgggattgctgtggatgatgggggcccgcacgtcatccacgcctgacgggcaactcgctggcgctggggcagccggcattgtggctcccgcgactgacaccatcgccgtccaaaacggggaagagaagtccggcacgaccgccgaatccggtgctgaggcgctctcccaatccatcccagatgtgctgcccgaatcggtgcgcaaggccaagaacctcatgcatcgggctgaggcgttcctggccattcatgatccggcctccacggcccggttcaaggaggccatcgaaaccctgcgctatgaggaggctttcgtttcgcagacctcgctgctgaagtctcgacagcacgcgcacaagtcatcggcgcatccttgcccgctgaacgaggcgctggaaacagctcgagcgtcggtgggcgaagcggttgcggagccaagtacgcaaccagaagcatcggagcgcggttctgcgaccgatctgcctgatctgcccaatttgcccaatttgcgcgaccgcttcatcgcatcgttgccgttcacactgacagccgggcagagtcaggtggtggacgacatcgcgtccgatcttgaacgtgactggcccatgcagcgtctgttgcagggcgaagtcggctccggcaaaaccgtagtggcgctcgcggccatgctgcaggcggtcggcgccggctatcaggcggtgctggtggctcccactcaggtgcttgccgaacagcattacgagaccatcagcaagatggtgtcggggttgacccttgcacagccgggtgccaaggagaccgatgccgcggccgacgttgagggcgcgatgggcgcgtccggtgcttcgacggtctcttcttccaaggtgactgcggaaattcccgtcaccctgctgaccggtggtatgaagcttgccgcccggcgtaaggcgctcgctgcggccgccagtggtgagccgggcattatcgtggccacgcacgcggcgttttccaagaccttccaagccccgcacttggccttggtggtgatcgacgagcaacaccggttcggtgtggaacagcgcgaaagcctcaacgccaaaaccgatgacggcaccacgccgcatctactggtgatgaccgccacgcccatcccgcgcaccgccgccatgacttggtttggcgatctcgatatttcctggctcaccgaattgcctggcggccgcaaaccgattcgtaccgtggtggtcaatgaggccgacgccgccaccatggggcgtatgttcgcgcacattcgcgcgcgagtcgacgcgggggagcgggcctatatcgtgtgcccgcgcattgatgcggatgatgaggagaacgaaggcggttccggcgtttcggcagcagccggttctgcccgcggacgcgccgcagcatctggttccagtgcccgcacagctgcgggcggccgtgtgacgcgcgcggcggccgatgccatcggcatcgacgacccctacgaaaccttcgacgaaaatggcgaaaccgtggctcgcccgccattgcatgcggtggcggaaatcgccgaccggttgcagaaacttccacagttccaaggcattcggtttgcgactctgaccggccgcgacaaggatgacgtcaaaacccaggtcatggccgattttgccggcggcgagactccgatcctggtgtccaccacggtgatcgaagtcggcgtggacgtcaagcaggccagctgcatcgtcatctttgatgccgaccgatacggcctctctcagctgcatcagctgcgcggccgcgtggggcgtggcggcaccaactcgtgggcgttccttatttcccgtgcggaacccggctccccggccgagcaacggctcgaagtgattcaccactcgctcgacggtgccgaaatcgcccaagccgacttggaattccgcggtgccggcgatgtgctcggcgacgcccaatccggcggcaagtccagcctgaagctcctgcgcgtggtcaaggacgccgacatgatcgccgacgcccgcacccgtgccgggcagcttctggccgccgaccccgaactggcaggtgaggtccaactcgccggtgccgtcctcgacttcacccgaggcaacgaaaccttcctgacctccagctgaggcacctccagctgaggctagggctgcgcccccgtaatcgcacgatatagtttttccgtatgccgatcgtgaggaaatcacggtcgggaagccctcgaatgtgcttcagtggaggcaagaccattcgtacatgaggtactcgaagtgcatatatcattggtgcgcttcgagcaccccattgttgttcatgattggtatgcgcagatgaacctgtacagtgaaagctatgcgtgtaatttctggacgattcaagggtgtggcgcttgctacgccgaaaacgggtacccggcctaccacggatcgcaccaaagaggcgattttctcgcacctcgactcatggggagtgctggatgatgcccgtgtactggacctgttcgccggtactggtgcgttgggcatcgaagcgctgagccgtggcgcgcgagaactcgtggccgtggaaagttcccggcctgcggcggcgctgattaccaagaccttggcgcagctacagaagaatcgttcgtgggatgcttcgctcaaggcccgtgtgctggtcaaaaaagccgagcaagtggctggcggcttcggcgaaccattcgacgtgatattcatcgacccgccctatgcctatgagaccgctgaatgcaatcagctactgtccgatctggcggcgggcagcgccatcaacgagaacacggtgatcatgctcgaacgctcggtacgctcggatgatcccactgcccccggaggctggcaaatcaccgaaagccgcaactacggcgaaaccgccgtcttctacatcgaatccgcggatgacgactcggatatagagcgttccgacgattccgccgcgtagtgaatctcccaccgtgtggtgaattaatcggcgagccggcgcggatgggcggcggagacctcccagcccaaggccatcagggtcttgcgatcggccttatccagcgccttgcaatccagtgccgcgataaggtctggccgaatctcggcggtgcgggccagcgcttcgtcgcggcgaaaacggtccaccttgccgtggtcgccggacaacagcacatccggcaccgcaataccgcgccacacggccggcttggtgtactggcgatgttcaagcagtgcgccctcgccggtgtaggattcctcaacaatcgaatctgggttgcccatgaatccgggcatcaggcgggtgatggcctcaagcatcaccgataccgctacttcgccgccgttcagcacatagtcgccgatcgaatattcgcgtacgtcgacgccttgggcgcggtagtagtccgggatgcgcgcatcgtagccctcataccggccgcagccgaacagcagatggtcggcatggctgagctcggtggcgtcgcgctgggtgaacaacggggccgatgggttcgggaagatgagcaccggtgcgccggatggggcgggggagccggacggctgcgagaatcccagcagttcgtccagacattcgctccacacttcgggcttcatcaccatgccggccccgccgccgactggcgtatcatccaccgaatgatgcacatcgtgggtccagtcgcgcaggttgtgcgccttgatctccaacaatcccttggcctgggctttgcccatcaggctgaggttcatcacctcaaagtattcggggaacacgctcacgatatcgatcttcatgtcatccagcctaacggtagcccctcccgcattacacggccaccactacactattgcggtgatgaatacgacgatgaacctccccacccgcaaaaagcccgaagtgttgtccccggccggcaacctgaggggcctgaaaaccgcggtcgattatggtgccgacgccgtctactgcggcggcaaagccttcggcatgcgatcggcccccaaaaaccttagccttgaggatttcgaggaaggatcgcgctacgcccatgaacgcggcgctcgcgtgtacgtgacctgcaacgtgctgccgcgcaacaacgagatcgaagccatgcgcgagtacgtcggccagctcaaagacaccggcgtggacgcgctgatcgtctccgatattggcgtgatgatgatggcccgtcaggtggctccgaatctggaactgcacgtctccacccaggccggcgtgactaattatcaggctgcgaacgccttctacgagcttggtgctcgccgtgtggtgttggcccgcgagatggacttgcaggccgtgcgtgatattcgcgccaacattcccgatgacctcgacatcgaatgcttcgtccacggtgctatgtgcatggccttctccggccgctgcctgttctccaactatctgaccggccgcgatggcaatcacggcgaatgcgcccagccatgccgctggaagtattcgatcgtggaagagaagcgccccggccagtacttcccgatcgagcagaccgagaacggcgcctatctgttcaattcgcaggacatgaatatgctggggcacttggatgatttgattgactccggtgccaccagcctcaaaatcgaaggccgcgcgaaaagcgcctactatatcgccgccatgaccaacgcctacaaaaccgcggttaatgaatacatgattcaacgcggttttgaagacgctgatggcaatgttttgaagcctttccatgaccgtgtgattcgcccgggcgaccccgattttggccaaggaaccgaagatcaagtgatgcgcaatgctgatgccgcgttcgccggtgtggccgatgagggatatgaccgtggctctgatactgcggttgccgattcggtcaccggctcggttgccgcagaacgtgaccgcgtgacggttgctgatgccgtcgactcaactgcctctggtacgccggccggcaccgccgtcgaacccgacggcatgagctctcacgcccgttccacgcgccgcaagtccaacaccgcggtcgaacagattgagaccgattggaaacatgcggccgttcgcccggccccacacgtcgaactgcccgaatggctgctcgaggaaaccgacaaggtggcccaccgcgactactccaccggcttctattacccggagcacaaggtcacacagaacaccgaccgctccgcctacttccgctcatggctggtagtgggcgaagtgctgagctggagcgcggacgaagacggacgtgtcacgctgatgagccgtaacaagattgagcccggtcaacaggtcgaattcctgctgcctggcgagagaccattggtctttaccgtgccggaaaccggcctgcgcgatgccgatggcgcgccagtacccgccatcaataatccggcgcacgtgttctcgatgccctgcccgcaccaggtgcccatcaacgccgccatccgctcgcgcaccaaaaagcccaccctcaaagccgaataacctaccactccgcccccgctgactgggggtggtcatgaaaatcatgaacaccgcccgcacccaagaaagaatgccttatgcctgaatacagcgaagaaatcctcgattccaacagcatcagctctaccgataaagccggtcgccctattccggtgaccatccccatcgcactggcccccggcatcaaggtggtgtacaccacgcgactgggcggcctgagcaccggcgattacggcaacctgaacctcggcggcaagtccggcgacgaacctgaggccgtgctgtcgaaccgcatcgcactcgccgaagcggtgcaagcccgcctatcgctggtctcccaagtacattccggcgtggctgtggacgtggacgactcgttcgtcatcaacacccccttcggcttcgacgtgtccggcacacatggtgagactgacactccgcacgtcatcgaggcggacggccaggtcaccgcacaatccggcatcgccctaggcatgttcgcggccgactgtctgccggtgctgctgggcgacccggtcaccggtatcatcggtgcggcccactgcggccgtcgtggtctggagcgcggcgtgatcggcgccacggtggacctgatgaagagcaagggtgccgacccggcgaacatcgtggccacactcggcccgcgcatctgcggcgactgctatgaagtgggcgacgagatcgccgaccagttcatcaagcgcttcccgctgaccaagacgaagacccgtttcggcggtgccggcatcgacatcgccgaagccgcgatgatcgacctcgccttcgccggtgtacatcaggtggtcgattcgatgccgcgcgtgcacgccgccacccagtaccttgaggaagacccggaactcgccgaactgtgccgtacggacggcgaaggcccggccgagctcgcggagcgcatcgacaacatcagccacagcatgtgcacgctcgaaaacccactgtggtactcgcaccgccgcgccgcgctcgccaacaaaacacacgaaggccgcctcctcgccctcatcgtgcgtgactaaacggagaatgcgagcacattccgtggagaagatgtgatgcagttcacggacggccagccctcaccttacggtggtgcctatgactgagagagatttcgatacccccgtcgagacgcctaccgtccaaccggcccccgctcagggtgccaaaccggcgcaaaccgtgccggtggtggccgtggtgctggccgccggcttcggtacgcgcttcgaccccgataatcccaagcagcttgtctccgtgggcggcaagcccatcgtgtgctggagcattgatgcctttgaacattgcgatcgcgtcagcgacatcgtggtggtggtcaatcccaaggtgcgcggtgaagtggaaacgttggttggcgagatgggctacaccaaagtccgcgtcatcattgacggtggtgacgaacgtgtggacagtaccgccgccgcgctcgacatgctggctacggctggcattccggacgatgccaagattctgatccatgacgccgtccgtccgttcgtggaacagtccgccatcgacggttcgattgatgcgctcgaccagttcacggccgcgaccgtggcctacgcctcaaccgacaccgtgctgttgaccgaggatctgggcgatttgaaagtggtcaagtcggtgccggaccgcccgaacaccttccgcgcgcagaccccgcaatccttccgcttcgcgacgattcgtcacgcttacgatttggctgccgccgacccggacttccatcccaccgacgacacgcgcgtagtggtcgattatctgcctgatgaacccgtcgccattgtctccggtgcggaaaccaacctgaagatcaccacgctggaagatattcccacagctgagcgtatcgccgaggagattctcggtcgtgatcccaaggaagaggcccgcgcccgcatgcacgccctgctggcccaagcggccggccagatgcatcgctagactggcattatgcgtgaactcaatgttgtgatctccggcttcgaccactatgacggcgtggaggtcaatcccgccgtcgaagtgcccaaggccatcgccgagcagggactgggcgtctcctctgctccggacgatccgttggagcaggtcgccgtcaccgttcatgccgtcagcatcccggtgagcttcgccaaagcctggcccacgctgaaagagacgattgaggccaccaagcccaatatcgtcatcgccaccgggctcaagcacgcagcccgaggcgtgatgcttgaacgatgcgccaccaacctgatggacgcgatcaagccagacgcggacaacgtgatcccacgccgcgaacccatcgaccccaatggcccggccgcctattggacccgcctgccgttgcgctcgatcctgaatgatttcacggacgattcgattccggccaccttgagttcggacgcaggtacgttcgtatgtaattcgctgttctacaacttgctcaactggaccgccacccaggagcgggtgctgggcggattcgtcagcttccctccggtcgttccggcgcattccagccagcatggtctaccactcgaccagcagatcgccgctggccgtgatgtggtgcgcgaagccgtgcgctactatctcaagccctccagctccgacatcctcatcgcctagcacgctgtgcgccacgccggaatagaacatggttcgcacgcattgtaacgattgcgcgtcgctcaacgctcagcgccagtgcgatgcgctagagtgctgcaaggatgtgccaagagctttatgcgtgtgcgaaaggaataaacagcgatggtggatcgtttcccggtggtgctgcgaggatatgacaaggagaaggttgatgctgccttcgacgctactcaggagagtatgaagcgtgcgcagcagacgttggccagcatgcgtgagcagattgcggcggatgacgaccgtattctgcaattgcaggcccaacttcaggaagagaagaacaagaagccggaaggcaacagcttcgcttccttgggagcgaacgcccagcagatgcttgcctccgccgaacagacgagtaccgaactgctggaacgcgccaagcaggacgcgtcctccatccgtaccacggctcaggctcaggccgaaacactgatcaacaacgccaagctggatgcccagcatattgttgacgacgccaatgccaaggccgcctcgattctgacgaacgccagcaatcaggccgaatcagtgaccacctccgctaacgaggatgccgcacaactgcgctccgaaactgccaagaccatcaccgaacagcgtcagaccgtcgagcttgagctcagcaacgcgcgcgaagagcacaccaagaagatggcttccgaacgctccactcaagagcgcgaaatcgccgacatgaaggcggaggcgacccagcaggttgccgcaatgcgcaaaagcgccaatgaggagatcaccaagcttaagtctgattccaacgatcagattgaggcggcgctcgccgaggccaacaagaagctcgccgacgtgcgcgagcaagtgtccaagatgatgaccgaagcccagcgcaaggccagcgaaatcattgatgcggccaaaaccaagggtcaggaaatcactgatgaggccgaggtcaagcgcaccagcacgatgagccaggtcaacgccgaggtcgagcagatccgtcacgacatcgccgctcagcaggatgaggccacgaagaaggtcaacgaactgctgcagcacctcgaagagcgtcgtgtggcggccaagcgggaagccgatgagttggtcggtcaggccaagaacactcgcgaccaagccgattcgtatgccgcgtccaagcgcgaggaggcggacatccaggccgccgcaatcgtacataaggcgggcgaggaagccgatgcgcagatcgaggagcgtcgcgccgccgcccaaagcgagcttgacggtctgtccaagcgcatcgccgatctgcaggaacgcgagtccgtcatcacccagcgtgtttcggaactgcgttctatgttctcgcaggcgttctccggattcgctttcggcggtaatgcggcggcctctggccaggatcaggaagccgctgccgcggcggcattgccggtggttgcgcccgtcccggaagtcaagcctgtacacaacgaggccgatgaccagccgggtgagttgagcggaaacgagtcggctgccgacgatcacaatgagacagatgcggcaccggctgattcggctgattcggctgattcggctgcgcagaatgagcagtccgaatcgtctgagccgtccgagcaccagacacagggcgaaccggaggccccgactcaggagaatccggccgtatctgagcagaacggcgaatgacaggccttcgattagactactagcggtaagaattacggcacctgcgctttcgagccaggtgccgtattcgtttgaatctgcgccacaagcgcaccatcacagaaggagtatgacatgagtgaattgacgcctctgaccgacgaagcgttgaataccctgcgcggcgatttcgcacagagcggcaccaaccgtctggccatgaacgcggtgaccgccgccggcatcgacaaggtggctcgcaattatgaccgcgctcgtctgatgcagcgtcgtttctccaccatcgttgacaatggcgaagccacccatcaggatcgctccggccgctgctggctgttcagctccctgaacgtggcccgtttcgtggccaagaagaacatgaacttgaaggagttcgagttctcccagaactacgcgatgtactacgacaagctggagcgcgtcaactacttccttaaggatgtggccgctctggtggctgccggagagccttccgactcccgcctgatgcagcacctgctcgccgacgtgatgggcgatggcggccagtggaccatggccatgaacgtgtacaagaagtacggcgctgtgcccaaggacctgttcccggagaccgaatcctccaagaacaccggtgaaatgaacacccagctgcgccacatgctgcacaccgccgtggcgcacatgtacgccgctgacggcgatgcctccaaggtcgaggcgattattgccgacgccactgctgccggccaccgtattctgaccatccacctgggcgagccgccggtctccttcgactgggaatggaccgacaaggatggcgaattccaccgcgacggcgagattacgccggttgagttctggaagaagtacgtgggtccggctggtcttgaggactacgtgtgcctggtggatgatccgcgcaccgagcacgccaagggcaagaagatcggcatcgagcacctcggcaatgtggctggcggcgacgccaccgagtacctcaacgtgccaaaccagttcatgaaggactgtgtcaagcagattctcgttgagcagggcatcccggtatggttcggtgccgactgccacccgttcatggaccgtgagaacggcgcttgggccaccgacctgttcgagtacggccgcgtgtacgacgtggacttcgatttggacaaggaagcccgcgtgcgcttcggtgactccgccatgaaccacgccatggctttcgccggcgttgacgtggccgacgacggcaccacccgccgctggcgagtggagaactcttggggcaccaagatcgccgacaagggctacttcaccatgtccgacgactggttcaccgaatacgtctacgaggtagccgtcccgaagagcatgctcccagccgaataccagaaggctctagaagagcccgccaccatgcttccggcttgggatccgatgggcgcactcgcataagaaagagcccggtgggctctttcgcgagtgcgccgagccgcggcagcggcgaggtgatgttgagtctgccgtaggcagtcagtcggagagctttggcctgaaagatcagcgcgcctgaggcgacaggccgtgaagcgaacagcccggtgggctgttcgtaggcctggctcgcggtcgtaagaccgtgagggacgccgaaggtaggattgagtctcgccgtaggcgagtccgtgattgttgggctcggagagcactccgagctagcccgaaaagccgggaatgccgatccatatcgtagcgaaacactaatagacaaccggttgcacaaacgtcgaaaagatgccataatagccgtacgccatgcgctccctcaagcaggcgttccgttcaatgaagacggagactgatatacacaagggaaaaccggtaaggagtatcgattgaccgaaatcaccaagctgagtgtggaagacctgcagtcgttgcgcgattcgtttaccgcagatgagacgaaccgaattgccatgaacgcggtgaccgccgcaggcattgacaaggttgccaagaactatgatcgtgcccgtctgttgcagcgtcgtttttccacgatagtggacaatggtgaggctacccatcaggatcgttccggccgttgctggctgttcagctccctgaacgtggcccgttttgtggccaagaagaacatgaacctggagcagttcgagttctcccagaactatgcgatgtactacgacaagctggagcgagtcaactacttcctcaaggatatggcctgcttggtcgaggccggggagcctgaagattcccgtctggtgcagcatctgctgcgtgaagtcatgggtgatggtggtcagtggactatggccatgaacgtgtacaagaagtacggtgccgtgcccaaggatttgttcccggagaccgagtcctccaagaacaccgacccaatgaacaacaagttgtgcaagctgctgcgacaggccgttgcgcatatgtatgagaaccccgagaatatcgatcagatcgtgaagaatgccacggaagctggccaccgcattcttaccattcacttgggcgagccgccggtctccttcgactgggagtggaccgacaaggacgacgagttccaccgtgacggcgagatcacgccggtcgagttctggaagaagtacgtgggttccgccgatttggaaagctatgtgtgtctggtggacgatccgcgtaaggaacatccgaagggacgcaaaatagccatcgagcatttgggtaatgtggtcggtggcgacgccactgagtatctcaacgtgccgaaccagttcatgaaggactgcgtccgtcgcgtgctggtggaacagggcattccggtatggttcggtgctgagtgcggaccgatgatggatcgtgaggccggtgcttgggccactgacctgtttgagtacgatcgtgtgtacggtgtgcgctttgatttgtcgaaggagcagcgcgtgcgctttggtgactcggccatggatcacgcgatggcctttgctggtgtggatgtggctgacgacggtactactacccgtcgctggcgtgtggagaattcttggggcgccaagattgccgataagggctactttaccatgtccgatgactggttcaccgagtacgtctacgaggtcgccgttcccaaggccctgcttcctgaggaatatcagaaggctttggaagagccggcgatttccctgcctgcgtgggatccgatgggtgcgcttgcataagaaaagccgacggctcttcgcataacacaaggtccggcagattgactctgccggaccttcttggtatctcagcggaaaacttataatccgatggcgagggtgctgactccgtggatcatcagttcgacgccgatgcacaggataataaaacccataatgcgcgtaagccctaggatgccgccgggccccagtttatgtaccagtggtgtgcaccagcgcagcagcgccataatgacgatggatatcaccaatacggcgataaggatggccagccgctcacgaggttccgtataccgggccgataggccgatgacttcgccgatggcgccggggccggcgattagtggcagtgccatcggtgtaaaggcgatgtcattgtcttgatgcgcttccggatcgccatgatcagaggccggtaccagcattcgatacccagaatgcgccaccacaaaaccacctgcgatttgaatggcgggcagttccaggtggaacatgtcgagaatgaacgagccgaggatggtaaacgccgccaatatggcgaacacatacagggatgtgtaccgcgcctgacaacggagttctttcttgggcaggtcggcggtaagggtggcgaagctggccactgcgccgacagggttgatgataggaaacaaggccaataaggccattgaaaagactgcgatgtctgctctcacgttccataagcgtaatgcaaccggttgtctcagtcaacgtgagaactatatcgagtgtcgggcgcgccagtgccctatggcgatgtgaaggatagtgtttacagcgactttctccgtaccagtgtcatgtgtttgatgacggtggtggcggcctctccgtcaatcatgcgcatggcaaggtcggctgccgtggagccctcttctcgcaacggctgttgcacggtggtaagcgggggattgcaacgctcggcgattggatggtcgtcgaatccgacaacggcgatatcgtccggaactgttagcccgcgctgtcgaatcgcctcgatggcacctacggcgatacgatcggagccagccagcaatccgtcgatatcgtcatgtgtatccagcagttgcatcattgcggaaaagccggcggtcgcatcccatccggtgaacagtaccctgtcgtcgggcagttcgtcaccgcatacacgtcgatagccggtgagccgatcgggggatgccgggttggagcgcggtcccaaaatcgatatgggatgccgacgtccggcgtcatgcatggcttgggcggcgatttgggctccatacgtgtcgtcggaatagacgctggagaaaataccctcatatgagcgatcctccatctggccaagcattacgcaagggatacgcagtttgtacatttcctccagcaaatagttgttggcgtagggggaaatgtcgataaccgcgtcgaatgagcgtcgttccagatgttgttgcacgcgatgacgttcgaaatcggtggatgcctgcaataataccggtagatatgacgattcgctaagtttctccgtgatgccgctgataaacatcgcataggtcggatcgtcgaaaagctcgtcgagcggctcggtaatgaggatggcgatggtctcattgcggcccactgccagtgcgcggccctgtgcattgggaataaagcccatgctatccgcgattttcttgatgcgtgcggtggtctcgcggctaatgcgtggagaattgttcagagcgcgcgaggcggtggaacgtgagacatttgcggctttagcgacatcggccaaagtaacgcgattgcgctttgccacggtcataattctcctttgaatgcaacagtaatgcaatgctatatgaaacgattgtaacccaatgtctcgcaacacgcaggacaaccggttgcatatttttttgaaatctgttatcttcatagcaagcaatgaggcaagtcacacaaaacgtcagaccttatggctgtcgataacacagataattccatccactctttcaaaggagaaaagatgtttgggaaccacatgaagaagaccgttattgctgcatgcgcaaccgttgcatctctgagcctgctgttggcaggctgcggtaccgatagctccagtggcaaaacgcagattcgtttcgccacttgggataaggccgaagatgtggaccgtcagcagacgctggtggatcagttcaacgagtcgcatgacgatatcgaggtcacgcttgaggcctacggttccgacttcgatacaaagatcagcgccggcatgggctcaaacgatacccctgacgtcatgtacatgtggaattacccgtcctacgccgacggtctggaaccactcgatagctatatcgaaaaggaaggctccgactggaagtcggacttctactccacgttgtggaactacaactcctacgatggcaagacctatggcgtaccggtcggcttcactacgcacgccctctactacaacaaggatttgttcaagcaggccggcgtcgaagcgccgaccaatgactggacttggaccgacctgcagaaggctgccaagaagatttccagcaagaccgatgccaaaggcttctccttccagatgaagcccgatccgtatgacttcgagatgtacctgtggagcaacgacaccgcttacagcgacgagaacggcaccctcgaaggcaacatcgattccgccaaggccatcgacacctatcagatgttccaggacatggagaaggatggttccgcggtggccacagaaggcaacggcaccgatgagttccgcgccggcacgaccgccatgtacatctacggttcctgggccctcagcaccctagacgaggacggcctgaactatggtgtggtcgatatccccgcattcgccgactcagaccatgattccgtgtccatcctgagctcgtccggcatctccatcgctaagagcagcaagaacaaagatgccgcttgggaattcatcaagtactgggccaatgccgactcaaacaaggctcgaatcggcagcgagctgcccgtgctgaccagcgtggtcgagtccgagggcatcactgacaagagccagtacaagccgttctactcgatgctggaacagtccgacggctacagcccttccagcttcaaggtcaagggatggtccgagatctccgacaagcttgccctctccttcgagaagatgtacaacccctcctccctcgaagatcccgcttcggccatcaccgaagcgctgaagtgatgaccatctgggcaaaggaccattatgaaagtgctagcaaaggtcaataaacgggcctggccatacctgttcatccttccttggatcatcgggttcctagtattcacgttgggacctctcgtcttatcgttcgtcatgagcttctttgactggtcgattaccggaacccccaaattccgtggcctaggcaactacatcgagatgtttaccaccgacgatcaggtgctcaagtccctgtccatcagcctgaagtacgccgcgattttcgtgccgctcaacatgattatcgccctggttctcgcgatgctcatcagccagccggtcaagggtgcgaagtttttccgcacgattttctacatcccggctgtcatctccggcgtcgccgtatccatcatcttcggatggctgctgaacggcaattacggcgtgatcaactacctgctgtccctgctgggcatcgacggcccgcagtggctggtcgacccgaagtgggctatcatcgcggtcatcttcgccagcgcgttcggcgtcggttcgatgatgctgatcttctacacggatatcaagaacattcccattgacctgtacgaggccgccgccatcgacggtgccggcccggcgcgtcagttcttcagcattacgttgccaatgatcaccccgaccatcctgttcaatctcatcacgtcaatcatcagttcgttccagcaggtcaccctggtcatgctgctgacgaacggtggtccgatgaagtccacatatttctacggactgatgacctacaacaacgccttcaaattccacaagctcggctacgcctccgccaacgcatgggtcatgttcatcatcatcctgctgcttagcgcgctggtgttcaaatcttccgatacgtgggtgttctacgagtccacggcaaacaagaacaaggccaagaagggtaagaaggcaaagggcaaggaggtagcgcgatgaagatgtcgctccgttccaaggtcgtgatctacgccctgctcgtcatggtggcgatctacttcctctccccgttcgtctacatgctgttctccacgttcaagacatcggctgaggccatcgcctatccgccgagtctgttcccgaaggaatggcaatgggagaactatgcgaaagcatgggatgcgcagccgttcggcaagtacctgcttaactcggtgattgtcaccgtgctcaacacgctcggcactgtgctctcctgctcgctggtcgcctacggtttcgcccgctacaacttcaagggcaagaacatcctgttcatgattctgctgagcacgatgatgattccgtgggacgtcaccatgatcccgcagtacatggagttcaaggctttcggctggatcaacacattgctcccgctgattgtgccctcgttcttcggctccgcgtattacatcttcctcatgcgccagttcctgctcggcgtgcccaaggaatacgaggaggctgcgcgcatcgacggctgcaacgacctgcagatctggtggaaggtgtacatgcccatcatgcgtccctgtctgattctggtgggtgtgctcaacatgatcaccgtatggaacgactacctcggaccgctcatcttcctgcaggaccgcagcaagtacacgctggcgttgggcttggcctcgttcaagggcgtgcaccagacccagatcatcccgatgctgtgcatcaccgtggtgatgatcatcccgcccgtggttgcgttcctttccggccagaagtacatcgtcgaaggtacctcaggttccatcaagtaataccgttggcgggccaagggtggctgagccccattgctcggtcactcctgtggtcgcctgaactgtttccggggcgaatgatgcccccacgcacgaaatgtttcgggccatcggtctcggcccgggccaagtgcgcccaaaccgcaccaaggagtatgacaccatgattcgcgattcgttttccaccgcactcgggttcgagctgccaacagacggctggatggtgagcgaggacgcttatgagcctgaccgcaacctgcagtacgagagtctgttcgccctatcgaacggatatctgggcattcgtggcagccatgaggaagggaacaagcccacgttgccttacctgtacgtcaacggggtgttcgacaagtccgaaacgttcatgaaggaacttgcgacattgcccaactggcttggcatccgcctgtacgtggaaaagcagctcatcggtgtcgacgaatgcgagatcctcgaataccgtcgtgcacttgacctgaagcacgcggctttggtcaaacgggtgcgtctgcgtgacccgaaaggacgtgaaaccctgattgaaggcgtacgtttcgtcagccgtgcgcatgcacatcgtatggctgtgcgactgtgggtcacgccgctcaattactcaggtctaatcgaagtggagcagattaccgacggctccatcatcaacttctatgatgcgccccgtttcaaggtcaagcacaccgttgtcaccgccaatgagccgctcggtgagaacggggtgtatatggaggtcgccacgcgtgatgagaatctgcacgtgggtgtcggcagccatcttgaaggcacctgccgagatcgggatgtgttgggcaatcgtgtgttccatgcctttggcgagcaaggcgttgaattctgcgacttccgtgccgatgaaggcgacagcgtggtgctgaccaaatacgtggcaatgttcgatggacgtgacactccggccgacgaactgcacgccaccacctgccgtgaggtcgaggacttcgttgccgaagggttcgagcgtgaattcgaggttcatgccgatatttatcgcaagatgtgggggcaggccaacatcgatatcgagggagatcctgagcttgatcgtgcgattcggttgaacgtattccacctgatgagtaccgccaacgaacatgatgaccgggtcaatgtgggtgccaagctgctcaccggcgaagaatatggcggccacgccttctgggacaccgaactgtttatgcttccgtttttcgcttatgtgttcccccagacggcccggcacctcgagtcctaccggtaccgtctgctcggcgcagccgaggccaacgcggccaagaacggattccagggtgcgcaatacccgtgggaatccgctgatgatggcagcgaacaatgcccggactggaccatcgagccggatggcacctgctaccgctgctatgtggccgtctatgagcatcacgtgacagctgccgtggctttcggcatcgcgaactacgcgaccatcaccggggatacctcgttcctatacggtcgtggtgccgagattctcacgcagaccgcccgtttctgggcaagccggtgcgaatggaaggaagacgccggacgttacgaaatcacccaggtaaccggtcccgacgaatggcatgagcccgtcgacaacaatacgtacaccaactatttggcgcgttggaacatgagatatgtaatcgcgctcgtcgaccgcatgcagcgcgaacatccggacgactatgcggcactgattgccgccaccggattgacggatgccgagcttgcatcgtgggatgccatacagtcgaagatctatttgccccgcaaggaggacaccgacctgctcgaacagttcgagggctatttcgatctggagccggtgaccatcgaagaatacgacaagaacgactggccggtacggcctgcggcgctcaagcaattcaaaaccagcgagacgcagatcatcaaacaacctgatgtggtgatgctgctgcacctgctcggcaacgaattctcccagcaggaaatcgaaaccaactatcattactacgaaaagcgcacgttgcatgggtcgtcattgagccccagcatctacgcgatcatgggattgaaggttggagacgattccaaggcctaccgctatctgcgacgtgcggctatgctcgacctgctcaacctgcagcgcaacacccgtgagggcatccacgcggccaatgccggtggcgtatggcaaacggtcgtgttcgggttcgccggagtgaacatggacgacgatggcgtattgtccatcacgccccacatgccccacgaatggtcgtcgctgacattccgtctgcacaaccgggagtcgtggctcgagattcgtgtcggtgcgaccaatggtgtcgatgtggaggtgcttgacggaccgtccgccatcttacgcatcaacggcgagaccgtgaccgtgcccggcgtgaaggatgtgtcatgaagcggggtatggccgttgccggcctgattgtcgtgaccgcgatttggggcggtggattcgtcgccagcgatatcgcgctcaatagcctgacgcccatgcagatcatggccatccgattcctgcttggtgcggtgctgatgagctttattagcgtacgcgagttccggaacatcaatctcaaagaaattggtgccggtgtgcttatgggcatcgcgctgttcgcggccttcgcgctgcagattatcggcctgcaatacaccacgccgtccaagaacgcatttctcaccgcattgaatgtggtgatggtgccgttcatcgccttcctggtgctgcgcaaacgcgtcggatggcgtggcgtactgggggcctgcttgtccgttgtcggcgtggcggtgctttcgttgaacggcaatatgacgctcggtttgggagacgcactgtcactgctgtgcgcggttggctttgccttccaaatcttcttcaccggtctgttcgtgcagcggtaccgtgcgacggttctcaactgcgtgcagatggtcaccgcattcgtgctgtctgtggttgcgatggtggctatgggccaggtgcatctgacgccgacgaccgacggatggtggagtgtgctgtacctcggcgtggtcagtaccaccatctgctatctgttgcagaccgcctgccagcagtatatcgacgagaccaaagccgcgatcatcctgtcaatggagtccgtgttcggcacactgttctccattctgctgctaggcgaggtggtcaccccacgcatgattgtcggatgcacgatcatcctcgtggcggtcgtcatctccaatctggctgcgtcctccgaagacgaacagcccacagacacgcctgttcccgaaccatccggcgaggtttcgggttgattgcccgtctgattcacgccatgcacaccacaatcattcgcaaatgagcaaaggagccatccatgcgttatcaagccatcattttcgatctcgacggcgtaatctgccgtaccgaccaataccattacctggcatggaagcaggtggccgacgagctcggcattcccttcgacgagcaggtgaatgaacggttgcgcggcgtgagccgtatggccagcttcgatatcatcctcgaacggtatgacggcacaatgagtgacgaagagaagattcattggaccgacaagaagaacgagatatacaagtccatgcttacgcagatgggacccgacgacatgttggaaggtgtggccgacacactgcacaagctccgtgccatgggacttgaccttgccatcggctcatccagccggaacacgaaattcatccttggccagctgggattgtcggatttcttcgatgccatttcagacggtacgaacattacccgttccaagcccgaccccgaagtgttcgtcaaggcggccgaatttctgaaccgcgcgcctgcggagtgtttggtggtcgaggacgccgaagccggtttgcaagccgcgactgccggaggtatggactccgccgcattcggcgagatcgccatacgttccgggcttggcacatggaacttggaacggttctccgatctgatcggcattgtcgcctaatcccagaagcgtcaaccacgacccgcaacgattcggattgctggtaatcccacttgtatacgtccgtcatcgggcgtatacgagtggaagaatgccgatttgcgggatgtggcggacttgcgcaaaggagtacatcacatgatgagcaagcagaacgattgggagaatccctccctgaccggtcgtaaccgtcttgccccgcacgcctatttcttcggatatgagtgtgaggcggatgcctctacctatgagcgcgaacgctcatacggttatcagagcctgagcggtgcatggcggttccgcctattcaatggcccggccaccgtgccacagcaggcgttgctgtcaatcgccgatgattgggatgaggtgcaggtgccgcatatgtggcagtttgacgggtatgggggtctgcactataccgacgagccgttcccgttccccgtcgacccgccgctggtgccgtccaccacgcctacgggcgtgtaccagcggatggtgaatatgcagccggctgcagatggtgagcgcattattctgcgtttcgatggtgtggacagttatgctgagattcatgtcaatggcacatacgtcggcatgacgaagggctctcgcttgtcggcggaattcgacgtgaccgatgcggtgcatgcggggttgaacctgttcgtggtcacggtgctgcagtattcggatggtacctatcttgaggatcaggatatgtggtgggcatccggcatcttccgtgacgtgtatgtggtcagacgacctcagacgcatctcaaggacttcatggttcgtactcatcgtgtggatgatacgctcgcacgggtcaccgtgcaggcttggaccgaaggggagtcctgcgtcgaatggaccattctgcgtgacgggaatatcgtgtccgccgcgcattcggattcgggcgaacgtgccgtaatgaatattcctgaccccgaatattggaatcccgaacatccgttcctgtatgacatgcgtatgcgcatcgtcgggcgggacggttctgacgaaatcgtgccgcatcacctcggactggccgaagtcaccgtcgaggatgggctgatgtacctgaacggatcgtacttcaccatgcacggggtcaaccggcacgatagcgacccgaggcatgggcgtgcggtcagtatggagcgcgtgcgccgtgatttggaaatgatgaaacggcacaacatcaacgccgtgcgtacgtcacactatcccaacgatccgcggttctatgagatgtgcgacgaactgggccttatggtcatggccgaaaccgatttggaatgtcatggattcgaaaacgtgggcgacatcgcactcatcaccgatgacccggcatgggaagttccctatgtcgatcgcatcgagcggcatgtgatgcagcagcgcaaccatgtctccatagtaatgtggtctttgggcaatgagtctggattcggatgcaatttccgtgccgctgctgaacggtgccggcaacttgacccatctcgtcctgttcattatgaggaagatcgtttcggcgaatcggtggacgtgctgtcgaccatgtattcgcgtgtctcccagatgaacgatttcggagagcatccggctaataagcctcgtgtgatctgcgaatacgggcactcgatgggcaacggtcccggtgggctgagcgaataccagcaggtgttcgaccgttggccgagtatccagggccattttgtctgggaatggtccgatcatgcggtggcaatgagagggggtcgtttggcgctattggccgagcgtgaggtgcaggccaaaggcgtggaccctaatgggctggacgacctgtggtatgcctacggcggggatttcggcgattaccccaccggcggaaacttctgcgtggacggtctggtgttcccctggcaggagcccagtccggggcttgctgaatatcggcaggtgatttgcccggtgaaggtcagctgcacctataccgaggaggatggcaccgctctgcttggcattgatagtcgtcggtatttcactgatttgtccgacactcggctgcgggtgtctataagtgtggatggtgaaatcgtggacacgacactgctggaggtggggcccgtgcccccgctcggtcacatggacataccgttgcgccgtgaagcgctgctggaacaccatggccgtgaagcgatgctcacggttaccgtgctgtccgtggaacagcatgagtggtgtgatccggatgagccgctgggctcctaccagttccggctgcatgccggtcagggtggctatggcccggtgcgttcgaatgatgggtcggcgctcgccgtgacctctcccgttcgccaaacattgtccaccgtcgaagacgaacggtatctgaccattcgcgccggtgccatggtgcttcggtttgacaaggcgctcggtgccatagccaactggagcgatggcgatcggaacgtcattgattcgccgatatgtttcggcctgtggaaaccattgatcgacaaccttacgcaggaatactccgcgctctggaagccgtattatctggacgtcatgcagacggacactcgtggcgttcaatggcatgcggaacgcgaccaggtgatcatcgaggtcgagcagcgtctcgccgctcctgtggtattggccggcatgcgaacgagactgacctacacagtgcatgccgacggccatgttgacgtcgcggtgaccgccaccgcctatggcgactaccatgacatcattccgcgccgaggcctgtccttcactattccgcgggattgcaggcaggtcgcttggtacgggcacggcccgggcgagaactacccggattccctcgccgccaatccagtgggcgtgtggacgaatgacgtggatgccatgtttacgccctatgtgatgccgcaggattgcgcgaatcacgaaggcacccgctgggtaacgttccgcgacggaaacgggaacggtgtgatggtgacgcggacggcgccggccgatggtgagtccgaggcgttctccttctccgcgtggccgtacagctgcgctgatatcgacaaagccaagcatgtgaacgagctgcctgagggtcatggatcggttaccgtcaacatcaatgatggcgtgttaggtctcggatcaaattcctggggtagcgaggtgcttgattcgtaccgtattcgatttgaggattgtgcgttctcctttacgctgacgccgattcacgacgacgaacacgtcagccgcaatccgaactgtggtgcgggtgcagtcggtaaggaggtgcagtgatgcgactatacgacagcttggaaatgttcgataccggattgtctcatgtgcgcaaatggatgcgatgcggtcaagccattaggcaatcgacccgtctgccgttggacaccgcgtattcgctcggcgattcgctgaccttctgggcggtaccggcaggcgcgctcgctgatgatcgttatgtcgggcaccgccggtaccacacggtgctctcgcccatcgacgagccgttagccgtgtatgtccgcgcaaaaacggcattgcggccagccggtgcatacagcgacgtttcggatcgcgaatggtttggcctgccgaatgacgatgaggaaggcgtaccatgcgtcgtgcctgtcgggggtgtcctgattatggaagaatgcgaagcgatgcgcattaacgccactcccgaggccgtgggtcgcgtatcggtggtccgcgtcacggtggaggggttcacgttccccaataaataagagataattcaggtcctgtgcgggtgttccaatcgcccgttcaggaagatgccagccggccgaccgttccatgaaacggtcggccgacttcgtttttccgtgtacggttattacagtgaagagtctgctatgccgtatgcgcggtattgcattgccagcatggccgcatcctgtgttctcgttggagaactcgttgcggggaaccaataaagaaaggagtcgagcaatggcagcactacgtggtccggatagttccgaggatgaacgtcgtttgggggagcaagccgtctttcccgagaccgtcgatgtcaacattcgtcagcttgaccccattcccgcgccgcgtgccttcctcagggagcagccgctcaccgatgagatgagcgagctcgtgctccactcgcggcaggaaatccgcgatgtgctcaacggccgcgacgaccgactgctcgtcatcgtgggcccctgctcaatccacgacccgaaggccgcgcacgagtacgcagaaaagctggctgccgtcaagcgcgagctggaagaccgactcgtgatcgtgatgcgcgtgtacttcgagaagccacgcaccaccatcggctggaaaggcctcatcaacgaccccgatctggacggtcgcttcaatattcgtaagggcatgtggctggcccgcaaggtgctcaccgacgtgctgagcctcggcctgcccgccgccaccgaatggcttgaccccatcaccccgcagtacatctgcgacgcgatcagctggggtgccatcggcgcgcgtaacaccgaatcccaagtccaccgcgaactggccagtggcctgtccatgccggtgggcttcaaaaactccaccgacggctccatcaaggccgccgccgattcctgcttcgcggccggcttcgagcatcacttcctgtccattaacttggacggtcgcgtgatttccgccgaaaccaaaggcaacccggattgccatctggttctgcgcggttccagccacggcccgaactacgatgccgaatccgtgcgtcaagctctggaagacctcaaggtttccaaagcgtccggcccgagccagcatggcctcgtcatcgatgccgcccacggcaactgcggcaaagacgaaaaccgcgaagccgaagtcatcgaagagatcgctgagcgtctggcgcacggcgaacaaggcatcaccggcgtaatgctggaaagcttcttggtcggcggtcaccaaaagccggccccgctcgaccagttggtctacggtcagtccgtcaccgactcttgcgtgccgtgggaacgcaccaacgagctgctgcacaccctagccgacgccgtcaccgctcgcagctcggctaaatagctttgtctttgtaaaaatgctcactgagacccactcagtgagcattttttgccaataacggtggtcatgtcagtttgttcccgtgacaccttatccttgggaaagatactgacccaaggagagatgttatgcagcagcaggaggaagcagcacattcgctgcatccgttgcaagtcggtccgcagccgttgaacaccccggaagagcttcgcgccattcgtcaggcgatgggggaggggaagaacccgctcgttgccactgatgtgccgcgctgggaagatcaggtgggtgtcagtcgcatcatcaaccgccgcgtattggagctggagccgctgcccacgcccgcgcaagtgctcgctgaactcccgctgaccgatcaggctcaggaaatcgtcgcctactcgcgtgatgagattcgcgcgtgcctgtacggccaagacgacaggttgttggtcatcgtcggcccctgttcggttcatgacccgaaggccgcgctggactacgcgcaccgattggccaagctgaaggacgagctcggtgagcagctgctcatcgtcatgcgcgtgtacttcgagaagccgcgcaccaccatcggctggaagggcctgatcaacgacccggatattgatggcagccacaatattcgcaaaggcctgttgcttgctcgcaaaaccttgcttggtgtgctgaaggaaggattggcggccgccacggaatttctggagcccaccagcccgcagttcatctcggacgcggtgagttggggcgccattggtgcgcgcaacacggaaagccagatccaccgccaattggccagcgggctttccatgccggtcggcttcaagaacgccactgacggctcggtgaaggcagcggtcaacggttgcttcgccgctgctcagcagcacacgttcttcggcattgaccatctggggcgtgcctgcgcagtcgagacccttggcaacccggactgccatgtggtgttgcgcggctcgattcacggcccgaactacgatgccgagtccgtggccaaagccatggaagacgtacgcgccgaaatgcccgccgaatccgcagcctcgcacggtctgattgttgattgctcgcacggtaactccggcaaggacgagcatcgtcaggccgaagtcgtgcgcaatattgccagcagaattgcagctggcgaacagggtattaccggcatcatgatggaaagctttattgaagggggcaatcagaaggccgcgccgcttgatcagctggtctatggcaagtcgattaccgacaagtgcatcagctgggaagaaaccgaggtcttgctgcgcgagcttgcggaagccgtggccacgcggcgttggcactgagttgcgtcatcggctctctcgggggggg

SEQ ID NO: 916 - DNA, 12978 bp, Unknown
  gut microbiota DNA sequence
ggtatgaaaactgtagctattattggcgcattggatgaggaagtggcgctgatcgccaaatcgctcacgcatgtgacgcacaccgccaagggcagccttgacatcgtgtccggcacggtcgactccttcggttctgacgtcatcaaggttgccgcaacggtaggcggcatgggactggtcaatgcggccgccaccacgcagctgctgattgacgagattgccccggacgccgtgattttcagcggcatcgccggcaacctcaacacccacctgtacatcaacgacgtggtgctcggcggcaccctgcgctacctcgacactgacatgcggctcgtaggccagtggaagcccggcactgcggacgctccggtggaggaattccactctgatgaccgtctgctggaagtcgccgacgaggcgcttgccaatgcgggcattacccacatcaccggcatcatcgcctccggcaactacttcgtggacacgccccaaaaggtcgaggaggtcatccgactcaccggggctgacgccgtggagatggaaggcgccgccgtggcacaggtcgccgcccgcaataacgtgccggcactggtgattcgtgccctttccgacaacgccgacaccgattacgaggtattcaaggagttcgacatctccgaatacgccgataccgccgcccgtctggctgtcgacatcgtcaagcgcctgtaactggtcacctccaagttcggcgttgccggtgtgggctggtacatggccatcatgactgccctcgctctgctcgctctgttcctgatcaaggaaagcaaggacaaggactacgagctgtaaatagagctccccatattatgctcccgccagcgggagcattttgttatgtcgtcccgccaaaaatgaacaatagacgaacttacgtagtttaggcatctcactacgcctcgcacgttttactctggaaatcatggatatctggcagatcgtcgtgattgtggtgctcgccgcgctgatactggtgtgggttgccgtcatcgcctacaacaaaggccgcgtttcaggccggctcgccgccgaacaggacctgtccggcgacgaggatacgcattctctattcggtgatgatgcgcccgtgcgccccaccgagcgtcgcctgattgaagtcctgcccgaagccctgatcgtcaccgaccgcaacggtctggtccaatattcaagccccggctcagtgccattcggcctagtctccggcgaccgactcaactcgcgtgaagtcgaggacatcctcactcaggccgccgccgacggtggcatgcgtgagcgtgaggttcagctgccggtcaatcgcaattcctatccgtcctctaatggccgaggactggaggccggccagtcacgcccgtccaacacgctgtatttgcgtgtgcgcattggcgatatcggcgatgacctgtacgccatcttcatcaacgacatgtccgagcagcgccgtttcgaggccgtccgccgtgactttgtgaccaacgtttcgcacgaactcaagactccggccggtgccatcgcgctactggccgaaaccgtgaccgacgccgccgatgatccggacgccgtacggtatttttccggccgtatctccaaggaatccgcgcgcctgaccgaactggtgcatcatcttatcgacttgcagaaagcccaaagcccgcaaagcgtgatcgatgcgcggcgcatttccgcgctggatgtggcacgcgccgccatcgccgccaatcagacccaagccgactcccgccatgtggatatccgactgagtgtcaacggacagtcagtacccacgaaggtcgaggagccggccgatggcgaaggttccttggaagaatcaggcagcccagccacgaacggtccgatgatcaaggccgacaaagaggccatgcaaaccgccgtcaagaacctcgtagagaacgccatccattactcgcccgaacacaccactgtggcggtcggcgtgggggagcgcgatggcaaagtcaccattcgcgtggtcgatcagggcatcggcatccccgccaaatcgctggaccgcattttcgagcgattctaccgggtcgacccggcccgttcgcgcgagaccggcggttcgggactcggcttggccatcaccaagcactgcgtgcaggagaacggcggtcggatttcggtctggtcgcgtacgggggaggggtcgacgttcaccatcgagctgccggccgccccggatgaggatgacgacgaggcccggtcggacgagtcgacacaagcgtagggccttggttggtgcccgacatggtgccattccactgccacacaatcacacagtgggcgaggtgcgcacaccgcgcgtagcccaattacgcaattacgtactttcgggaaacagcaggctaacggagaacaaatggttacgataatgtcggaaaactttgcgcctatgcgcacgggaacatacccaagaaaggctactatgacacgcattcttatcgtcgaagacgaggaatcctatcgcgagccgctggtataccagctcacacgcgaggggtacgacgtgtccgccgccgccactggcgaggaaggtctggaactgttcaccaagggcggcatcgatttggtgctgcttgatttgatgctgccgggcattgacggcactgcactgtgccgccgcattcgtgagcagagccgtgtgccgattattatgctcaccgccaagagcgccgaaatcgataaggtcgttggccttgagattggtgcggacgattatgtgaccaagccgtactctttccgtgagctgctggcacgtattcgtgccgtgatgcgtcgcaatcaggccactgcccaggcttccggcactgtggatgacgatattccgctggtgtgtggcgatatcgccatgcaggttggccagcatcaggtcaccgtacgcggcgaaaccgtgttcttcccgctcaaggaattcgaactgctcgaatacctcatgcagaacaagggccgtgtgatgacgcgtcaccagctgatcgaccgcatctggggttcggattatgtgggcgacaccaagacgctcgacgtgcatgtcaagcgcgtgcgctccaagatcgaggaagatccggcgcaccccaagtatctgactaccgtgcgcggtctcggatacaagatcgatactcccgcggagtaaatggaaggcggccttcgggtcgcctttttttgttgtggattgtgggctcgctgtggactcgccgcaggcgagcccgctccaaaaactacgtagcctcaacgtagcccacaaacatccaagtgttcatcttctgtttactgatttcggttttgggcccttgaaaccaccaatacgcttgtagttgtcatgaattgaccgggcagcgctgagccgcccgcgaatagttgatagagggattaagtaataatcatgcagaagaacatcctcgttcgctccattgccgctctgtccggcattgtgatgctcgcttccgtggccgcctgcggcgataacactgccgccacgaccgacaacagctcctcctccgattccacttccaagtccaccccgatctccggcaacttctcgggcgccggcgcctcctctcagcaggccgccgttgaagcctggatcgccggcttccagggcaccaaccctgaggccaagatcgcctacaacccgtccggttccggcgctggcgtgcagaccttcctgaccggtgccaccgcttgggccggctccgacaaggcccttgccgatgacgaagttgagcagtccaagtccgtgtgcactgaaggcaccgccttcgatgtcccggtctacatctccccgatcgccgtggtcttcaacctcaagggcgtttccgatgccggcaagcacatcaacatggacgctgccaccatcgccaagatcttcgacggcaagatcaccaagtggaacgatccggccatcgccgatcagaacaaggacctgaagctgcccgacaccgccatcaccgtggtgcaccgctccgataagtccggcaccacccagaacttcgtctcctacttcaaggacgtcacccctgacaactggacctacgacctctccgagaactggccgaacgaggttggccagggtgccaagggcacttccggcgtgatctccaccgtcaagcaggccgacggcaccatcggctacgctgacttctctcaggtcggcgacctgggcaccgtggccgtcaaggtcggcgacaagtacaacgagatttccgccgaggccggctccaaggtcattggggattccaagcaggacgacaccgttaagggtgacaaccgcatcgtcatcaagatcaaccacgccaccgaggccgagggcgcctacccgatcgtcctggtctcctacgacatcgtctgcccggcctacaaggacaccaagcaggctgagttcgccaaggcttggctgacctacgtgacctccgacgagggccagaaggccgctcaggatgccgccggcaccgctccgctgccctcctccctgaagtccgagatcaccaagtccatcgaggccatcaagaccaagtgatgacgtcggcccgcaagggtcgtgtggactggacctgacaactgaacgatagactgtagtagtaagagcagtcgccgccaactttaagccgcagtcgtaaaccatacggctgcggcttaaagcgggtcaggacccgaacggtttggcaacgtcacagacgaaaaccgcaccacttgaatacttgataaccaccctatataaggagaatccgtgagttcgcaagacaaaacggctgtgcagtcagttggtggcaagaccgccgacaaggtgtttcgcggtgtggcatacgcctgcggcatcctgatcctggttgtacttgccgctgtgttcctgttcctgttcttccgcgcctggccactcatcggtggcgatcaggccgccaacagccagaccgtgtccagctttaccggcggcaaggccagcagcttctggggctacgtgctcccgctgttgttcggtactgtgctcgtgtctttgctggcactgctgattgccttcttcgtgtccatcggcattgcgctgttcatttcgcattatgcgcctaagaagctcgccaccgcgctgagctatgtggtcgatttgctggctgccatcccgtccgttatctacggtttgtggggcggcctgattctggtgccggccatctacccgttctggaactgggttgccaaccacctgggcttcattccactgttcgagggcccggccgccaacccgccgcgcaccgtcgccaccgtggctgtggtgctcgccgttatgattttgccgattatcacctccatgtcccgcgatatcttcatgcagaccccacgcctgcacgaagaggccgcgctggcgctcggcgccaccaagtgggagatgattcgtctggccgtgctgcccttcggcaagtccggtatcgtgtccgcctccatgctggctctcggccgcgcgcttggcgagacgatggccgtgttgatgatcctgtccccgggcctcaactactccatcaagctgctgcaggcctcgcagaaccagaccatcgccgcgaatattgccgcacagtaccctgaagccaacgatctgggcgtctccacgctgatcggaactggtctgattctgttcctgatcacgttcgtggtcaacttcatcgcccgtaagcttaccgagaaagcgactgcgtgatgactgctgctgagaacactgaaaagactccgatggacggcgcgcccgaaatcgacttcgatcgtttccgcccgacccgttccgccatccagcgccgtaatatcatggaccacttcatgtgggtcctgatcgcggtggcgtttgtgatcgcctgcatcccgctgatctccctgctgtggaccactatcgtcaacggcatcaagcgcctgaacctgaacttcctgagctacaacatgaccggtgtggtcggtggtaaccagaccccgtccggtggttacggcggtgtgctgcacgccatcatcggtactctcgaaatcaccgctggcgctatggttatctccattccgatcggtttgatgtgcgccgtgtacctggtcgaatactcgaaccgcggcaagctcgccaccacggtctccctgctcgtcgacgtgatgagcggcatcccgtccatcgtggccggcctgttcgccttctcgatgttcacgattctgctgggccccggtaccatcaacggtttcgaaggctccgtggctctctccctgctgatgttgcccaccgtggtcaagtccagcgaggaaatgctcaagatcgtgccgaacgatttgcgtgaggcttccttggctctgggcgttaccaagcagcgcacgattaccaagatcgtgctgcgcaccgctctgccgggcatcgtctccggtgccattctggccatcgcccgcgtgattggtgagaccgcaccgttgctgatgaccgccggctacatctccagcaccaacgtgaacctgttctccggccagatgaccaccctgccggtgttcgtctaccaggagtactcgaagctcagcgcgaactgcccgcccaacgccgacgccacctgcgtgaccacgattccgatggaacgtgcgtgggctgcggctctcgtgctgatcgtcatcgtgctgctgctgaacctcattggccgaatcgtggcgaaggtcttcgccgtcaagaccgaacgctaagccagtcgctaagcctaagccttaagaacacaaggaaatataaggaaacatcatgggacaacgtattgacgtcaaccacgaaaacatctactacggcgactttctggccgtggaagatgtgaacatcaacatcgagccgaacaaggtcacctccttcatcggcccgtccggctgcggcaagtccaccgtgctgcgcaccttggaccgtatgcacgagatcatccccggcgctcacgtcgagggcgaggtgctgctcgaaggcaagaacctgtacgacaaggacgtggatccggtggccgtgcgccgcgacgtcggcatggtcttccagcgcccgaacccgttcccgaccatgtccatccgtgagaacgtgctggccggtgtgcgcctgaacaaccaccacctggccaagtccgacgccgacgatctggtcgagtgggctctgcgcggtgccaacctctgggaagaggtcaaggaccgtcttgacaaccctggcatcggcttgtccggtggccagcagcagcgtctgtgcatcgcccgcgccgtggccgtccacccgcaggtgctgctcatggatgagccctgctccgccttggacccgatttcgaccttggctgtcgaggatctgatcaacgagctcaagagcgactacaccatcgtgatcgtgacccacaacatgcagcaggctgcccgtatcgccgactacaccgccttctttaacctgaaggcagtgggccagcccggtcacctcgagtacttcgcggacaccatcacgatgttcaacaacccgcaaaacgaagaagccgagcgctacatttctggaaggttcggctgatcgtttcctgcgcgcagcgtaatgatttgtgcgtaggagaaacggcaaagcccgccgcaaggcgggctttcgcatattcaacgcgagtattgccgagtattaccgttctcgcaacggagcgagctggaatacttcgtcagactgggcggcgacttcccgcttcggtcgatcgacgggagaacggcgggtaaagcggtacaagacaagtccgcacgatgaatactctgtgataaattttctgttaacgtgcgagtatggaagaatggtcgcagcgaggtccagcaaaggagcataggtgagtactggtctgatcgtcggcattgtcgttgtcgttattatcgttgtcttgattggttggggcgtcagcgcctataacaacctggtgacgctgaagaaccgtgtgaagaacggttgggcgcaaatcgacgtgcagttgaagcagcgcgccgacctcatcccgaacctggtgaataccgtcaaggggtacgcatcccacgagtctgaagtcttcactcaggtgaccgccgcccgcgccggcgtagtggctgcggccagcaacccgagcacgaccactgctcagcgcgccgccgccgaaaaccagctgtcccgcgccctgttcaacctgcaagccacggctgaggcatatccgcagctgcaagccaaccagaacttcatggatctgcagaaccagctcaaggaactggagaacaagatcgcctacgcccgtcagttctacaacgacgtggtcctgaagctcaacaccgccatcgaaaccgtgccgacgaacatcatcgccggtctgttccactttgagcaggcgcaatacttcgaggccgatgatgcctcccgtcaggtgccacaggtccagttctgacccgctccaggcccgtccggtaagccgccggccgggcccgtattgtcttaagagagggaagacatgcggatacgattcattcgcgccggaatcatcagcattgttgccacggtggtgttggcagttatcaccttggcgataatcgggacttccgcgttcggcgattcggccgacctcagctaccgcacgctggactatgacgtgaccgccaccgcgaacggtgatttgaaggtcacgcagcatatcgacgtcaagatgcgtgagcgtaccgacagtgacgacaacaccaagccgtggaagcagctgttccagcaatacacgctgaactccggcaccctgactgatatcagcgatatcagcgtgcgcaacgtcacagacggcatcgactatgcccaacagagcgagcccaagctgcccagtgacgtcttttccgacaaggaatggaacagtgactacgccaaccattggtatatcgccgatgtgagcgatggcagcgaccatccaaaggcatacacgcccggtaccgatggcctcaagcccagcgcctccgccaccgaagataacacgaccgtggagatcggctggaatattccggtcaccaccgaggccgacagtatgaagttcgacgtgagcttcaccatgcacgatgtggccaccaaatggaaagacgtggcctccttccaatgggagccgttcggcaagaagaaccaagtgcctatcggcacggtcaccggcaccgtccacttccccaacggcatcaccggcaaaacctcatgggcatggctgcacaccgagcgcacttcggaaaccaagcgcaacagcgacggcagctacacgttcacggcctacaacatccacaatggcgactacctcgatgtggtcgcggcgttcgatgccgccaaagccaagggcatcgcccgcaagggaaccggcaatcatctcaaggacctgaaacaggacgaatataagcaacagcagcgctggctcgacaagcaacgattcgctgccagagctcgtctcgtgttctggattgtcagcatcgtgctcggcatcgcgttgtgcgcgtggggtatctgggctgtgatctccagcaaccggcgtgcgcaataccgtggcagcgtcgaatactggcgcgaccagcccggcatcagtccggcttccgcagcccgtctgattcgcgtggtcgatccgtcgacgcgccaatccgatgaagaccgccagctgaccgccaccatgctgtcgctcgccgtcaagaaggccattgccgtctatccggggccgtcggacatgtatcgcggcatcgacatgagccaggccacgccggtgggcttgagccaaatgattgccgccgaccaaggcaagcagtatgcggcaggcatcaccagcaccatcgtgattctgccgctcgccattgatgaggcacccaacgcgcaacagttgggattgagcgaatcggaagatgcgctgctgaacctgctcatcgtcatttcgcagcgcgtgggcagcccggtattcgacctgaaccagatgaaggcgacctgccagaactggcaagacggctatattgagctcggcaaattcaccggtgcatgcagcatggaataccagcggctgggtgccacgcgctctgtgggctggcaatggatcctacccggcgtattggccgtcgtgctgggatttggttcgctgctggccaacagctttatcggatacccggtggctggtcttatcgagctgccgatattcctggtcggcctgttctgctcgatggccggcgcggtgaccgtgctcaccgaccaaggccaggatatcgccggccggactctgggccttaagcgttatatggaagacttctccaacttcaccgaccgtggtaccgccgatttggccttgtgggattggtatatggtctacgccgccgcgtttggcatttccgatcgcgtgatgcgtgagctggccaaggcctatcctcaggtcaacgacccggcttggctggatgccaacgcctccaactcgttgttctactggaactaccgcccgtatggctggtacagccaccgtcataatggtccattcgaccacgatgctgccgggcagatggacctaggcgttggcggcccagctccggcttacggaggcacgtcgtttgccggcggattctccgacctcggctcgcagctgaactccggtctggcggacatcagctcgaccatcagcgcggcagcaccatccgccgattccggtggcgatttctccagcttcggttcgggcggcggctccggtttcggcggctcgttcggtggctcaggtggcggctcgttcggcgggcggtaaatccagcgttctgcttacgctggaatcggacacagaccgtctcattactgttgaagggaatcaccatggcattgttccgtaacctcggaccgttctccaccaccgccatcggccacggcgaaatgccgctgaccatcgaaaacaatcgtggccacgaggtcggcatcgaaaccctgcatgcctcgctggacgccggctgccgtcacatcgacaccgcttgggcctactactgctccggcggcgaagaacagaccggtgaaaagctggtgcgcgaggcccttgagacctggaaggggccgaaggacgaggtgctggtggccaccaaggtgggccacttccgcaacttcaccgacggccgccccacgtgggatgtggacggtcgcccggagaacctgattcgtcgcggcaaggagagcgcactggcgctcggcgtggacaccattgacctgctgtacttccaccgccccgatccgaaggtgccgtacaacgagtccgtcgaagccatcaagcagctggtggacgagggcgtggcgcaggaggccggtatctccaacgcctccatcgagcaaatcgacattgcgcgcggcattctgggcgacaagctcgtggccgtgcaaaaccagtactcgccgattcacctggagacccaggacacgctcgactactgcgccaaggttggcttggccttcgtgtgctggagcccgctcggcggctaccgtcacccctatgatgagaccaagttcgacccgttccgcgaggtcgcggcggcccacggcgtgagctaccagcaggtcgtgctggcatgggagctcgccaagggcgaccacatgttcgtgattcccggcgcgcaccgtcccgaaaccatcctcgactccctgaaggccgaccagctcgaactcacccccgaagaactcgccaagctcggctgaactttctcagctccccttgtcaggggagctgtctcgcgtagcgagactgaggggtagtcgccggagtagtcccgggtagttccacaaggagataattgtgcgcaaaaaactcatcctcgacctcgataccggcatcgatgacgcgctcgccatcgcatatgccctaggcagtgccgacgagatcgatttgatcggtatcacggccacctacggcaatgtcgcggtgccgctggccgcgcgtaacgcgctggcggtactgcacttgttcggccgtgacgacgttccggtctatcccggagtcgaccatcccatcgccccggcaacattgccgaaaatgcgtggcaccacaccagacgagcgggcccaggcctacgcgcgctggcagaacggcggcgcggacggctggcaaacggacgcttcgtggtcaccaactcccggctcggtggcggtccaccatcccaacggcatcggcggcgcaatcatccccgactccccgcgcgctccggaagcaccaggctcggcggtcgatttcatcatcaccgccgcgcgcgaatacggcccggacctgaccatcgtgcctacgggcgcgatgaccaccatggccaccgtattccgcaacgctccggacctgaaggattccggtgtgaacgtgacgttgatgggcggtgcccttacattgcccggcaatgtaagcccggccgccgaagcgaacatctcccaagacccagaggcagcagactatctgttcaagtgtggcgcacgcaccaccatgatcggcctcgacgtgacccaccagaccgcgctcactcgtgagaaagcccatgaatgggcgtctctggggacgccagccggcgactttctcgtcaccatgaccgactactacatcgacttctacctgaagaaccagccggagattcgcggatgtggactgcacgacccgctggccgtggccgccgcgctcgacccatcgctggtcacgaccttcgggttcaacttgcaagtcgatctcgagggcccgttccgaggccgtaccatcggcgatcgttcacggcttcaggaccccgacaaacacacgcaggtcgccttgggcgtcgatgtgccggaattcctggatcgtttcatggggcgcgtcaccgcggcggcccggtgacgcggacggcggccgtccggtccgctccacgccgtggatggatatgacccatggcgtggagcgcccttttgggaaccgacagaacataggggggcgctgcatgcgcagcgcccccccc

SEQ ID NO: 917 - DNA, 30448 bp, Unknown
  gut microbiota DNA sequence
ggcctccacgaacgggaccaacgcggtcttttcgaccacatcctcgcccttggaattctggccggttaccaccggctcggtcaaacgaatcttgagcagggattgggcgggggagtcgatcacatccaccactttgccgaccacttggccggcgggcagtcccagaccgttgccctcgactagacgggcctcaaggccaataagatccttgggataccattcgtcggcctcgagcatgtcctccgcatcgtcgacctcgccgtagagttcgacaccgtttagggcctcggcggcattgcggtcgtcgacgccctcaagcttgagaatccaacgatccttgaacgtgcgcgagccctcgacgatgtactcggtctcgccatcctggctgtagagcacggagtccagctcgaagcgccactcgggatcatcggtgtacaggcgcacggtgacttcgcccttcaggccctgtgcgcggccaatacgagcgaccctcagcaactcgagctgctgagggtcgtcgtgcatgtcttgctgtgccatgctgtgaatcgttccttatcggttatcgacggacgtccatgatgtcaacgcggaccttgtggtcagacagtgcctgaatcacggtgcgaatcgcgttggcggtgcggccgccacggccgatcacacggccgatgtcttccgggttcacgcgtacgcgaagcagttcgccgcgcgcgttctcatgagacttgacggaaacatcgtcgggaaaatcaacgatgttcttgatgaggtgttccacagcttgtgcaagcatagctagcctttcgtttccgctcaggcctcagccggagcttcttcggcggcctcttcagccggggcctcctcagcggcggcagcggcttcggcttcagccttggccttggcagcagcttcggacttggcggccttcagcttctgagcctggtcctcaacggccgcgatgcgggcctcggcgtccgggccagcctcaacggtcttcagggtgccttcggcaccttcaaggcccttgtacttctgccagtcgccggtgatgttcagcagcttgaagacgggctcggacggctgagcgccgacgccgagccagtactgagcgcgatcagacttgatctggatggtcgagggctgggtgttggggttgtaggtaccgatctcctcgatgaccttgccgtcacgcttcttgcgggaatcgacgaccaccacacggtagaaggcgtagaacttcttgccctgtcgcttcagacgaatcttggttgccaaaatggctctccttgtaatgctaggtgtgcgggttctcggtttgccatgtggggcatggccgtccggaatccacgtgtcctcgcggctcggggtgtagagggcgccacgcgcgcgcgaataactggcctattatagcgcacagggccggactgggcgtggcgcactgtggttgcggtgtggtgcgcgttccccgttgcgcaacattccggggaatgtatcgcgaaaatgccggctatcgcagtgcaagcgttgcggtcagggccagatgatcagtgccctcgacctcaaacgacttcacgccggacggtttgagcccgggagtgaacagcacgtgatccagctcgatgcgcggccacttgagccagctcgggaaggtgagattcgggccggcggcttgaatcagacttgcgtccttgaatccggacttgagcaacgcgcggaagctcggatggtcggtgctcgagttgagatcgcccataacgacgacgatattgcgattgctgacggattttgcacgggcgagttctcgcagacccagaatgccggccgaccaatccgcgcagccgcgcatcggcgatttcgggtgagccgaacaaagcgtcaccgtgcgattaccggaggttttgagggtgatggcgggaacgtcggcggcggggatggagaccacgttgggcaccgctgcgctcggctcgtagcgggaatagatcacgttgaatccgccattatcggtctctttggcgtctccgaactgatggtaggggagaagttcgttgatgtcggcttcggtaagacgtgtgatgaggtcgtcggtgacttcctgcaaggccaatacgctgatattgcgttcgcgaatattgcgaatgatttcagcggcgtcggcgcgtccgtatcgacaattcatcgtcataaccgagaactggggcgagagtgtttcacgcgttgtttcacagtgtccatcggagatggtttcgggcccttccttcggagtgtttgaggtacccgatgtattgctgttatggctttttgacagcgtcggcgaagttgtttcacgggctgtttcacggtgggattctttgcgtttcccggccgggtcgattgacgtaccccagtagttgatgcgctgtgagctggcaatcagcgcgaccacaataagcaacgacatcgcagtccattcatgttgccatgcggcgaccgcggccagaatcatcaaaggaacccacaacagcggcgtcagggcaatcatgtacggaagcggcatacgggcctcgagaccggcgggcagcgcgcttaaggtcgtccataacagtgcgatgattgccaccgcgctgaggattgtcgtcatggaagttcctttcgaaatataaattgaaccgagatataatttggctcccctctgcgaggggagccaagttgtgagatcagcgaccgaacagtccgccaaggcctccgccgaggttcggcggcagttcagtgccaccgtcgacgttgcccatcatctgctcaaggccagcgggcagggccgggttctgtggcttcttggcgaaggcggaaccgccggtcgaaccggaggacttgccggccagcttatcgcgcaatgccttctcctcggcctcgcgcttcatcggattgccggacttgccgcccttcttcttgttcttgcccttcttcttgccgccgcccatagccgggccgccgaagccggggatgccgccgcccatgccgccacgattggacatgcgcttcatcatctttgcggcctgctcgaaacgctgcagcaaagcgttcacctgagaaaccgtcacgccggaaccataggcgatacgggcgcggcgggaaccattgataatcgacggatcgcggcgctcggccggggtcatcgagcgaataatcgcctcggtgcggtcgatttccctctcatcgaactgctcgagttccttgcggtgctgggccatgcccggaatcatgccgagcagcgacttcattgagcccagcttgcgcacctgctgcagctgatcgaggaagtcgtccaggccgaaggaaccttcggagattttctcggcggccttgcgggcctcttcctcatcgaactgcttctgcgcctgctcgatgagcgtcatgatgtcgcccatgtcgaggatacgcgaggccatgcggtccgggtggaagacctcgaagtccttcaggccctcaccgttggaggcgaacaggatcggcttgccggtcacggacgccacggacagcgcggcaccaccgcgggcgtcgccatcgagcttggagagcaccacgccggtgaagtccacgccttcgtcaaaggccttggcggtcttgacggcgtcctggccgatcatcgcgtcgatgacgaacaggatttcgttgggacgcacggcatcgcgaatgtcgcgagcctgcttcatcagctcctcgtccacgcccagacgaccggcggtatcgatgatcaccgtgtcgtagagcttctgcttggcgagttcgatggaatcgcgggccaccttcaccgggtcgccggaggtctggcccggagctgcgacggcctcgccgccatcggattggacgcccttttcgggagcatagacgggcacgccggcgcgttcgccgaccacctgcagctgcgtcaccgcgttcggacgctgcaaatcggccgccaccagcagcggcgtgtggccggaatccttgagccagtagccgagcttgccggccagcgtggttttaccggcaccctgaaggccggcgagcatgatgatcgtcggcgggttcttcgcgaagttcagcggacggtcgacgccttggccgagcacgtcggtgagctcctcgttgacgattttcaccacctgctgggcggggttgagtgcgtcggacacctcggtgcccagtgcacgctcacgcaccttgccggtgaaggaacgcaccacgtcgagcgccacgtcggcgtcgagcagcgcgcggcggatttcacggatcgtgccgtcgatatccgcctcggaaagcttgcccttgctcttcagatgcttgaacgcattcgagagtctgtctgtcaaagatgaaaaagctgccataatgggcaacagtctagccgccacgcgggaaattgcggtgttggggacgacgcttttcggggaatgtgccgcgtagtagtcagggatgttgggcattcagacggcaaatgccgtgccgtccgctcgtggcgaagccaatcgagtgcttccgataccatggaaaccgtaaagaatcctgtgttttttggaatacttacgctgttttgaaaatcgctggacaccgcttatacgcagactgccgtgcgctccgaaccatgacgttcgggccaacgcagacatgccgtgcaataaggaaggcccactgatgcccacccaaaaactactcgaacgcaaagccctgatcgttggtatcgtcatcaacgtgctgcaggtcttagccggcatggccgtgttcttcatgaccggcctcaaggccatgttcctcgacttctccttcaccgcgatttccgtcctgtccggaatggtggcggtgtatctctcgtcgcgcacggtgcgaaccaccgagcgcttccccaatggcatgttcgcactggaacccatctacgcgatctgcaaggccattttcaccatgtcgttgttggtgtattcgctgattgacgtgtgccgagtagcgtacgactacttcgtgttcgggtccggcgaacgcattgaaaccggcccggtggtcatctacgagatcctgaccgtaatagtgtgcttcagcctatacatgtattaccggcgctccaaccgctccatcggcgattccagcaccatgctcaccgccgagtgcaagagcacattggtcgacggatcgatgtcgttcggcatcggcgtggttgccatcttcctgatgctgctaccggccggcggtccgcttgacttcctgcactacaccggcgatttcttcatcaccgtggctttggtggcattgaccatcaaggaaccgttcagcgtgctcaaagaggcgttcgtggaattggtcggcggcgtgcatgatgacgatgagaccaacgcctacgtggaggctgaggcacagcgccatctgcctgccaacaccgactacgagcagacgctgatcttcaagactggcatgaactacaccgttgacgtgtatctgagcggcatcggcgaaaccattgatgtagctgacctcatcgaatgcaagcgctcgctggagaaggagctcatcaagcgcctgcacatcgtggacgtggacttcgtgtttgactgattgatgggtttgaagcgactacttcagactccaagtggaaccctgcgggccgtcttcgatggcgatgccggcctcggtcagggcgtcgcgaatctgatcggccttggcgaaatccttggccttgcgagcttcggcacgggcgttgagctgctcggcgatcagtgcctccagcgccgcatgttcgggcgactcggccgtgccatcagcggcaccgccagcagacacccacggctcggccagcgggtcgagacccaaggtgtcgagcatggcacgcacggcgagcagcgcctcacgcacctcggccttggcggtttcggaattggcgcggtcagccagatgtgaaagcaacgtattgccggaacggatggcggtgaagatcgcggcggttgcaccagacacattgacgtcgtcattcatggcggccacgaaatcggcgggcaaatcgtcggcggagacggcagcaacctcctcgcgagaaggctgaccgcccagtgccacaccggcgcgctcgatgaagttcgagacgcggtcgtatgcggcctgcgcctcgaccagcacctgatcggaccattcgagcatcgaccggtactgcacggagcccaaagcgtaacgcaccacccaagcggaatgctcggccagcacgctcggcacggacaggccggtgcccagcgacttcgacatcttctcgcccttggcggtcacccatgctgaatgcatccagcgcgcagcagaggggtagccggccgcgcaggtctgcgccatctcgttttcgtggtgggggaagcgcagatccaaaccgccgccgtgaatgtcgaagccatcgcccaggtaacggtgggacatggcggagcattcgatgtgccagccagggcgacccacgccgaacggcgtcgaccaacgggcgtcttcgggatcggtgtccttgggagccttccacagggcgaaatcacgcgggtcgtgcttgtcgggggaggcgtcggccgggtcgaccggattgtacttgtcggcaccggtggcgtccacggacgggcccatgcggtcggccacggtggcggcctcatcgacttcggaggtctgcttctggtgggtgagttcgccgtaatgcggccaggatgccacatcgaagtacacgttgccggtgggcttgccgtccgcatccgtgaccacatagccgtggccgttgtcgagaatgcgctgaatcaggtcgatcatgtccgacatgtggccggtggcgcgaggttccacggtgggcggcagcacgccgagcgtgttgtacgcctcggtgaattcgcgctcgtaataataggcgcgggcccaccaacgctggccggcggccgcggccttatcgagaatcttatcgtcgatatcggtcacattacgcacaaaagtgactttgtaaccgagcttcaaaaaccagcggcgcacgatgtcgaacgccacggcggcacggatatggccgatatgcggtgacgactgcacggtggcgccacacacataaatgccgacttcgcccggcttgagcggcacgaaatggctgacctggtgcgaggcggtgtcatacagattcaggccttctgcggccttggcgacatgcaccggcgtcaggcttgaaggcatgacggaaatgttgaaatcctgcggttcttggctgtttcccataacgctcaagcgtagggtccgaaccagacatgctgaatcgttactcgaagagcttgatgaacgcttcacaggcggggcccgaacgaggtgacagacggatgagaagcgggacaacagtctcgcgagaacacgtctttgaccgctgcggaaactgcgagattcatggatttgccctgcctgttacgcaaacggggaacgctcgtgccacaatagaagtcatggccacaccacaagtgctcattttgcaacatgtcccatgggaacgcccgggacgcatattgtcgaacctcgaggacatcggtcttgagacggtgacgatgaatatcgtcgacaaaaagaaaccggacttgcctgatttcggcgaactggctggcgtggtaatcatgggtgggcctatgggcgcgcttgattacgacaagtatccggggctgaaggcggaagccaagttggcgcgtgccgccgtggcttcaggcaagccgattctcggtgtatgcctggggcatcagattatcgccactgcgcttggtgcgcagctacgtaagggcgatgcgccggagattgggttcgcgccgatcaagcgtgtggacaagcatgacttcttctccatgtgggataagcagctgacggtgctgcactggcataacgacgtggtgggtttgcccgagggaggccagctgctggcgcgttcgtcttccaccaaggtgcaggcattccgactgggatccgcgctgggcatgcagttccatcttgaggtgtgcggttcgctgctggacgaatggctggatgagccgagcatggtcaaggatctcaaggccgcgggtggttccaagtcccaattgcgcgagcagttcgcccaatacgaccagctactgcaaccgctcgccgagcaagtgttctccggttttgcggcccgctgcaactcctacgctcagacgctgaacaaataacgtttgcgggccgccgctgggcaagcgtggcgctacattggtgagtcatgccgacttatgacattggactggaacacgtttcgctcgctttcgctaccaaaaccatcttcactgatgtaacgcagggtgtttttgaaggcgaccgcatcggcatcgtcggcaagaacggcgacggcaaatccacgttgctgcacctgttccgcggtgctcaggagccggattccggccgcgtgacaaagcgtggcggactcacgttcggcatgcttgaccagcgtgatccccttgatgacaacgccaccattcgcgaagccgcacttgaggggcgcgccgactacgaatgggcgtccgataacacttcccgtgaaatcgtcgaggcattgctcggcggcatgagcctggatgccaaggtcggctccttgtccggcggccagcgtcgccgcgccgatttggcccgactgctgctcaaggattgggatattcttgcacttgacgagcccaccaaccatctcgacgtggtcactatccactggcttgccgaacatttgaagaaccgctggtccaaaggccagggcgctctgttgctcgtgacccacgatcgctggttcttggacgaggtctgcgaatcgatgtgggaagtccacgatggcgtgatcgagccgttcgagggcggctattccgcatatatgctgcagcgcgtggaacgcgatcgccaagccgatgtgcgcgaaaccaagcgccgcaatctggctcgcaaggagctcgcatggctttcccgcggtgctcgtgcccgctccaccaagcagaagttccacgtcaaggccgcacgcgaattgattgccgatgtgccgccgatgcgtaacacacttgaactgaagcaaatggccacctcccgtctcggcaaacaggtggtcgatttggtcgacgtgacgcagattttcgaaaaaccgcagggcatggccgatatcgacccggatgtggcggcgctctccgcgtccgcttcccgcgtggatgtggtcaacgccatgtacgccgagccgcagctgcatggttccgttgaggtggcggtcaccgacatgactgacccgcgcctggtggacgccggcgtgccggaagccgtcgagtccgctgaggaagcgcgtaagaaggccgaggctgagagcggcaatccgcagcttgctgacgatcgcgaggttcgtcgcatgaacacgggtggtgaaaccatcggcggtggcactgctgcaacggattcggatgatgacactgctgcagccggtgtcacctcggctgcacgcaaggtgacggtttccggccgcgagattcttgacgatgtgacttggctgattggcccgggcgaccgcttcggcatcgtcggtgcgaatggtgccggcaagtccacgctgcttaagttgattgatggcacactcaccccgaccgcaggccatgtgaacattggcaagacggtgaagttcgcggtgctctcgcagcgcctcgatgagctggagaagctcggcaagtacaagatcaaggaagtgctttcccgctataagccgagctacattgtggatggcaaggaagtgacgccgggacagttgatggagcgtctcggcttcgaatccgcccagctgatgacgccgatccgcgatctctccggtggtcagaagcgccgcatgcaactgctgctgattctgcttgacgagccgaacgtgctcatcatggacgagcccggcaacgatctggacaccgatatgctcgccgtgatggaagacctgctcgatacttggccgggcacgttgattgtggtctcccacgaccggtacctgctggagcgcgtcaccgatcagcagttcgcgctgattggcggcaaagtacgtcacttgcccggcggcgtgcaggactacctcgatatggttgaggctattaagaacggcaagggattgccggctgacacgcctggcttcgcgggcaccggtagcagctcggcgaagtctggtaagggtaaggcggccgccgtcaacgctgccgcatctctccctcagtccgcttcgcggatagctccctcgtcagagggagccaataacggtgaggactccacctcgaagctcaccggcaaggccttccacgaggcatccaagcgcgtgaatgccatcgaacgtaagctcgctaagcttgaagagcagaaggccgatctcgaggcgcagatggccgcccatgacccgagcgactacgagggtctcaacaagctcaatgaacaactcaccgccgtcaatactgaaagcgatgatctcgaagccgaatggctcgaactctccgaacaattggagtagcgggagaaaccgtaacgttcacaaggcctcggcagtttgccggggcctcccgctatgcaaactcccacggattaatcaattccacgtcggtaccttcgaagtccttgatattgcgcgtggctatggccgcatcccaggaacaggcaattgccgcaatcatggcgtcttgaatactggtaggtgtgcccctgtgttcgcgttcgacaaggatatgggcataatccgcagctgcctgagtgtcaaatgcgaacgttctgtcctctaatgtcataagcgccagcttgacggtcgtatctgtgtactttcgtcgtttgccttcaggcatgcgacatattccggccaacaactcggcgacggtgatggcggtggttgccaaattgcttgtatcttggttcctcagccaattggcaacgtgttcgtctggctgtttcttgatgatttcgctgatgacgttggtgtccagaataatcatggccgattcctattcaaaagatactggcggtcgggaatcggcggaatttcgctcggatagtgggagttcccccttgtcgagtccctcaaaatccatgttcttcatgaattcgcggatctcgtcatagaaattggtctttcgcgtgatttcatgcgccaccgtgccagccagccattcttcaagaatggatcgcacctgagattccatggagcggttgtttttctcagccacttctttgagctgctgaatctgctcatcgggtatttttcggatggtcaatgttgccatgatgcacctccttgttgctgtcataatgctagcatgaggtgctgtcgttttgcttgcagtacgggtgatgaggtatgcacgcatgaaaaaaggcggatatgcatcatgcgcatccgccttttgagcttggactgggtcttcccgcagtcgccgaatcagcgcccggtaacctcggaaccgacgaccttttcgctcagggcgcgcgggccgcgggtcacggctacggcaccggagcgcaccagctcaatcacaccgtaatgctccaaaagccccagcagggcgtcgatcttgccttcggcaccggtggcctcaatggtcagcgattccggattcacgtccaccacgcgcacgcggaacagacgcacgatctccagcacgtcggaacggttggattcgttggcggccaccttgatgagcaccagttcgcgttccacggtggagttcgggtcgagttccacgattttgagcacatgcagcagcttgttgagctgcttgatgatctgctccagcggcacggcctccacgtcggcggtcaccgtgacgcgagagatgtccggacgctcggtgggggagacggacagcgagttgatgttgaacgcacggcgggcgaacaggccggcgatacgcgccagcacgcctgggcggttctccaccagcacggacagcgtatgacgctgggaaccaggctgggatgcaggatagttagccatgagtgttctcctctcctcagtgctcgctcgcagtggcagcggcggtctcgtgctcgaacacgccggtcgcatgctcgtccggaccggttcccggagccggggtgccgccagccagcggcttgatgccgggcttgtacgtcacctcgtcgttgggggcgccggcggctaccatcggccacaccatcgcatccttccacacgcggaagtcgatcagcaccgggcggtcgttgatctggttcgccttttcgatggcggcaatcgcctcttcctcggtgaacgcgcggatacccacgcagccgtatgcctcggccaacttgatgaaatcaggcacttcgagcggcgcatcgccgtcggccagtgccgccgcaccatcggcaccgtgcgcttcaccatcgagcaggttggtctgcgagtagtggtgctcgtagaacagcgtctgccactgacggaccatgccgtatacggagttgttcagaatcgcgatcttcaccggagcgtggtccaggaacgcggcggccagctcctcagaggtcatctggaaggaaccgtcaccatcgatcagccacaccggcttcttgccctcgaattcacgggccgagcccacggatgcgccgatggcagccggcagaccgtagcccatcgtgccgaggcctccggaggagatccaagcgtgctggttctcaaaatcgatgaactgcgaagcccacatctggtgctggcccacaccggtcacccagatggtggacggatcggccatctcagagagcttcttgatgacccactgcggggccagcgatccgtcggtcggctcatcccacgtcatcgggtattcctcgcgccagccgtcgatcgccttccaccagggggccagattcggcttgccctgaatggcctgcgtacgctgaatctcgggaatcaagtcgtcgagcacggtagccacatcgcccacgatcggcacgtcgggctgacggttcttgccgatttcagccgggtcgatgtcaatgtgaatcacgcgggcggtcggtgcgaaggcgtcgagcttgccggtcacgcggtcgtcgaaacgtgcaccgatggccacaagcaggtcagcgcgctgcacggcgccggttgcggcaatcgtaccgtgcatgcctagcatgccgaggttcttcgggtcggagtcgggaatgatgccgcgtgcgggcagggtcgtgaccacgggagcgccggtcaggtcggccagagccttgacctgtgcgccggcgttggagcgggcggcgccgccacccacatacagcaccgggcggtacgactgagagaacagcttcgccgcgtcggacagcacacggccgtgcgccttggtggtggggttgtagccgggcagaatcatgcgctgcggccatgagtagtacatgtcgccggtctgtgcggtcttggtcagatccacgaccaccgggccggggcggccggtgttggcgatgtagtacgcctcggaaagcacgcgaggaatgtcctgcgcgcgggtcacgaggaaggagtgcttggacaccgggtaggtgatgcccacgatatccgcctcctggaaggcatcagtgccgatggcttgcacgcccacctgaccggtaatcacgaccatgggcacggagtccatgttcgcgtccgcaatggccgtgaccacgtttgtggcacccgggccggaagtcacgatgcacacgcccaccttgccagtggccagtgcgtagccttcggcggcgtggccggcggcctgctcgtggcgcataagcacgaagcggaacttcgtgttgtctttgatctcgtggtagacgggcagaatcgcgccgccaggaatgccgaagacgtcctcgacgccgaggtcctccagcgaacgaatcagcgcctgggcgccagtcatcttctcgccatcgacgatggtctgcttatcgggggccgtgttgattttcggtacaccgctgaatgcctgcaaaggcgtgggtaaagccatgattcctctcacctcataggttttgtcgcgaacctgcccgaccttgggatggggccgggtgcccgcgtgtctgattccagtcgcttccccgagacttgtggccccggcgcgactcgtcgctcatgttggtattagtctattcgcaaatccgacagcgggcttacttagtccgcgtcttgaacgagtccagtgacttccagcccgcttcggcggccgccagctgcgccttacgcttgctggagcccttaccgatgccgatgatgtcgccgttctcgcccaatgagacgcgcgcggtgaagatctgcgcgtattccgggccggagacctccatatggtagacaggctcctccttgccgaggccgtgcgccttgacggtcagcgaggtcttccagtcaagtgccgggccctcggtggccacttcggcgagcgtgtcgtcaataagccggtgaatcaccttgcgtgcctcgtcgatgccgtgttccaggaaggtcgcgccgatgagcgattccacgatgtcgcataggatggagttcttctccgcgccgccctgctcggcttctccgtgacccagcagaatgtaggggcccaccttgagcttggttttggcgatggcgctcagcgcgtcttcggagacggccttggcgcgcatcttggccagttgcccctcggtcatatccgggtgaatggtgaacagcgtttcagtggagaccagttcgagcaccgcgtctcccaggaattcgaggcgttcgtaattggccacgccggggtgctcatgcgagaaggaacggtgggtgagtgcctgcacgagcagatccgggctgagagtggtgcccaacgcttcaagaagctcgttggccggcgtcggctgctgtggggtttcattactcatgattgttgtatggtccttcacgcgatggtgatgtgttgtgttgtgttgtgttgtgttgtttgcgatgcgatggtgtacgcaatggtgcacttatgcgaagaccccgccacccgtcgatggcagggccttcattcaagccgttatcgcaggactcacttggtgtgagccggctggatagcggagcggtaggtgcggccgcggtagttaccgcagctcgggcaagccatgtgcggcagggccggagcgccacagttcgggcagttcacggtcgcagcagcggtggccttccagttcgcgcgacgcgaatgcgtgttggcgcgcgaggtcttgtacttgggcagtgccatttgagtatcctctatttcgttcgaacaattgagcttaagcgtccgttatcttaacgcacggctcgtacaaacttcgttcaggcgcgcgtcacttggcctgctcgccgttctgctcggcctcgagctgggctttgagccccgccaatccggcaaaacggatatccgtcacatcgtgatgatggtcgggatcctcgttcagatcggcaccgcactgcgagcacagacccctgcaatccggtcggcacagtggttgcaacggcagcgattcgaccagcgtgtcgcggatcatcgcctcgatgtccgcgaatgcgccgttctccagcagcggatacgtgtcttccgactcgtcctcgccggcgatgatgtcgatttcgtcgtccttcttgctcttgccgcccttgccgttggccttgtcctgacccgactcgtacgggaagaacaccgtcacatcaaccggccagtcctcgtcaatcggcttcaggcagcgcgtgcactcgctgacgaatggcgcgaccaggcggccggtgaagatcaggccgtccacaatcgaatcgaactgcccgctcacgtgtacgggctcaccttccttgatgccgacaatgctgtcgccaatgccggaaggtgccgggaaatcggcgtcaatcggcttggattgaccggcgcgcgaagcaatctgcgctaccggaatggcccacggggaatcttcaactcgtgccatggtatgttcttggtgcctttcgtatgttggctggagttattcgttactggcgttatttcgcgttactgatgttgccggcgttgctggcgttactgggcttcgggatagtcgttcagcgtcaggtgcggcatctgttcgcgggccgcgcgctggcgctcttccagcacgttaagaccggcctgcacatcctgactgagtttgccgagctgctgggacagcccttccatcaccgtagtgcagtactggtccgcgccttgggtcagatggtcggctttggtctgtgcctggtcaagaatcgcgcgcgctttctgccgtgcaagctcggtgacgttctcttggccggccaggaactgtgcctgttcgttggcgtccctgatcatgttggctgcgcggctttgtgcggaggcgacgatggcgttggactgggtctgtgccgattccagacggcgctcggcctcgcgcatgagggcggaggcgcgctccaactgcaccggcagcattttcttcaactcggaaagctggtcggtgaattcgtcgcggtcaaccttcaccatgccgggggcgaatatgctggacttcgcttcgcccagtgccgcctcgagctggtcgatgatgtcatacaccgtggtgaattcctcgtggctcttgaccgtggccgggtcgtcgtccgtggtttctcgcaggtcgggcatttcgttcatgaacgaggggcgaatgccggcggcctgagcggtctgagcctgtgcccgggtctgctgagctgcttgggcctgcgctttggcctgcatttgtgccggagtaggggtaggcgcggcgggcggcgatccggcgagaacatcggcctcttcggtgggtgccggcgcggcttgcgtagacgcgggcggttccggggcggacggctccggagtggacgatgcggcgtccgcattcggtttggtcagatcgacgtatccagtagggtggtcatcgctcatagtcattagtgcatcagtccttccgctgacgttcctcggccagggcatcggccagcatcggcacgacgcaatcgggcaccatgccggtcacgtcgcctccatggcgggccacgtccttgacgatggaactggagatgtgttcaagaatcggatcggccggcaaaaacagggtttcgatgccagcgagcttgcgattgaccagcgccatgccgagctcggcttcatagtcgccgttctggcgcagacccttgatgataacggtggcgccgaccttcttgcagtagtcggtgatcaggccgtcggtggaagaaacggtgacgttcttgcaaccggctttgtcaagggcgcggcggatcacgtcgactctggtggcttcggaaaacatcggtgttttcgcggcgttgacggccaccaccacatgcacctcgtcgaaaaaccgcgccgagcgctcgattacatccaagtgtccggcggtaacggggtcatacgagccggggcatactgcgatagtcatgctttatagcctaccgctagtggtgtgcttcgtgctgccgagcgtgcattgttgtcgcgtcggcgtatgaggcagtgtgtgcggtgccgtatgtggcgtcggtgtggcgtcgtgtgcggcattgtatgtggcattgtatgtggcggggtggcgtgatgcgcgacatgggtgtgtggaggtgtgcggattacgcgccaatgggtttcgcgggtaacgacgggaatctatgatggagtgcagtcgaatcgttgaatacgaggaaagaagtgcaccatgacttttgccgagatgttcgttgatgatgccgaaccgctgcgcaacccggaccaaggtgccggcacgtcggtgctggagcgtccggagaccaaggagtcgccggttcgtgacgatggtggcgacgccgatcgttttgcgcactacgtatccaaggaccgtatcgctgaatcgcgtgcgaccggccgcccggtggtggccctgtgcggtaaggtttgggtgcccaagcacgatccgtccaagtacccggtttgccccgactgcaagcggatttacgaggaaatgacgcgctaaaggtggtacttggctcccctcagcgaggggagccaaaatggtcaccgagcggaaatctcgtcgatcagcttgagctcctcgtcgctgaagtgggtgttcttcagtgcgccgatgttgtcgagaatctgctgcggcttggaggctccggtcagcacggaggtcaccttgccgtcgtgcagcagccatgccaggctcatctcggccagcgtctggccgcgttcggcggccagattgttcaggtccacaacctgcttgtgcagtttctcggtcagggcggaatcgttgaggaatcgcggatcgtgagccatgcggctgtcggccggaatgccgttgagatagcggttggtcagcaggccctgagccagcgggcagaaggtgataaggcctttgcccagcttgaaggcggtctctttcaggccgttcttttcaacggtgcggtcgaggatgttgtacttgttctggttgatgatgaacggcacgtgcagttctgccagaattgcggcggccttttccatcgtcggaccatcgtagttggacagacccacgtacagggccttgccggagttcacggcctgagccagcgcgcccatcgtctcctcaagcggggtttccggatccgggtggtggtggtagaagatgtccacataatccaagcccaagcgttccagcgactggtcgaggctggcgagcaggtacttgcggctgccgaggtcgccataggggcctgtccacatttcgtagccggccttggtggagatgacgagttcgtcgcggtgatgcttgaagtacttggcgagcagcagtccgcagttcttctctgcctggccgggctcggggccgtagttgttggctaggtcgaagtgggtgatgccgttgtcgaaggcggtgaagaccagggacttcatctggtcgaatggcgtgatgtcgccgaagttgtgccagaagccaagtgagacggccggcaacttgaggccggaggtgccggcacggttgtaggtcatcgtgtcgtaacggtgcgggttgggggcatagatggcggttggctcgaacattgagtctccttacaatgtcattcttgttcttacgaatgcttacctgcgatgggcagaccgacgccgattgagcggtattcgtaagtgttcttggatactatggttccagttcaagtgaacttgaatgcaaacggctgcgatgcttcggcgtgttgccgcagtaaggagtcatgatgtcctacaccattcgtcaggtggccacgcagttccatatgcagccctctacgctgcgctattacgaggatcagggattgctgaccaacgtggagcgcaccgaaaccggccagcgcatatacgaagactgccatatcgaccgtctgcgcgcgatttgctgcttcaagaacgccggcatgaccattgacgatcttaaaaagttcttcgtgtatgagtccaatgagcccgagcatatcgatgaaatccttgatctgctggaatctcgccgcgaatccttggacgagcagcgccgagccctcaacgaggcggccatgcacgtgcagcgcaagctccattactatggcgacatcaagcgtgccatcgacgccggtgaagactggccggattggcgcgagtacaaaaaccgcgcctattccattgaatgctgagaccatcgaatgctgaaaccatcgagtgctgagctggatgccggctgggcactaagaccgatgcgcgtcgatcgtgggcgcgtctatccgagtaaggccttgctcggcagtgcgcggtcgagcagccagacaacgagcgatatcacgaagaacgctatggccagcttgccgcagctaatgccgaacccttgccagccgagtgcgtcgaggttgatgaagtcgtacggatatggactgccgccggccgccggtccggaccccggccaaatcgccgcacgggccagcacgaagaccaagtatgcagggaagtacgccagccacgagaacatgtaatgccagcggaaacgccggtgcgggtcgaatagcacgaaatcgataaccgccataatcggggcgattttgtgcagcatcgtattggtcatgatgccaataacctgtggcacgtatgccgggtcgtccggaggcatcaggaagaacgccaccagtgcggtgactatggcgtacacagtcaggcaccccttaagccatgcaggcggctgaatacctttgagcagtgtggccgcgccggaccacagcatcacgatgcccagcacgaaaccggtctggaacgtgaaatacacccagaactgcggtttggaccatgcctcatatgtgcccacgaagcagaaaccggcgatcgcaaagcgccacaacgccacgatgaatctcatgcatcgagtctaccgcttcgccagtgggccgtatggtgcggctggcgtattggctggtcgtgatgattatggtcggtgtgaccgaccgccatagtgccgatggatatgacgatactgaacccggcaatatcgaatctggcgatacgagaataagacgagcccttcccgcacggctttgcccggactacacttaggtgcaacttcaccacttatgtaggaaaggccttgcaatggtcgattattcgccggctctgatgaccgacatgtatgaatacacgatgctcgacgccgctctgaaagacggtaccgccgaccgcaagtgcgtgttcgaggtgttcacgcgtcacttgcccgaaggccgtcgctatggcgtggtggccggcaccggccgcattctggatgcgctggaacatttccacttggatgaagcggatctgaagttcctggccgaccgtcacgtggtaagccccgagaccattaagtggctggagaacttccacttttccggtacgattcgcggttaccgcgaaggtgagatgttcttcccgaactccccgattttgcaggtcgaaggcacgttcggcgaatgcacgctactggagacgttgattctatccgtgctgaactacgattccgcagtggcctccgccgcctcacgtatggcgtcggcagccaaggatcgtccttgcatggatatgggcggacgccgcactaacgagtgggccgccgtggccgccgctcgagctgccgtagtgggcggattcaagggtaccgccaatctgctggccgcccagctgtatggtctgaaggccattggcaccgccgcgcattgcttcacgttggtgcatgattccgagcgtgacgcctttgaatcgcagatcgaggcattgggcaagaacaccacgctgctggtggacacctacaacatcgaggaagccgtgaaaaccgccgtcgaagtggccggtcccgaactgggtggcgtgcgcatcgactccggcgacttggccgccatggcccagcgtgtgcgcaaccagctggacgccctgggtgccacgaacaccaccattaccgtgaccaacgatttggatgagtacgcgctcgccgcattgcagaccgcgccggtcgactcctatggcgtgggcaccatgctggtcaccggctccggcgctcccacttgtgcgatggtgtacaagctcaccgagcgtgaaggcgctgacggcacgatggttccggtcatgaagaagtccaaggataaggccacagtgcccggtcgcaagttggcattccgctcctacgaatacgcgctagccgaagccgaacacgtgatttccggctcggaagagaagctggccggtttcacgcccgaaccgacgtggaagaacctgctggtcgatttcgtggaccacggccatatcgatgcgcagtggcagggccatgacgctatcatggccgcccacgactaccacgccaaggcgttgtccgaactgcccatcaccgcgcagagcctcatgaagggcgagccagtgattcctacggagactcaggttctctgacgagaactttcgtctccataggaatccgtcgcagcatagctgctccccttacctacggacagcccactgggctgtccgcttaacggttcgaccacagagaccaaagtcctctgaccgtatctcactggccgcatccctctggttacattggctactcttccctctggatgagtgaaactctcaatggtgataacgcggcgggcaacgatgacgtatcagagcggcgcgatgtagttcgatgatggttgacgagttgctatccaggcatagagcggatggcgtatgctggggcgcatggttgaaatcaaagacatgcttggcaatcaccaaataattcgtgccgacggccgcaaggtcgacgaactgcgccctgtgcgcatcacccgccacttcaccgacgcccccgaaggctccgtgctcatcgaatgcggtaacacgcgcgtgatgtgcaccgccacttttactcccggtgtgccgcgttggcgcaaggactccggcctcggctgggtcaccgccgaatactcgatgctgccgcgtgccaccgccgaacgcaccgaccgtgaatccgtacgtggcaaaatcggtggccgtacccacgaaatcagccgactgattggccgctgcctgcgtggcgtcatcgatatgaaggcgctcggcgagaatcagattcagcttgactgcgatgtgcttcaggccgatggtggtactcgcacggcttccgtaaccggtgcgtacgtggctttggtcgacgcagtcaattgggcggagaagcaccgccatatcaagtccgccagccgcgtgcttaaggactatgtgtccgccgtatcggtgggcgtgatcaacggcactccgatgcttgacctgccatacattgaagacagtcaggccatgaccgacatgaacgtggccatgaccggttccggcaccttcatcgagattcagggcaccgcagaacaccgtccgttcaaccgtgccgaactcggcaccctgcttgacttggccgaaaagggcaacaaggaactgcaagccgcccagcgtgccgctctgtccctagactaagccagctcccctgacaaggggagccttcttaaaggagaacctcatgcaaatcgtcgtcgcaacccataacgaaggcaagcttgtggaaatccgccgcattctcgaagaggatcttggcgcggatgccgaaaacatcgaactggtgtccgctggcagccttcacctgccggatccggtggaaaccggcgtcaccttccaggagaacgcgctactcaaggcccgcgctgtggccatccgtaccggtctgcccgctgtcgcggatgattcaggtctcatcgtcgatgtgatgggtaacgctccgggcattctgtctgctcgctgggcgggtgctcacggccacgacaaggccaataatgcgctgctgctcgcccaaatcgaagatattccggatgacaagcgtaccgcgcgcttccgttgcgccgccgcgctggtggtcccggacaccgagaccggtgccgacgtgaccggtggagtggctgccgacggcatcaccgttcacaccacggctgccgctgggagccctgccccggtgcatgctcgatacgccatcaagtcggagacagtggagctcggcgacatgccgggtcacatcatccgcgaggctcgtggcgaacacggtttcggttacgatccgctgttcgtcccggacgaccagcctgccggtcgcgtcagcactgagcctgaccatgaaggcgagccgctgaccagcgccgaaatgactccggccgagaagaatgcgatttcccaccgaggcaaggcgctgaaagccttggtccccgccatcgaggccctgctgcactaagtcgtctaggctgtctagctgcactgagccgcgactaagccacagttgagtcgcggctcagcactcagcccccgaatcgggcgagtgtctagcaagcgcctatgacctagcaagggcgatacgaaagaaggccggcgcttagtgcgtcggccttcttgatgaacaagagccacccgatagaatcgaactaccgaccttcccacgaacgagggggatgctctaccactgagctaaggtggcgtggcttcaagagccaagtagagaatatagcactgcgtttgattcactgcaagccggacattcatcatctttgggccattgttctttggaacatcgtggcggcaatagtgcgaacgatgtgcacacctcatctgctcggccgccattcgtcgtgtgcgcgctatgctagcatggtgagcctgattgactcggaggcaaagggaagcatgcgtgattttgtgctggtgaagttgacagacgaggagttcgatgatttctccgccaggcatccacaaggcaatttccaacaaacctcggcgatgggacgccttcgcgccgcgcaggggatcgacgtcgaatatttggccctcaaggagggcgagaagatcgtcgcggcggcactgttcgaaactcaccgctctcgattctctacatttgcggtcatccatgatggcccgatgtgcgactatcacgacaccgaagcattgaccttcttcatggatgcgctgaaacgccatgccaaggcaaagggtgcttcacagctggaaatcacccctgaatccccgtatcggcttcgcgacaccaatggagcttctttgccggatgaccagaatggcgctcccgacaataagctgatagaacagctcgaggcgatcggcttcactcatggcggtttcaccgtgggctacacggcggttccgcgttggcgctacctcaaggatctgaccggcattaccgatgagaaaagtctgctgaagtcctatgacaagcgcacccagtggagcgtgaagcgtgcccaatcgatgggtgtgcacgtgcgtgagctgtcggacgacgagctgggggtattcgcacgaatcgagcagcaaaccgctgaacgccgtagcttcgaataccgtggcgaagcatatttccaccgtttcaaggaagcgttcggcagcaaagcgcattttatggttgccgagatccacatcgacgaatacgtagcagacatgacgtccaagcgtgaagcgctttcggccaaggtggcggcattgaccgccaaaaacgccgaacaccccaccaccaaaaccgaacgtcagctgggggaggagacccgcaatctggcggcagccgaaaagcgcctgaacgaggcggccgagttcgccaaagacggggatgtgctgccggctgcggcatcactattcgtggagcatccgcgcgaggtcatctacctgttctccggtagcgtcgagcagtacaagcccttctacgcctccgcgctgattcagcatgacgcgatgctgcatttctgcgtggaacacgggctgtctcgctacaacttctacggcatcgacggcgtctttgatgatcccgatgacgaggggcgtggtgtactggagttcaagcagggcttcaacggatatgtcgaggaacttccgggcgagttcgtactgccggtcaaaccggtcgcctatgccatgaagcaatttgcgcacaagctgctgtcgcggtaaacggacgcagcacacaggccgttccagagcccagagtaacgatcagagtaacgacaagtaagaaggttcgattatgacgcaatccgatgcaggcgtcgcctcactcacccctaccaagatcactcctgccgagctggatgcgttctccgcagctcaagtgcaaggtagtttccagcagacctcgcagatggccgccatgggtgcgttcaacggtccggtggactatgtgggtgtcaagcgcggtgacaagctgattgccgcctgctacgtggtgtacacgcagtcccgtttcggtttggaaggctcggtctggtgcggaccgctgtgcgattatgacaatccacaggtggttgaggcgatgaccgaagccctgcgtcgttcggccaaggcccatcacgccatcagcgtatcctgctggccggccgcagtctaccgtctgcatgatctggacggcaagccgaccagcgacccggacaccacgatgatggacaacatggcccgcttcggttggaaacatggcggcttcaccgtgggctacgaatccgtggtgaaccgctggaacttcgtcaaggggcttgacggcattcataatgagaaggaactgctggcctcgttctccaagtaccgccgtaagaacatccgcatcgcccaggattccggtctgcgcgtgcgccggctggaacgcggcgaactgagcactttcgtcaagctgtgcgatatgagcgccgcacgtcaaggcttcaagagccgcgatctggcctactatgagcgtctgttcgataccttcggcgacctgatcgagttcaaggtggtcgaaacccatttcgacgaatatctggacaccctgcaatccaagctgaatgcggcctccaaagacaagcgcaacctcgaacgcctgctccagcgcgcgcaacagcggccggaaggcacggccaagaagggtgcctccgacccggcaacgctggaaaagcgcatcgccaccgcagacaagaagatcacggcgctggaaaagaccatcggcgaagtcaatggcatcatcgcctcggacggcccggtcattccggtggaagccggtgtctacttctggcatccgaacgaggtcgtctgcctgtccagcggcgaggacgatcgtttcatggattactacccgtcttccctaatccacttcgaggcgatgcttgactgcatcgcccgtggcgtggagcgcttcaacttctacggcatttccggtattttcgacgccaacgatccttcctacggcgtctggcagttcaagactcgcttcggcggattcgtggaagagcttccgggcaagttcacgctgccggtggacggactgcgcttcggtgtatccgaagcagcgcacaagctgctgcatcgctgacaaacagtggcgagcacggacacagaaataaggcacaggtgacgacgagatgagcgcgactgcgaatcgaacagatacgacgtatacgtttggcgtgattacgcccgaagagctcgaccggctttccgaagccacaagccagggcagcttccagcaatggtccgggcaggtccgtcttgccaagattcgtgggcatgaagccgaatgcgttggcgtgtgcgacgcatccggcaatctggtaaccggctgcgtgattctgtacctcaatggtcgtttcggtgcagatggctccgtatatttcggccccatcggcattagcgatgatccggctctgctgcgggccataaccgaggcgattcgtgaatcggcccgtcgccaccatgctgtttccgtggcatgctggcctaacgtcgcctaccgtctgtattcctcggacgggcagcccgacggcgagccgaacgatgcactgctgaccggattcaccgatgccggctggacgcatggcggattccataccggttatgacgtggtctgccagtggatgtacgtcaaggatctcaccggcatcaccaacggcaaggaactgctggcatcattcggcaaacgcgctcaatggagcgtcaagcgggcgcagtcgatgggcgtgcacgttcgcgaaatcggccccgacgagttcgacgtgttcgccgatatcgaacggcggaccggtgaacgccgcgggttcgcgacgcgcggcgcggactatttccgccagttcaagcaggcgtatggcgcggatgcgcatttcatgctcgcggaaatccacatcgccgaatatgtggcggatatgaccgccaagcgcgaggccttgcagaccaaggtcgcacagctgcagacgaaatacgatgaacgtccgaccacgcgcatcgaacgtcagctgggggaggaatcgcgcaatctcgcggccgccgacaagcgtctggctgaggtggagggatatgccaagaagggcgatgtgctgccggcagcggcttcaatgttcgtcagtcaccccaatgaggtggtctatcagtattccggttcgttggaggagtacaagccgttctacgcctcggcgctgattcagtacgaagcgatgctgcacctgtgtgtggaacagggtgtgagccgttacaacttctacggcatttccggcgtgttcgacgatccgaacgacgagggccgcggcgtgctggaattcaagcagggcttcaacggctacgtcgagcagatggtaggcaaattcacgttgccggtggacaagttccgcttcggcgtgagcaatctggcgcacaagctgctgcaccggtagcagctggcggccgggggacgaacctatgtgggctgcgtctcgcctgaccgtgcgcccgccgtgcgcctacttgcgcatttgctcacacgcccatcagcgcgtgagccacagccatcatcaccagtgaaatcatcgcggtgattgccagcgagaagccggccagtttggcgttgccgagtactttgtcggtgaacagcgtggagaaaatggcgatcggagccaacgcgcagatcaccatcacggcgcgaatcgaagccgagaacggcagcaggagccacgcgatcaacgcgaaggcgacgctgaacggtatacgccaagcgatgacggccatgacttccttcacgtcatgcttggattggggcaggtccatgagcatgcccaccatcagcatcgacaccagcgcgttggcgccgctcaatggctgggttatagaggcgatccaatcgggaatcttcacgttggcgacggtcaacacgatcatgagcagatacgtgtcgaacggcaccgagccgaagaagctcttgccgatggtgcgcagcaatgcgcggcgggcaagccgtttggcgtcgcgatccttgggcttttcgtacggtagggtgggagccgaaccggcgtgttgttcggcaagtgttttgccgggctgaatatgcagcagttgctgggtgagcacattggtgccggcggccaccatcacgcagttgccgatatcgaacatcgcagccggcaccaccgcgcccgcaccccagaatgactggacgaccgggaaagaaaaacagccgagattgaagccggcaccgttgagcatcaggaaggcgcggtcggtcacattgcgcttgcgggtggccagaaagatgaacacgaccgggataaaagcaaacaggaatgcgaataccgaaataagcagcagcgagatgtcatgcggattggtggcgaacgagtatacgatggcaccgggcagcacgatgttgaattccgcggtttgcagcacgcgataatccttctgcccgaacaggccgaaccgcttgaacagatagccggcgaggatgatcagcaacagaccaaccggcgtaagaatggcggacatacacttctctccttgactcacacaggctcatggcgcacaggctcagacccgcaatgctgtggcccattatatttgccgccttggcattgccatatgtagaggtgtccgcaagggcttgcagctgccgcgcgcatatacgaaaagcctcccggaagcgttggcaatccaatgcttccaagaggctcaagccggtgcgcgagatgggacttgaacccacacgtcaaagacacaggaacctaaatcctgcgcgtctaccaattccgccactcgcgcgtgcatatccgcgtttccacaggtgtggaagatatgcaaaaccctaggccggacagccattacagaccagccagcctagggcatccgagccacttgtcagaatcgaactgacgacctgctcattacgagtgagccgctctaccgactgagctaaagtggcttggttcgcggaaggcatttcgccagccgcgcacaagaagttaagtataagacatccccacgaaaagtccaatcggcggattggcggttgtgtcgcgaccgctcagtcgaagatgacggttgcgccgcgccgtgaactgttcgataatgcaaacgatggcaatccgacatcgctgactcattttgttctgttcatgtccgaatttgtgagtattctgtttggtgatacggagcgcatccgagccgtgtgcaagggcgctccagtcactgatgaaaggaatggaatcctatggccatcaatccgcccgttgacgccacccagacccctgagtgggctgccctgcagaagcactatgacgagcttcaggtcgaaggcgtgagcctcaagaagtggttcgccgaggacgccgagcgcgtcgagaagctgtccttcgacgccggcgacctgcacttcgatctgtccaagaacctgatcaagccggaaaccctccagctgttcgccaaccttgccaaggccgtcaagctcgatgagcgcaccaaggctatgtacaccggcgtgcacatcaacaacaccgaagaccgcgccgtgctgcacaccgcgctgcgccgcccggtcgaagacgagggcaagtacatcgttgacggtcaggacaccgtcaaggacgtgcgcgagacactcgacaagatctacgctttcgctgacgacgtgcgttccggcaagtggaccggtgtgaccggccgcaagatcgagaccgtggtcaacatcggca

SEQ ID NO: 918 - DNA, 8039 bp, Unknown
  gut microbiota DNA sequence
cccccccctgaggggagccagaaactggcttggttatggggtcgctctacactggcttctgctatgcattacttcacccctaaacgttgcgctacgtcgaataaaatcatgtatcacgataaggcgcaggttcagcgtgccgctgatcaaagcctaatcgagcgcggagttgagctatgggtgtaccgttgcgaattttgcggatgctggcatctcacgcatcgcgatccgcaatccagttaccggcatgtaccgctgaaccagcaactcaagccacacagtcgtaaaaagggctacaagccacgtagacgttagcgtcagaagctccacaggcctcgccaacgccgtgtctgagacaggttacggtccaaacacgtcaggtcgtaggctgctaagcgttcagggcgctcggacacacttcgtccaacacttacatcaccttggtgttttcaaggttgcggataacccaatcgttgaagcgaattaccggcttgcgcaacataagtcccaacagcaatgaggggacaaggaacagtgccagtttgcccatggaaacccagtattccatgccgaatgagcctgccatggccgaatgcatcgcatccaccgcataggggaacagtagccatttagaaacgacctggaagaacgtcggcagtgtttcaatggggaatgtgccgccggaaccggctacctgcataaccagcagtactacggcaatggctttgccgatatcaccgaacgacagggtcagcgtatacacaatattcgagaacaccagtgcagacaaccacccgaccatcaagaactgaatcggatgctcacactgcacgccgagatagaacatatcgcccaggcacaccagcgtaccttgcagcaaagcaaggaaaccgaaaatcatgtatcggccgaaatattcgtggtgcaagcgtaaaccgaactgccgcgcattgccgggagcctcggcacgcggcttcttcagcacatccaacgcggcggccggtccggcaatccgcccggcaatcatggcctcgcgaagacccacttccgaaccgagcggcagatcattgcccaaccctaagatacgagccttctcatggtcggaaatcgatactttcaacatggcgaccagaatgatcgcaccgacccaaatagacaaaatcgtgtagaacggagccatcgcggaaccatagttggcaacgggatagagcgcgatgcggtcgaccgctacgggtgccgccagcatggaagcaatggcatcgggcttcgcagaggaaatcacagacaggtcgatggtgccgccattggtgatagaggcgagttgggaagacaagttgtcgagtttcttcgccgaacgggtcaaagcgctagctgcgtcagtcaaggccgactggatgtccgtcaggctgtctgaaacgccgccagaaagacctgacacgctgcttacggtcgatgcaagcccgtcgattacggaacttgcctgcgtggtcacttcgtccatggacgaggtcagattgttcagttgcggtttcagcgtgctcttgtacgtgtctgaagcctgagtaatcgattgtttggcggcagcgatttgtgatttcagatctcgacgcgctgtatcggcatcggcagtaccgtttgctatgtgcgtggccgcatcgcccaacgcggtggcggcttgctgcatgctctgctgcgcctttgtggcttggtctgcagccgcgttcagttgagcggcaacggtatctccgcccacgggcagtgaagccgcttgtttggcgagatctcgtaaagcggcggcatactttccaaagctgtcggcctgagcctccactttggattgcatatcggttagcttgtttgatatctgtgaggattgtgagcccacatcggcaaaagcggcatcgatttgcttggcaatggtgtcgtaggatgaaccggcctgctgcaatgccgtaccgacgccatcggtggctccggacaatgccttgtcgaggctggagacgccgttgcgggtctgtttcaacgcctttttggttgtggccgcagctgagcctgttgaccccagcagcttatcggtggaatcaatgatgctgttggcggccccgagcagattggcataggaatccatctgcgacgcagtgccggtcaaacgagacgacatggtggcaatatgactggtggcgttgttgacgtactgctccatttgcgggctttgcgcgtaatcggccacgttggaaaccaaatccagcgccacgctcgccaaggtcttcacgaatgtctggtcgatggtcgtggccacggtggtagcaccctggtcggtgatatgcggagcgatcggattgattttctcattgagatagtattcgagcttggcgtgcttgatcttcggtgaaaacagcgtcatcatatcggagctgaagctctttggaataatcagcgcggcatagtattcgcctgagttcacgccatcgatggccttagcacgatccacaaactgccagtcaaggtcatgattggccctgagcgtattggtcacggtttcgccgacgttgatggtgatcggcatcagatcggacttatagcccttatccacgttcgccacagcgaccttcaaggccttggtgttgccgtacgggtcccagctggcggcgatgttgtaccaggcgtacagtgccggcacaatcgccaatcccatagccacgattacggcgatcacattgcgggtggcttggcgcacgtcacgtacgaatattttccagataagcttcatcgtgcgcctccctgcccaggctgcccggactgaccggactgtgcggtgtgcgcagtcggctcggtggcctgatcactgaacggtgtgagtcgttcagtggtttcgccgatattcggattgctatccatcgccgcttcgtgacgtccgtggccgtggaaacgccgccacacatatccgttgagcatcacattgcggaactcgtcggcactcatggcgctgacgccaagctgcatggcgtaggcttcgcgtgcgtattcaaccacaatgagataggcgtcgataagaataatcgacagaatccaagaggtcagcatggcgattttctcttgggtgacgaacagcagcaccaggaatacgaacgggagtacggtcagcaatgccagaccggcaacgatcatctttggataccgtgcgaagaaccggtgcgcgcgatgggcgatgatatcgcgcagttccttgctgtcggacaccgtgcggaatacggagttcaagctcacctgttcgttcaccatgctgttgtgctcggtgatcatcaggtcggtatctcccaaacgacggtcgaacagcgcgttcaggttcatcgcataccggcgtatgacaagtcccacgaagagtgccgccggcagataccagaacaggtgcagcatgtcgagccagtaatggttcgcgtacaggccggcaatcgggccgcgcatcgcgttgatgccgtaggtaaagggcagccacgggtgcagttcgcggaagaagttcggcatcatttcaatcggatacaggccggaggcgccgggtatctgcacaatgaccagaattacggcgatggctttgccgatatggcggaacgccacggccagtgcgtaaataatgttgatgtatacgaacgaacagaagatcccggccaagatgaacagcagcggatgctcgcattggatgccaagcaccagatcgccgatggtggcgatgacggcttgcaggaatccgatggtgaccagcagcagccagcggccaagatatgcttgcgtagcggtgatacggcgaatgccctcgcggtcgacctcaagcttgtagatggcgattagcacgaaaccgcctacccacagtgccagattcgtgtagaacggggtgactgcggacccgtaattgtcggtggcatacacgactttcgtggtcagggtgacgggattgcccatgaagtcgccgaatcccttgtcatccagatgcagcgtatcccggattttctggtaagcggcggaactatcgagcgtggcgatatcggtgcgtacggtggcgacatcgctggccacctggcgcagcgaatcctgcgtgctgctgatggtggtttttgtttggttcagggtatcgacaagctggtcgaacagcccgtcggcctgatccaaggtgccggacaacgaagtcaacgtgccatccagcgtgccgttcagggcggcgaaactgttcaatgatgaggtgagcgacggcatcacggtgccggtcagcgagccgcgcgcggtattcagcgccgcgatgccgccggtggtggtgttggtcatggctccggaaaggttcgtggtggcgtctttgccggagttgatgaactgtgtggtgtcggtatggaaggtgttgagctgtgtctgctgtttgctgatcaatgagtcgagcgcatcgatttgtttccagatgttctggccgaccgggtcggtggtgtctttgccgatgccggctttggtcagcgcgtctttcagatcgctgattgacgtttgggtggcgttcagtggggccgaaagtgtgttggtgatggtgtcgacggagttctgcgcgctgttgaaggaaccggtgatgctgccggcggcgttgttgacgtggacggccagtccggagagttgtgctgaactgctgtcgagcgcgccgaccagtgtggtggagaaggcttgtgacccggcctgtgtttccgccaacagtgtgccggactggcgggaggcattctgcgcggccgcgacggtctgcttgagtgaggcggtggtctgtttggcgtcggcgagaatcgtgtctgattgggccagcgtgtcctgtaagtcggtgagtgaatcctgaacggtgttcagcgtggacatcaccgtattgagatcatcgatcgtatcgtgctggactttgccggtgacttggtcgagatcgtctcccgcttcggaaacggccgaggcaacggtggtggctaccgtggtgacgaaggcggagttgatctgctcatcgatggtggtggcgccggtgtcggtgattttcggcgcgatcgcgttcttcttctcgttgacgtaatacttgattttcggctgtttggaggttccggtcaccgattcgaccaagctggcgctgaaatccttgggcagcacgatggctgcatagtatccgccggtctccacgccgtggacggcctgttcctcattgtctacgaagcgccagccgagttcgtcgttctgcttgagtttcttgacgacctgccggcccgcatcgagatggccgaccagatcgttggtggtgccttggtcttcattggctacggccacttgcagattgccggtggctgaatagggatcccagttggcgagaatgttgaaccatgcgtacagcgagggcagcattgctacgccgagcgtcaccacaacggcaacgggattgcgtaagatacgtctgcaatcgcgtagaaagacttgccaaactgtccgcatccagtccctcttttccggttcgtagtcattgcggccacatgcagtctattcccaccactggtgcgaatactgctggtttggcgggttttcttgcaaaactggccgttggttgtccgcataatgggactgatatgtgaacgtttgttgatggtgcgacaccggcgggatggttgtgcaattttgccggtatccggtgatgaaatgttgaggtgttggaactgagtcgtcgcagtgctgagaccgagacgactcagtgacgagcctatccgaggctatctcgttggttctggtctcactgatccagacggaagccctgagcggcggccttgtcgagcagtgtctgatggctgacatcctgccgactgatcgtggcgacctgatcgctgaaagcgtccaccggacggtcggcttggcgcagatcgtagtaccggtgaacttcctcgtcgaaggcgggcagctggtcgagtacgccatcggcgtcagccgggtaggtgttctcgaagaactgcatcgtgcgcggcatgcgcggcttgacggtcgggttctgatcgggcttgccgatggccagacccagcaccggatacgtgtattccggcagattcagcacgtcgataaggccggggatgttgttgagcagagagccgagaatcacgcagcccagtcccagcgaataggcggcggtctccatggcgtgcagggccagcactgcgtcgttctgagcttgggtgaagcgatagctgtacttgagatggaattcgtcggaagcgggatcgatacccttgcgttcggcgatgcgtgcgttgcggtgctcgtcgatgacgaacacgtacagcaacggcgcggtggcgatatacggctgatggccgaattcggcgagcttggctttggtggccgggtcggtgatacggatggcggaccagtcgttaaggaactggctggacgcggcatgttgggcgacggtttcgagcgtggcgcgggtatcgtcgtcgatggcctcgtccttgaacttacggatggagcggcggcccagaagagcctcgattgttgcgttggtaaccatggctttattgccgcacggcagacgccggacgtcacggtggattacctcacagtgaaatgccgatattgtgtggcggaactgtgctggactgatggttcctgtcgattgactgatggttccttgacgaaattccagcgatgagtcatcagtcagccaacagaaaccatcatccaaccgggggattagcggctgggcttgcgatggcggtggtcgacgaacgccttggagccccgatccgacagctgcgaaaccactgcgccgagtgcggccgaaacggcggcgaatgccagactcattgccagactttgcggcgcgtctgccgccagtcccttgcgcagattgcgtttgcttgtgcccttgtcccatatcatctggaatgctttgccggcaaccaagcctgccagcgctgggactgccgacttgatgagcttgtcgcccagagaatcagggtcgttgagccggtcctcgcgcagcctgttgaccttctcgtcgatgcggtgcaggctgtcgaccgcgcggtcggcgctggaggggaagtcggtgttcgtttcgtcgctcatgactctcagtctaatagcatctcaatcatctcagcgcaaaagatgggcgttaatggtggagtcatgaacgagcgcagactagagtggaggcatgagcgaacagaacgtgaacggcaccgttgccgtcgagaactctcgtggcggcaatggatttttggtgttgctgcgccacggccagaccgtgtggagcgaatccgggcagcataccgggcgcacggacatcccgttgaccgcggtcggcgagcagcaggcagcggatgccggaaggcgcctgcgcgaggccttccccgaaggattcagccagagctgtgtgttttccagtccgctgaagcgggcgtgccaaaccgctgaattggctggttttgcggaccacggtgtgttggacggcatcgctgaatgggattacggccgagccgaggggcgtacacgccagcaggtgagtgaggccagcggttttgaatgggatgtgtggcgtgacgggccgcgctcgctgacgcccacgctggagggcgactgggtcgagaccttgccttcgggcgaacaggtgccggtccatgccgggcctggcgagacgctggaagaagcggcggcacgcgccaagagcgccatcgacgagattacgccgctgctgaaagacggccataatgtgctgttggtggctcatgcgcacatcctgcgcatcctcacctcgcaatggctgggcgtggacccgcatttcgcacggttgctgcgtttggatacggcgcactactcggtgctcagcgtctataagggagataacgtcatcgaacggtggaacgcctagccccggttgcgctgcgattgcgctggcctgcccgctactgcgggcgggcctttattgtttgtggcgggaattgcggtatgtcgataaatgatttgcaaacgatagcgtcggcgtgttgttttttttt

SEQ ID NO: 919 - DNA, 4708 bp, Unknown
  gut microbiota DNA sequence
tgactgaattaatgggatatttgttgacaatggcctgaaaatgatgatttatgacgcgctgatattgctatcgtttgcaaaaagaagcaaaccgttgcacaatagtgcatgtcgatagtcgtaaaggtgcgtgctagcgtacctgtcctgaccggggacggccgggtcgacgatgaaagagaaaggttcgatgatgaatcgaacagtcaagtcagcagtcgcgatggcggctgtcgctgcgatgtccctcggcgctttggcggcctgcggaagctcgacctccggcgatgacgccaagggcaaggtctactacctgaatttcaagccggaagcggctgatcagtggaccgctctggccaaggaatacaccaaggaaaagggcgttgaggtcaaggtgcagaccgcggcctccggtacctacgagcagaccctgaagtccgaaatcgccaaaaccgaagccccgaccttgttccaggtcaacggcccggtcggctaccagaactggaagaagtacaccgccgatatgtccaatacggatgtgtacaaggagctcgtcaaccaggatgtggccctgaaggatggcgacaaggtggtcggcgtgccgtacgtgatggaaacctacggcctgatctacaacaaggacatcctcaacaagtacttcgcgctggatggcgccaaggccacgtccatggacgaaatcgacaacttcgacaccctgaaggccgtggccgacgacatgcaggcccgcaaggacgagctcggcatcaagggcgcgttcacctccgccggcttcgactccagctccgactggcgcttcaagacccacctggccaatctgccgctttactacgagttcaaggatgacaacgtcaccgagcagccggccaagatcaagggcacctacctgccgaactacaagaagatcttcgacctgtacatcgccgactccaccaccgaccccacccagctgagcgccaagaccggagatgatgcgaactccgagttcgcgctcggcgaggctgccttctatcagaacggcacctgggcttggaccgacctgcagaaggccggcatgaaggccgaatccgtgggcatgatgccgatctacaccggtgtcaagggtgaagagaagcagggcttggccactggttccgagaactactggtgcatcaacgacaaggcctccgacgccgacaagaaggccaccgaggacttcctctcctgggtgatcacctccgacaccggcaagaaggccatctctcaggacatgggcttcaccaccccgttcaagaccttcgatgatgtcaagtttgacaacccgctgactgaagccgctgttgaggatcagaagtccggcaagacccaggtttcttggaacttcaccatgatgccgtccgaagagtggaagaacaaggtcggccaggcactgctcgagtacgcgcagggcaccggcaagtgggatgccgtcaagaccgccttcgtggacggttgggcttccgaatacgaggcttcgcactgagtctcatagagtcccatagccgataagtaacaatccgcggcgcccctgccatttccttctccgggggcgccgctttgtattgctgagtctcgcacaaaatcgtccgccgcaaaaaagtgtgaggcacgcacccgctcaatcacacactgtgtgtccatagattggcgatttttcgccatttcccacaatgtgcgattgagcgttattgtgcggttgcctcacactttttctatggtgggctttgttgtgtgagcctacttaacgcgggaggtggaggaacggaccttcagctgggccgggaacacgatgtagggttgctcaatcggcttttcgtcaatgagatcgagcgtcatgcgggctgccacgcgggccatttccaccggatcctggcggatggtggtcaggccgatatcgccggtgtagaaactatcgtcgtagccgatcaacgagacgtcgccgggcacggagaatccattgcgctccagctggaacataagcggcaaagcaatgccatcctcttggcatgcgatggcggtgggcatctcgtcttggcttatgagttggttgaccacgtcgctgatttcataacgtccatcgtcatcgaccttgcagacgataacctgcggctcgatgccttccctgcggcagcaggcggtgaatgagtcgaatcggctttgcacggagaagctcagcgacacctcgcgattggtgctgatgtaggtgatgcggcgatgtccgagattgataagatggcgggcggccagcgtggagccctgcacatcgtcgatattgacggcggcggtaaagccgcgggcttcgggttcgactgaattgatgccgacgatcggcacgccgaccgaagccagttgcgcgatttcgttgttgtcgatatcgaaagacgccacaatcacggcatcggcgttacggcgtaccggcaacatctcgaagaattccttgcgctcctcgatgctggaaatctggaataccgaaatatcgtagccctgcgtgtgcagcacctcgttggacccctcgatgaccgaggcggtgaaccacaggcggatatggccgctcatcagtactgcgatgcgcagggagcggccggatttcagggccgcagccgagcgggagagtgagaaattgagtttgtcggcgatggcgagcacgcgctcgcgggtcttggccgacaccagatccggcctggtgaaggaacgtgagacggtggagatggagacgccggcctcgcgggcgacatcctgaatgctcgtagccattgcagcccccttgcgttgaatggaaaatcgcaatacacatgcacaactgactccagtgtacatgctgattgattgatctgcggcgatgacaacgattgtattacaaacgtttgcaaagtgtctatgtcggcgttagattggctttatatagccattatcttaggtgaaagaagattgctggagccggagtgtgctcgaacttgaaacgcctaaaatgacaacgtttgacatataatgattcgacgtttactatgaacataggcttgaacgagaacaggccgtgcatgcggttctcgatcggcaagctcgcattgagttgaactccgcagccggcgcacgatgcagtgtcacaacgcagcggactcaaggaggaggaaaagtcatgatcagcatggctggcaaggcgatacgcagatggtgggcgctgttcgcgctccccacattcgccgcattcatcatcgggttcctggtgcccttcatcatgggcgtctacttaagcttctgcgaattcaccaccgttaccgacggtgaatgggtggggcttaagaactatggcaaagcgttgaaggacaaggaattcctgcacgcgctcggcttctccaccgcgttcaccatcgtgaccaccatcgtgatcaacgtgatcgccttcgccatcgcctacatgctgaccaaggcgatcaagggctccacgctgttccgctcggtattcttcatgccgaaccttatcggcggcatcatcctgggctacatctggctgctgctcctgaacggcgtgctagcccactggggccgcgccctgacctataaggcgtcctacgggttctggggcttggtcatcctggtgtgctggcagcagatcggctacatgatgatcatctacatcgccggcctgcaagccctgcccaccgatgtgctggaggccgcggccgtggacggcgccaacggacggcagaccatgttccgcatcatcatcccgctgatgatgccgtccatcaccgtgtgctccttcctgaccgtgaccaacggtttcaagctctacgatcagaacctcgcattgaccaacggtgcgccgagcaacatgtctgaaggtctggcgctgaacatcacccgcaccttctacggccgtatgggctgggaaggcgtcggccaggcgaaggccgtgctgttcttcatcctggtcgcggtcatcgccctgattcagaacaagctcaccacgagcaaggaggtggcagcctgatgaacgagaacaagcctgtgaagcatggcgcattatggaccgtgctgtttgccgttgtctccctgttctggattttcccgatcgtcctggtgctgatcaactccttcaagcagaaggcgtacatctccaagaacgcgttctccctgcctgccggcaaggcgttcgtgggacttgagaactatgtgcgcggcatcgagaccacgcagttcttcgcctccttcggctggacgttgcttatcaccgtcggctcggtggtgctgattctggtgtgcacctcgatgtgcgcatggtggatcgtgcgcgtgaacaactgggccgcgaagctgctctacaccctgttcctgttcaatatgatcgtgccgttccagatggtgatgttcaccctctccaagatcgccgacatgctgaagctcaataccccgtggggcctgtgcatcgtgtacctcggtttcggtgccggtctggccgtgttcatcttcactggcgtgatcaagggcatcccgcaggagcttgaggagtccgccatgatcgacggcgcgtcagtgccgcgcatcttcttccagatcgtggtgccgattatgaagccgtcgatcgtctcggtggccatcctcgaagccatgtggatctggaacgactacctgctgccgtacctgacgctcgacctcggcaagtacaagaccg

SEQ ID NO: 920 - DNA, 41034 bp, Unknown
  gut microbiota DNA sequence
tggttctggccgcctgaccggccaattcgggatcataacccagaggtccaaggttcaaatccatgccccgctacgaacgtggttatatggccgctgatttcggtaccgaaatcagcggcctttccgtttaccgtggcgatatggatgaaaggcgatcaggcagctacggtgcccagggaagtcggcgatcataaacgtctcgtcattttcatcgcggatcttcagttgtctaatccacgggaggcgacaggcgtgaagtttctcaacgaagcggaagccgggcacaagtcgtatgttacgatcgacttcgtgcccagctcccgttcttctgctcagaagcggagtgtggttcaccatccagccgacatcatcggcatcatgccgcagcgggtcaacgtatcggccagcgcatcgtccagtgcttgaatcggtcatagcgacgacgccaccgaacgacgatggacagtatggcgcctatcgccagagctgacacggccagaaccgaggcaagcgacacatcgccacccgtgacgggcagtgacgggcgagggttgggcgtggttgcctccgccggcgccggcggcgtctcgggtttctccggttcgcacggtttctccgactcgcatgggggcaacacccgcacacgctcccaggcatcgtcataccggctggacgccggggaaacacggtcatccccctcgaaccgccagacgaacacgtaccacccaggccgttcggcggtcagatacataggagcgccatgcgcgtccaacgccccggcgccgattttgaacgtgccgttcatcgcgggaatctcccaggtggccagcaaccggtggttgtcgtcttccgtgggaacctctcccccggatggcttgtacgcctcatcgttggaggggttgtcgggatcgccggaccaccatacgctcaccgtcgcatacggccgatccgccgcgaactcatactcttcgttgccggcatactggccatgatccgcagggaatcccgatacggtaatggtgtcgctgagctcggcaccgatatccgccgaatgctcagtgaccgtcgacatgacttctagcttcctgcgacttgtattgctttccgtagcctccataaacggacttatccagtcgcctataaggtattcctgcgcctgtttgctctgctcggaccgccgaaacacccatacccatgtgccaaaaccgctattctgcttggtccggtaagcggcaccgtcatccggcttggtcatggcctgcacacgtgcctgctgccccaccccggtgaaagaggccttgccataggccaccggctcataacccaaagtcgccaatcgcgcaagaaaagcatcggcgctctcttgtgcattcggcgtaatgacattgcccacatcgcccgtatcaagaccatcgaaatagtatccgcgggcctgcaattccaaatcgggcacccaataactgtccgcatccgccacgccactggtcacgtcatcgaacaccggagaagccacatcaagcaccttctcggagaccttggtggataccgccggaacaaaatccttacgcacccgaaatgtcgtcgacgcgccgccagtggaagccatcgagtcaaaggccagcatgtcctgagtgctgtccatgacgtgcatccgcccatactcgtatgtggtgttcgccgtcacctcgccggcgccggtcgcctcccacgcgatcgaggacccggcgctcgtcgacacccccgagaacgtgttgccgccttggacgaaccgcgccgccccctgcaaggtgacggtgaacggcactcccgcgatcgcgtcaccggcgcggttcaccactttcaccgagatggaaccgctgcgcaaagcctcggcatcggtgcgttccaccgtcgtgcccgcaggcgtcttgccggccgattgatcccatatccgggccgccttcgccacgatctcggggtaccggccttgaatgaccgccatctgtctcgcccactcgtcccgatcgcgcccgaagtgatcctgcacgatgatgccgatcgccgcatgggtggcggcatccgtgtcgcggtaccggtcaaggatccatgccatacgccgggcgttctcatcggaggcaagcaccgtggtggggcctatcacatagtcgctcagtttccccgcttcgatgcagtagtacttgttgcccgaagcgtccagccccgcgacaccgacgtaatattccatatcgttgtatggaaacgccacgtgatatctttcgtcggcgggcgtcaacgtcgcggcatacgccgtattcgccgagccgaacaccactcccaccattattatcagaccggtcagcatcgctacgatggccatgccccgttgccgccatgtcgttatcatcattcgtcctttcctggtacgtttccccgcatactgcactgtgtgcgggtaggccacgatcatggcagattttcattcgctacagccggtttttcgacctatgtggtccgagcttgccgtttgccggcgagttgtggataactcttccgccgagttatccacctcatgcggttgaccgaacgtttacctgatagttatccacaatgcgcaacatatgttcaaaagcccttagaatagggccttatggcagcagtacaacatcgcgcgaccacgcgcactagtaataccgataacagcaccacgaaaacgaagtcaaaggcgacttctgcccgaaagagccccgcaaccaagcgcaagagagtcagcgccgaaacggcacgcgccgcagcagcgctgaaaggcctggctgtcgaagcccccgcaccgtccatcgaagcaaacgagcccggccagttcggccgcatcaatgtcatggacatcactcccgccgaggagcgcggcatcttccccgcccgtgtggaactcggcgaaccgtttgagatgaccgcccaggtgttcatcgaaggccgtaccaaggtgggtgccaccgccatcgtgcgcaacccgcgcggcaaggaaaccatgcgccgggccatgacctgcgtaaatcccggcctcgatcgttggaccgtgatggtcaagtgcggcgagcacagcgatctgaagccttgggaggatggctacgcggccgtcaagcgtcagctcggcgaatggaccgtgaccatcgaaggttgggaagacgcgtacgtctcctggctgcacgacgcccgcatcaaggtgcgtgtgatggacgacgtggacaacgcactcaattccggtgccgagttgctggcccgttgggccgaaaccccggacaccggcctgaccgcacgcgatcgcaagaccttggagaaggccgctgagaccatggccgatcagacgctgagcgccgaggatcgtctcgccgccggcgacaacccgaccatcgccgccctgcacgagactcacccgctgcgcgacggcatctcccccagccagccccagcgcttcaaggtggaacgcccgaagtccagcttcgcggcttggtaccagttcttcccgcgttccgaaggcgccaccatcgatccgaacaccggcaagatcattcagggtacgctgaagacttcgatggccggcctcgaacgcgccgctgtcgagggcttcgacatcgtctacctgccgccggtcttcccgattggcgtgaccaaccgcaagggccgcaacaacacgctggtcgccggccccgatgacccgggctccccgttcggcatcggctccgagctaggtggccacgacaccgtggatccactgctcggcaccatggacgatttcaaggccctgtgccagcgtgcacatgaactgggtctggaaatcgcgcttgatttcgccctgcagtgctcgcccgatcacccgtgggtcaaggcccacccgaactggttccgccacaagccggacggctccatcgccttcgccgagaacccgccgaagaagtatcaggacatctacccgatcgacttcaacgccgacatgcccggcatcgaaaaagaagtcgaacgcatcatgaatctgtggatcgaggcgggcgtcaccatcttccgcatcgataacccgcacaccaagccggtgcgtttctggcaggacgtgattgccgccgtgaccaagaagcacccggagatcctgttcctggccgaggcattcacccgcccgggcatgatgcgcgccctgagctacgtgggcttcacccagtcccactgctacttcccgtggcgcaacaccaaggacgaactggaagagtatctgccggtcaccaatggcgacgacggctactaccagcacaacaccttctggcccaccacgccggatattctcaccgcttacgtgcgagacaacggcgtagccggccactgcgtgcgtgcggtgctggcagccatgggctcgccgtcctggggtatctacaacggttacgaactcatcgagaacaagcagcgccccggcttcgaagagcagatcgacaacgagaagtacgaggtcaaggttcgcgattggagcaaggccaagcagtacggcgtggccgagatgctcaccgcactcaacaagattcgtcgcgcccacccggccgcgttgagctaccacaacctcaccgtgctgcctacgtccgacccgaatattctggctttcgcacgccacacgccggccgaactgaccggtaccggccaagcggacacgctgattgtggtcgtgaacctcgatggacacaacgcacaccagtcgatgattcacctggaactcagcgagctgggtctgcccaccgaccgcccgctcaacgtgcgcgacgagctgaccggccgcgaattccagtggggttgggacaactacgtgtctctggctccttgggcggatgtggcccacatcctgtccgtgcagtgatgcggtactgcaacggtaatgcaacagtgatgccgttgacgtgcatgggtttatcgtgcgcgtaaaccgctagaaatcctcccctcaaggggaggatttcgtctgtttgggcatagtgtcggcataatctcagcacggtttcttgagttccgcacctgttttgcaggcgtaaacagggtattgtggtgagacgataacgtaactgtcgattttcaaggagaaatgacatggcagaaaccttcaacgtcgttgtggaaattccgcgcggctccaagaacaagtacgaagtcgatcacgagaccggtcgcgtcttcctggaccgtaccctgttcaccgcaatgggttacccggatgactacggctacatcgacggcaccctgggcgaggacggcgatccgctggacgctctcgtgatgattccgaactccgtgttcccgggctgcgtggtcgagtgccgcgccgtgggcctgtaccacatggtcgacgaggccggcggcgacgacaaggtgctgtgcgtgcccgccgacgttcgtttcgatgacatcaaggacatcgacgacgtcaacgagtaccacaaggccgaaatcaagcacttcttcgagcagtacaaggctctggagccgggcaaggaagtcctgccgggcgactactggactggtgctgacgccgccgaaaaggaaatcattgccgcgcgtcagcgtctcgccgattccgagaagtgattcgattctgaatcgttgacaggaggccccttcgggggccttttgttgtatttgtggcaaagccgctctactctccctcagtcgcagtttcactgcgccagctccccaacagagggagcttgtattttgtgatacagtaatgttttgtcttttcaactaggcgtaggcggcgtgtaggaacgctggtcgaggcccatcgcacggtaatccggcgatgaaccttctgtcacaccatgatttcgataatcattcaaatcctgcttatttctgtttccgtagctatggatgcattcgccgtatccattggcaaaggcctgaccgtatcccgcgtacgagtacaagacgccgtgaaaagcaccctctggttcggcggattccagatgctgttccctattctcggctatttcgcggcatctacattcagcaaatacgtaacccaattcgaccattggatcatcttcgccctgttggtgttcatcggcggcaacatggttcacgaagccttcgaagaagatgaggaaaactccaaggagaccgcccagttcgattggaagcatatgcttcccctggccgtggcctgcagcatcgatgcgttcgccgtgggcgtgagcctggccttcatgttcaccaaagcccatatggcattcgccatcctcagcatcggtgtggtcaccggactgttctccgctgcgggcctgcacattggccgcgcgttcggttcccgctggcagaagccggcgcagatcgccggcggcgtggtgctgattctactcggcatcaaagtgctattggagcatttgggcgttatcgcgttctgatttagtgccataagccccttcaccagaaggggctattttgtttgatttcaccgttccaatgcccgacgtaggattgggatagaaattcgattatctgagaggcgtatcatgaccgagatcacccaggagggttggaagaacaaagctctgagcatgttgttggcccaactgacgtcctatgtactgttcatcgcagccacggtcattccctcccctggcaccgtccccatcatccctttgattatcgccgctctgacgttggccgcatttgtcgtattctggccgttccgcggcagcatactggatcgtatcgtcactttggtgtttggcgcgatttctctgattttcgtcatcgtacctttcccgaccagcgaggttccgccggatcagaccgctgcggatggctcggtacttccttggtattcatgggcactggccatgggcctgctgctggtggtgctggtggtcttctccttcggacgccagatggctcgtgagaagcgcgaacatcttatccgcgcactctctcacgccgtgacttccggtgtggcagctctcgccgtggccggctggtgcttcctacctgatttgggcgcgatgctcgccaagggcaccgttgcgggaaccgttgccctgatcatcctcatcgttttgggactggctttggccgtggcttccacgttgtgggtgcgcgacgccgatccggacccggatatccgttatccgtggatcggtaccggcctgatgccggtaatgctgatgggcgtgaccatcgccgcaaccgcactggtgctcggccgtatcatcggttgatggacgtccaccgttccatattccgcaaacttgtaacctatgtgtccactacaagcgcgtagaataatgaaaaccgtgcgaaagcggcataacgccgctgacgactcgtacagccacaccgagcaattgcgtaacacattgcaggataagggggattagcgtgacggatcttacgttgatgactttcgccagcgaccccgccaccgttttgccatcactcgccctgctttctcatcgcgtccgcgtactgccgatggatgcagccagcttggtgaagatgccggagaacaccattctgtttctggatgcacgcgatgatctggcgaccgccaaaaccttgtgccgcctcatccacgcttccggcctgtccacgccaatcgtgctggtgctgaccgaaggcggcttcaccgtggtcaactcccagtggggcattgcggatgtggtggtcgccaccgcttccccggccgaagtcgagggccgattgcgattggtctccgagcgcggcaacgctcccgcagccgcagcagccggttctcccgccgaatccaccaccacggtggaagatggccagattcgctccggcgacctcattgtggacaccaacggctataccgcctccctgcatggacgccccatcgatctggcatacaaggagttcgaactcctcaagtacttggtccagcaccccggccgcgtgttcacgcgcgcccagttgctgcaggaagtatggggctacgactactacggtggcactcgtacggtcgacgtgcatatccgtcgtctgcgcgccaagctcggcggcgaatacgaacacctcatcggcaccgtgcgcaacgtgggctaccgattcgacccgccggagacggataaggaaactgccgccgcacagcaggccgccaaagcatcctctgccgccatcgacaccgatgacgatactcccgatctcaacaccgtcgcctgacagaccagcggcgctgcaaactatcaatcatcgatattacgccgcttaggtccatacgatgagagaaaccaaatccgcgcgtctcacgcgcatgcatgacgaatacgacattctgcgccaggtgattccggcacccgcttgcgcactgcatttctcgaatccgctcgaattgctgatcgccaccgtgctcagcgcccagaccaccgacaagcgtgtcaacacggtcaccccggaactgttcgccacctaccccaccgcccgtgacttggcggccgcaaacccggcccaagtcgaagacatcattcatccgctggggttctatcgttcgaaaacccagcatctcatcggactggccacggcactggacgaacgattcggcggcgtggtgccgcgcacgatggatgaactgaccagcttgccgggggtcggccgcaaaaccgcgaacgtcgtgctcggcaacgcgttcgatatccccggattcccggtcgatacgcatgtgatgcgcgtaaccggacgattgcgttggcggtcggattggcggtccgcacaccccgatcccgtgaaaatcgagaaggaaatcacctcctgttttccgcccgaagagtggacgaatctcagccaccgactgattctgttcggccgggccacctgccacgcacgtacccctgactgcgccaactgcccgctgtccgacacctgccctagctatgcgccgcccgccggcaagagcacgtccaagcgctaactcatacctcatcatggtgaattgcggattctaggctgaatccaccgctagactgaaaaccatgcagcacagcaagcgggacaatacatggtccaagtgggggatttttctcggagtcgccgtggcactcggcgcactcgtggttgtgggatggacgttcatgcaaaaccggttccagccgggatcatccctcgatgccgatgtgaccattggcatcgacgatatgccgcaatccttggatattcggtccgattcctctgcggcagccgaacgcctgctcgtcgacaatgtgtatgagacattagtgaccgtcgatcaagacaacaagcttcagccgggactggcgacaagctggaagacttccgatgacggactgaccgtcaccctgacactgcaatcgggcgtcaccttctcgaacggccatacgttggacgcctcggacgccgtgtggtcgttgcaacagaacgtgaccaacaaggtggcggacgtcgacgaattgggcgatctggcgtcggtcgccaatccgaacgccaccacggtggtcattacgcttgccaagcccaatccgacgctgctgcgagcgctgtccggcagactcggcattgtctacgattccgagtcgtccagtgccgattatcaacgcaaggccataggttccggaccattcaccgtggccgatttccagcctggccattccctgaagctggcgcgcagcgatacctaccatggcaccaaagcggccagcaatgtcgttgaatttatgcaatactccgacgccgatgcgctcagcaaggccctgaccgacggcagtctcgatatggcggcaccggtttcggcttcgacggccaccggtttgaacggcaaggatggcctgaccgtcaaggagggggccactacggataaggtgctgctggcctacaacaacggcaccgattcgctgctctccgacgaacaggcgcgtaaagccttccgctatcaaatcgacgcagccggcatcgcctccgcccaacccgacgcagccggagcattgggcggccccatcagcctgctggaacccggatacgaagatttgaccggactgtacccgcatgacgaaaaccaagctgggcagatgttctcctactttggtgcgcaatacctgactacggtgaatctggtggttcccgaagaataccggtcgttggccgaaaccatcaagcagcagatcgagcggcagccgcgccccacggtgaaccttgaagtgctctccgatgaggattatgccaaacgaatcaaggacggcaaatgggaactgaccgtgatgagcatggacggcacggatgatgccggcatattcgccgaccccgattccatgttccattacgaccataccgaagcgcaacaggcctatgcggatgctcgcgccgccactaatgacgccgattatgaggcacgaatgaaggcgtacgcccggctgatcagcgaggatgcggccagtgattggctgtatacccgcaaatgcttcactgtggcgtccaccaaggtctccggctacccgacctcgatgatcaatcgccgcatgccgctggccgggttgacggtgaagtaggcaaccttcagtcacggacgggctacgcccgatagtccttggctcactatcgttcgatcgttcgtacctcgcctgcgaacagcctactgggctgtttactgtacagttcggcttgtcatgcaacgtgcataaactttggccttatgactgaaggcaaatccatcatcaacgccaacctcaccccgctgcccgacaaggtcggcgtggacggacttgaggacaagtggcgcaccgtctgggatgaagacggcacctacaaattccgcaacacccgcgaccgcaaggccgtctactccatcgacaccccgccgcccaccgtctccggttcgctgcacgtgggtcacgtgttctcttacacgcacaccgatgtgattgcgcgctacaagcgcatgcgcggctacgacgtgttctacccgatgggttgggatgacaacggcctgcctaccgagcgccgcgtgcagaactactatggcgtgcgcgtggacgtgtctctgccttacgacccggacttcaagccgccgtttgaaggcactgatggcaagaagattgacgccaaggatcaggtgccgatttcccgcaagaacttcatcgagctgtgcgagcgtctgactgctcaggatgagaagctgtttgaggccctgtggcgcaagctgggtctgtccatcgactggtcgcagacctaccacaccatcggtcagcacccgcagcgtgtggcccagaaggccttcctgcgcaacctcgcccgtggcgaggcctaccagcaggacgcccccggcctgtgggatgtgaccttccagaccgccgtggcccaggccgagctcgaatcgcgcgaataccccggcttctaccacaaggtggccttccgctttgaggacggcaccccgatctacatcgagaccacccgccccgaactgctggcggcctgcacctcgctgatcgccaacccgaacgacgaacgctacaagcagtacttcggccagtacgtctactcccctctgttcaaggtcaaggtgccgattctggcgcacccggccgccgaaatggacaagggtgccggtatcgccatgtgctgtacgttcggtgatgtaaccgacgtcgagtggtggcgcgacctgaagctgcccacccgcccgatcatccagcgcaacggccgtatcgtgatggataccccggactggatcgaggacccggccggccgcgaggtctttgccgaaaccgctggcaagaccacgttctccgcccgcaagatcatcgtcgacaagctgcgcgagtccggcgatctggacggcgagccgaccccgaccaagcgtatgacgaacttctacgagaagggcgacaagccgctcgagatcgtcacctcccgccagtggtatttgaagaacggcggtaccgacgccaagctgaacgccgagcttatcgagcgtggcaaggaactcgagttccaccccgacttcatgcgcgtgcgttatgagaactgggtgcacggcctgaacggcgactggctgatctcccgtcagcgcttcttcggcgtcccgttcccgctgtggtacccggtgaacgcttccggcgagccggattacgatcacccgatcactccgtccgaggatcgtctgccgatcgacccgaccatcgacgtgccggagggctacgacgagtcccagcgtgatgtgcccggtggtttcaccgccgaaaaggacatcatggacacctgggccacctcttcgctgaccccgcagatcgtgacccactgggccgagccggacgaggcctccaaggccctgttcgcttccaccttcccgatggacctgcgcccgcagggtcaggacatcatccgcacctggctgttctcgactgtggaccgcgcgcacttggagaacaagtgcctgccgtgggcccatgccacgctgtccggctggattctggaccccgaccacaagaagatgtcgaagtccaagggcaacgtcgtggtgccgaacgagccgatcgagaagttcggcgcggacgccgtgcgttactgggccgccgccgctcgcctaggcctcgatgccacgtacgacatcggccagatgaagattggccgtcgactggccatcaagctgctgaacgccaccaagttcgcgctggccatcggccgtgaggacgagaaccatcacgtgggcgctgccgccgaggccgcgtggaacccggccgatgtgaccgaaccgctggatcgcgccgctatggccaagctggctttggtggtgcgtcaggccaccgaggcgctggaatcctacgagcattccaaggcgctggaagtcatcgagtcctacttctggcagttctgcgacgactacatcgagctggtcaagaaccgcgcctatggcactccggacgagcacggcaatgtgccgtccgagaaggctgtgaagtccgcccgcaccgctctgggtctgggcctggacgccttcgcacgtctgctggccccgtacctgccgtacgccaccgaggaagtgtggagctggatgcacgccggttccggttccgtgcatcgcgccgcctggccggtcgtggacccgtatgtcgaggccgccaccggtgcttcccccgagctgctgacttgggccggcaaggccgtggagcagctgcgtaagatcaagtccgaggccaaggtctccatgaagaccccaatcctgtctgtggcactgtccgctgcttcggaaggtgtggaagcgattcacgccgccttgggcgatatcgcgcaggccggtcgcgtggtcggcaagttcgacttggtggccaagcacgccgaggaatccgccgccgaaggcacgcccgaaaccgaggtcgccgtcgaagccagcgagctcggtgagccgccagctaagaagccaaagcactgaacgttacgcacaacaacaaaagaggggaacctattgaggttcccctcttttgttttttgacgttcggatgacacgactgtgggacggcacgcaaatatcccgcatacaccatcacaccgtcggaatcacgatgagatatcgggtttcggcggttttttgttgcgtattggggctgtcgagctgcgcgacggcctgcgccaagagcgtgccagcatcactgattttcacggtctcattaatcagcgcgttcatatcgtgcttgaacagcgtgccgccagtgccaaagccgaacagtactggagcggtgtcaagattgttgccggaatcgctggcgttggaggccttgccgttgccggaatcgccagtgtcgctcgacttggctgagtcgttcgttcccgaaccagcgctcttagacgagtcggacttatcaccaccaccgatggccgaagtaagaccacccgcatagttcatcacatcgccagcagacatggacatggtgtcatcgaccagtgaggccttggaatgctgcgactgctgctgttgcgcggctttggcctgcttacgggcggcatcggccttacgcttggcttgggcgacccgggtcttgccgtagaacgattgcgattgcgaatcgaccaggccggtcagtgcctgagcctcggtcaccggatcggaagagacatcaccggacgaaccatcaccatcattgccggaagccgaggacgcgccgccttcgaactgatcggagaatcgcaatacaatctggcgcaaggccgtggctttgcccgtatgctcggaggcggtggcaagcgtgctcatcgcggcatcgaccttggattgagcgtcggcgagttcatcgctaccgttggtttcggcgatggcttggctctcgtaagcggtggcgcccgaggacgtgccgccggtcagggcgctcaaattggccgtgtaaacgtccgtgtatttcatcgaatacggaatcattgcggcggagagctggctctggccatcggcgtattgcttggagccttgagtggcttcctccgaagcctcggcgatcagatcatccaccagtccggtggtgccttgctgctggatgcggcgaatcacctcgtccaacgcatcgaccgcaccggcatgctgatgtgcggcactgacgttgttcaccgcgttggccaagtcgagtacggcttgagccaaaggcgtgtccccggacagttcgccggccgtgcccatcaacgccggcaactgggtggaggtgccaatcgatccagacaggtgcgtggtatatgagcccacatacgcggccatatagtcttcaaacgtccgcttatgggcggtttcgcgttcggccactacagacttgttcagcgcacgttcgttatcgcgcagggtttgaagctgctcgatgagctgttgctgttcaccagaaccggcgtcggtcagtgaatcgaccagtgtggcggcagaggcggtgagttgggcgacatccgtatcggcagcaggctgtgcggcagcattcgcagcattcgcggcatcgggattagcaccaactgccggactgctggaattggaaggcaatacggcgagcgccacggaactcatggagaagtctttggcgttcatatagcagctgaattccaagccggttgcggcttttccagctgcggcgactacggtattggaaccttgcgtggtcaccgtaatggagttgtcagcggaaacatcatcggctacctgcgtaggcacggtaaaggcgacaaccgggatcgtacggttggcttccttggtttgcggcttaatatcgatatacacgccgatcagtccagacgcgccggcaacctcgtttgcctcgacgttcggaccgtcaagcgagtaggtgacgctgactttccatggcagggtggcggcggaagcggggatacgagaaaccttggacgtgccggaattactattggcggaatcggtatcagtggaaccgctattgccggaatcggcactggcgccattgccggcgccgcccttccctaccacataccaacggaccggctccccttcggcatcggtgacggcgtacatatcacttgccgtagcgagcaccggaccgtaatcaaccggagtcggacgagacatccaagcaccgccgagaatcgaagccacgcacaatgcgcaactgaccagtgcggcaccacatctcatctacgtatcccattcatacagtcgaccactacgggcattccattcccgtattaatgtagtcgctgcaggcaacttgccctatagacgaatatccgaaaggtgcccattcgctgcgggcgaatcaggcgaatacgtcgagtacgcccgggtcaccaccggcatcggctatgcgctggtggcgcttcttggcttcggtaaccacgaattcacggtacatttcggcaatttccggatcaagcccggcatcgatggcgatgcggtggaggcgttcgatctgatagtcctcacgcttggtgtcttcgggcgcgaatccggcgttggctttgagcacgccgacctgcgaggtggccttgaaccgctcggccagtaatgcgatgaccgccgaatcgatgttatcgatggtttggcgcagcgctttgatgcgcgccaccgcttgtgcggtttccgggtgggccgccgcctgggcggagtcgatggtggtcctttgccagtcgctgctcgtttcgctcatagattcgaggatactcccgattacggctttgcacgatgcgcaaagtcagatatctcagatgtcatagtcgccggtgaggatatggctggcatccgcatcgccgaacatggccgcaccactgcccactcccaaaacaatcgaacccagtgatgcctctttcatctcatatatcgtcagcgtgcatgtgaacgttgacggcaatactacaactgcaatgtgatagttgatgtatttgcatcagatacgacaagggctgcaccccgtatcaatcagggtgcagcccttacactattgttcagcggtctgatcagttgccgttgaccgcgttgccggtgttggcctgctgcacgatggcggcgaggaagtcgcggttggtggcggtcttcttgaggcgcggcaccagcgtctggtaggcctgctcgggctccatgccgcccagcagtcgacgcagacggtagataatcggcagttcctgcgggttggtgatgagctcctcgcggcgggtgccggaagcgttgatgtcgatggccgggaacagtcgcttgtccgccagctcgcgggacaggcgcagttccatgttgccggtgcccttgaactcctcgaaaatcacctcgtccatcttggagccggtttccaccagcgcagatgagatgatggtcagggagccgccgttttcgatgttgcgggccgcaccgaagaacttcttcggcgggtagagggcctgcgcgtccacaccaccggacaggatgcggccggaggcaggggctgcgatgttgtaagcgcgagccagtcgggtcatggaatcgagcagtacgaccacgtcctggccgagctccacaagacgcttggcgcgttcgacggccagttcggcaaccgtagtgtgatcggaggccggacggtcgaaggtggaggaaatgacctcgccctggaccgtgcgctccatatcggtgacctcttcgggtcgctcgtccacgagcaccaccataaggtggacctcggggttgttggcggcgatggagttggcgatgttctgcagggtgatggtcttaccggccttcggcggggagacaatcaggccacgctggcccttgccgattggggaaacgatgtccatgatacggccggtgagcttgttcggggcggtctcctgcttcaaacgctcctgcgggtacagcggcgtgagcttggagaactgcggacggttgagcgcttcttcaacgctttggccgttgatggaatcgatggcctgcagcggcacgaacttctggcgctggttgcggcggtcgccttcacgcggggcgcgaatcgaaccatgcacggcatcgcccttgcgcaggccgtacttcttgacctggcccatggaaacgtacacgtcgttcgggccgggcaggtagccggaagtgcgcacaaaagcgtaggagtcgagcacgtcgacgatgccggccaccggcaccagatcctcctgcggctcttcgcggcggctatcacggtcattgcgatcgctacgattatcgcgatcatcatagcgacgatcatcatcggcgttgtcgcgatcacggccacgcatgcgacggttacggcgatcgctgcgatcattacgggtatcgcgatcgttgcgatcgctacggtcgcggcggttacgacgcacgaactcgtgatcgtcgttctgctcgccgtcttcggacgtttcctcgtgcttctgcgtgggcagcgtggccaggatatcgtcgaggtcacgcacggtttcttcgctgttttccgcagtgcgacgacggcggcgaggctgctcgtcctcatcatcacggactcggcgaatcagcggaacttccacgtcctcgtgacgctcgcggcgacgctcggtaggcgctgcatctcccaaatcgagcgtggccagcagatcgccggcctcatcggccttcttgcgcggcttgcggcgagcgaaatcgggctggtcgtcatcgcgacgacggcgggccgcacgcggttcggatgcggcatcatcggcggccttacgacgggtgcgtcgcggttcggtctcgtccttcttggcatcgtcggccacgggaagcggcaaatcgagctgcggttccgtggcagccggagccggagccggcgactgggtggccacgtcagcattgtctgtggtgttggcctcagcggcatcggactgcggagccttgacgaccttggcggttttggcggccttgggggcgcgcacggtcacaccggccggcggctctccaccattgcgcgccgcctgcagggtggcgagcagctcgggcttgcgcatggtcgacgtgccgcgcaggcccatctgtttagcgagctctttgagctcaggcagcttcatatcctcaagattctggctatttgccactggttgccctttccataccgaacagacccatgcctatccaggcgttaagagtgattattgcggttgcaccgctcatgaatgttcgctgcgtctctgagtctctgcgaacttcgttcactgtacaacgccaactcgaccaacgcaaaacggcccgccgaaaaccaaaaaagctccctctgtgacgagggagctcaacaaggtttattcacttttcttcgtggtaggacttttcggtgttgacggaccacacgttcttcttggacgtcttgccggtcttgatgttgccgacggcctccatggcggtggccatggagtggtccatgttgttgtagcggtgctggccgttacggcccacgcagtacaggttgccgaagccgtcgaggtactcgatgagctcgtccatgtgctcataggtgtcgaagtaggcggggtacgccttcctgacgcgctcacgatgggagtcgatgacctcgtccggaccgttgatcacacgcatgcgggtgagctcggaaatcgcgaacttggtgacatcctcctcgctcatgttccagaacgagtcgccctcctcgcagaagtactcgagaccgatccacacggtgtcgtccacgtccttgaccaggtacgggctccagttgttgaagatctgcagacggccgaccttgtagcccgggtcctgcacgtagatccagcagtccggcacgatcggcggattgccgagggtggggatgctggtggtgttcttgagcttcaggtgcttgaccagcaggcccacggtcacgaaatcgcggtacggcaggccgttggccacctcggtcatatcggccggggcgggcttggaatcaacggcctcgggatcggcgccggccgcgtcgatggcgttgaccaggtccttgaccggcatcgaggagatgaactggtcgccggaaagctcggtacggttgccctcggaatcctcgtacaccacggaagacacggcaccatcggtctggcggacctcgaccaccctggcgtcggtcagcaccttgacgccggcggcctcgcaattggactcgacggtctcccacagctggccgggaccgtacttcggataccagaactcctcgatcagcgaggtctcgacctccgcgttggagcgcttcttgggcagcagcttctggaaggcgttcttgagcacgcccatgatggacaggcccttgacgcgctgggcgccccagtcggcggagatctgggaggggtggcggccccacagcttctccgtgtagccctcgaagaacatcgaatacagcttgcggccgaaacggttgatgtagaagttctccagattgtcttccggcagcttgtggaacatggacttcaggtagctgaagccggccaccatggtgagcttgaagcccatggccttcaacgtgttggggctcagcgaaatcgggtaatcgaagaagtggcggttccagaagatacgggacactcggtggcgcttgagcatcaccttgtcctccgtctccggatcggggccgcccggctccatgtcgtggtcgcggccgagcttcttgtcatcataggagggtgcgccctgcaacggcagaacggtcttccaccaatccatgatgcgttcgtctttggagaagaaacggtggccgccgatatccatgcggttgccgttgtgcttcacggtgcgcgagataccgccgaattcgcgggtcccctccagcacggtcacgtcgtacttgtcggcaccgccgtccttgatgagttcccatgcggcggtaagtccagccggaccgccgccgataatcactacggattgcttgtcggtcattatgctccttataaacgcaaaatcagagacagtctactagaagccccggaatcgcacaccgaaagatgagcgaatgcttacagaattctcccgatatacgaccgatgcgccgtctttccatcagcagaaaggcgacgcatcgaatcgtgaggtaggggtattcggcaacgttgcgtcacacacagcgcggcgaatcggtttggtcttaggctaattcgtcagcgacgaactttccatagattcagcgagatgcctgcaagtgcaagcagcatcataatccccgcaacaccagtaacggcaacaccagtacgactcaactcgttttccgtaccattagcctgagtgttgctgggctgatgagttcccgcaccattgttattcggagtggtactcgttccttcaccagtgttaggtcctgtgcccggctgcgttgtggaatcatcagtcagatgcgcatcgtcgcctagggtttggtggtcggaggccaagcaacttttaagctcagtgagcttgtaccacgtggaaccatcggcaatcggcgtgcattcggagcggaaggcgatttcctgctcgttgtagagcatacgaacgagcggcgtgtaggcacggccggtcttcgggtcgttgccggatttgacggcaacatcccactgcacattagcggccatcggagtcaccgattcaccgcgccattcattgttggcgtaggtgtacacgtcggtggtgctggcggccgcctgctgggtggaaccgggaaggccaagcagcgcggcgaacggcatcatcgtttcggcatgggcaaagcggaaagtagcaacggtggatccgccgtttacgcgctcatcaatcgacgagaagaaatcgtcaagcagcggctgtgcgattgtgtaggtctcgtcttggccggcgtagctcgggcccttctcgtagaagtcctcggcgtcaagcgcccaggcgaacaacttggcgtcgtctgcctgctcaccttggaagtactggttgaagtcgaaggtatggctgccggtgttctcgttctccatatcagcggcgatgatgtacaggttgtacagatccatcgcggcatcgtattcggaggcgatcttcttcttggctgcgccgcaggcgtcggcatccttgctggggtcggctcccggcgcgcagttggcctcgccgcccttggtgccatcgacagtgttgtaccaggcgtacgtgccgtcggccagtttggcgaggaagtcatcggtgaagatttgtgaaagcaaatcgtgagaggctgttttcacgtcctcgttttcggcgatggtttgctcagcgcctgcgataatcgcatcgttttccacgaagttctggtaatcgtcggcacgctgcttggcctcaccggttttctcagtgctgtccgggttttcggacttgtggaagtacagcgtgttcggcgtcttgtcgaaagccgccgcctcgccggtgccggccggatcggcgggcgtcacagtgctgttcgccagtttattgttcgaggccgcgttgaaaccgcgagcaaaattctcgcctgattcagtagcgcgggcttcgccagaggactgataggcaatcttgccaccgtccttggctgcgttgtcgaacagcatcttgttgcgctcgtaggcacgtgcgccaatgccctgatgttggtcagcaccctgaccggtgagcataccgtagccattctccacatttgcggcggtgatggctttgagattcttcatgaattcggacttgatggcatcagacttaaaaccgttatccgcttcggcggcttcggccatcttcataagcaatgcgtcgtatttgtagctggacaggccgcgtgaaccgtggcgagccatcgactcggtgtataccgtttcgtagccttccggcgcctggctatagctggcagtggtcgcttcgctaggtgccacatatggctgcttgctgctgtaatactggccatcggcctccaaagccatggcgtgcggaacggtcaggatgccaccggccagcaatgtggcggcagcaaccacgcccgcgatggagcccttaaggccctgctgcatatggtgtgtgttcatgcagcattttctatcagccgcaagcaaacaagacacacgatggcaaggttacgagtctgaacttttgctatgcgttgtatgaacaatgcgcgacgccccgccgtaagatgacggaatgccgcgcattgtcaatacaggctgtatcagacgattgcctgtcagtgaatatcgtcgggaatgtcgatatcggttttctggacttcttcgacgttcacgtccttgaaggtcacgatgcgcacggacttgacgaaacggctggaacggtagacatcccatacccatgcgtcagtcagctgcacatcgaaatacacgtcctgaccagcggaacgcacgttgaaatcgaccttattcgccaagtagaagcgacgctcagtctccaccacataggtgaacagcttgatgacgtcacggtattccctatacagcgcgagttcggcgtcggtttcgtaattgtcgagatcctcggcactcatgcttgtttactcactcactttccgtatcgcgtttgcggccgcggcccagcgtacgccaccatgcttcctttgagggcttgcgttctgcctgaccgtacggccagttgctttcctcttcgagactgtggcgcgtgttcttctgcgtatcgtcgtggtgctcggcctgtggctcgactggctgtgcggccgccggcgtctgggcctgggactgcacgtcactcgtcgtggcgccggctgcctcaccacgctgtgccggctcgggttccggcttgttctgctggatggcgatggaatgctcgcgcgcggacagcgcttccttgacacccgggttgtcctcgatcaagtgcatgccaaaagcgtcaagcgaacgaatcggatcgtactcgtcagccaacgtgtccatgacgataaggtcctggtatttgttgttttcggcatcccacaacgcgtcgcgcgaggtgccggacggcacgaagccgagcgactggtagaccgaaatcgagcggctgttcttttccggcacgctcacccagatgcggtgcatgcccaagccggccggttcgggcgcgaaaccgtaggtcatcacacgcggcatggcgtcacgggagtagccgcggccacggtattcacggcccaagatgatctggatgcgggcggacttggaccagccgtcgatgtcgataaggaaaatcatgccgatgacattatcggtgctggccgcatcgagctgaccgtcatcgtcatggtcggcgtcagtcaatacggcccatgcgatggtgcggcgggattccggatcacccacaccggattcggcgggtgcctgaccggcttcccaagcctgggagcggcggacccacgtgtgtacgatggcgcgttcggtgaccgcatccttacctgtgatcttggatgcgccatagaaggcatcaagttcatccaaacgaggcaggtcctcgacggtggcggggcgcaggtgcaccatttcgccacggattggcggaatgacgatgctctgtggcagatcgcgcttcagttgcgcttcggtagccatgctcagcgtctcgttggttgcggtcatcggtatacatcccccggttcggcttgtttcggctcacggtccagtgccgaacatatcttactcgactgggtgaacgctggaaatgctctgagtcgactttcttacagaatcaataaaggctcccgctggcgggagctgtccgcgaagcggactgagggtggtcatccgtacatggcgaccaccctcagtctcactccgttcgacagctcctgccagcgggagccagtgaatctaatcagcccttgatcttgcccatgacgaccttggtgacggccttggcgtcggcctgaccgcgcgtggccttcatcacggcaccgatgattacacccatcggcttcatgttgccgctcttgagcttctcgacaacgtccgggttggcttcgaacgccgcgtcgacggccgcctcgatggcaccgttgtcttcgacgatcttgtagtcgtgcttcttgacgacttcgtccggagtgccttcgcccttaagcacgccttcgacggtctgcttggcgagcttgtcgttgagcttgccggaggcgatgagcttctcgacctcggccacatcggccggggtgatcggcagctcttcgagggacacacccttggcgttggcttcgcgggaaagctcgcccagccaccacttgcgggcaccggcagccttggcaccggccttgacggtttcctcaatcaggtcgagggcgtcggcgttgaggatgtcgcgcatctgcagatcactcaggccccactcggacttgaggcggttgcggcgctcgcgcggcatttccggcatctgggccttcatctcctcgatgtgctccttggtgatgtggagcatgacgaggtcggggtccgggaagtagcggtagtcgtcggcatcggacttcagacggccgccagcggtggtctgcgtagcctcatcccagtggcgggtctcctgcagaatctccttgccgtcgtccagacgagcggcctgacggcgaatctcgtactggatggtcttctcgatgccgcggaacgagttcacattcttggtctcggaacgggtgccgtacggagcgtccgggctcgggcgcaacgagacgttcacgtcagcgcgcatgttgccctgctccatacgagcgtgggagatgttcaacgcgcgcacgatgtcgcggatggcgcgcacataggcaccggcgatttcgggagcgcggtcgcccgcaccctcgatcggcttggtgacgatctcaatcagcggcacaccggcacggttgtagtcgaccagcgagtggtcggcgccttcgatacggccgtcggcgccacccacgtgggtgttcttgccggcgtcgtcctcgatgtgcgcgcgctcgatcggcacgcggaacacggtgccgtcttccagctcgacgtccaggtagccgttgccgttggtgggcttgtcgtactgcgagatctggtagtcgcgcggcatgtccgggtagaagtagttcttacgggcgaactggctccactcggcgatttcgcagtgcagggccagacccagcttgatggcgtaatcgacggcggtcttgttgatcaccggcagggagcccggcaggccgaggctcaccggggtcagttcggtgtttggctcgccgccgaactcgatgtgggccgggcagaacagcttggtgttcgtggacagctccacgtgggtttccagaccgaagaccacatcgtacttcttggtggcatcggcgtacttcatcagtttttcagccatgatgtgtttctttccttccgatgctcacttgcccaggccgtcaagccacggggtcttgaggtcgttccagatcgggccgttccagctgtcttccagcgcggcttcgagggccgcagccggcttgtacatgacttcgtcgcgctgctgcggggcgatgaactggaagccgacgggcaggccgtcgtcggacaggccggccgggatggacatggcaggcacgccggcgaggttggccggaatggtggcgatgtcgttcatgtacatggccagcgggtcgtccatcttctcgccgaacttgaaggcggtggacgggctggtgggggccacgagcacgtcgacctgttcgaaggccttcttgaagtcttcgataatcagcgtgcggaccttctgggccgagccgtaccaggcgtcgtagtagccggcggacagggcgtaggtgccgaggatgatacggcgcttgacctcgtcgccgaagccggcttcacgggtgtaggccatcatgttggcggcggtctgcggcacgccggtcggcggcatcacgcgcaggccgtagcgcatgccatcgtaacgggccaggttggagctgacctcggacggcatgatgatgtagtaagcgcctagcgagtagccgatgtgcgggaccgagacctcaacgacctcggcacccatctccttgagcttgtcgacggcctcgttgaagcgggcctcgacgccgggctggaagccgtcgccgccgagttccttgatgaggccgaccttcatacccttcagatcgcgcttggcgccttcgcgggcggcggcgaccatcgggcgcgggccttcggggatggaggtggagtcacgcttgtcgtggccaccgatgatctcctgcagcagtgcggagtcgagcacggtgcgggagaccgggccgatctggtcgagcgaggaggccatggcgatggctccgaaacgggagacgccgccgtaggtgggtttgacgcccacggtgccggtcagggcgccgggctggcgaatcgagccaccagtgtcggtgccgagggcgatcggtgcctcgaatgcggcgactgcggaggcggagccaccaccggaaccgccgggcacgcgctcggtatcccacgggttgtgggtggtctggtaggcggagtgctcggtggaggagccctgggcgaattcgtcgaggttggtcttgccgagaatcggcatgccggcggccttgagcttttcgatgacggtggcgtcgtacggcggcacccagccttcgaggatcttggaggcggcggtggtttcgatgcccttggtgacgatcatgtccttgatggcgatcggcacaccagccagctcaggcagggcggccttgtcttcggcggacttggcgtcgaaggcgtcggcctgctcgagagccacatcgccggaaaccttcaggaaggccttgatggacggctcggcagcctcgatcaccttgaggtgggcttcgacgagctcgcgagaggtgacgtcgcccttcttgacggcagcggcctgctcggcagcagacagtttgacgagagttgcggtttcgttgctcatcgattactcctcgcttcccaggattcgcggtgccacgaacatgccggcctcggtcttcgggccaccggcgagcgcctcttcctgcgtgagcggggtttcggcgacgtccgggcgcaggtaggcttccagcggaaccgggttggcggtcggcggcacatcgtcggaggcgacttcctggaccttgttgatggagtctgcgatgacgttcagttcgccctgcagacgggtgatttcctcatcggtgagcgcgattcgggccagatcgcccaaatgcacgatttcttcgcgtgaaaatgttggcatggccataactatatgagccgtatgtgacacgcagttgtcgggaaaccgcattttcctaccctttgagaccatttcagcagggcaggcactcgggtcattatttgatatccgcttttctggtgacgatgagaccgccgatccatgcggcaggattgtcggcgcatggctacacgcctgatacggcgtgttgggcaatccatgcgtgcatggccacggccgccgcagcgcctgcattaatggagcgcacggaaccgaattgagagatgtagaccacatcgtcggccaatgcgagggccttctcgctcaatccggtgccttctgcaccgaagagcagcaggcaccgcttggggaaggcataggcttccatcggcactgcgccgggaataatgtcgagggcgatgacgcgggcggcttgaagctccttgatgcgtgcatcacaagcatcgatttcggccagcagctcatgaaggtgcttgttgtctccatccacagccacatcatgcgcatggatggcggcggcaccggccttggctcgttcataggcgatttcaccggcgatgcgatgatgccagctttccaccagttcggcgatggaggggtggtgttcgacgtgctggtacagttcggtcatcaacgcgcccttgcgattccacttatgtggaccgacaatgtgtacgcgcttggcctggaaggcattagcggtgcggaccatggaaccgatgttaaaatcgtgggtccagttttccaccgcaacttcgaagtcgtgacgccctcgagcgtcaagatcggccttaatggcagcaacggtccagtagcggtaacggtccaatacgttgcggcggtctccgtcgttcaacagcaccgagtcgaaacgaccgtcataattcgaagaagtcggatcatcgggacgaggctcaccgggatgggtctcagaccacggcccaaggccgatttcacggaattccggttcacctgaagctttggcagccaaagaaatctggttgggtgcgtgcaatctttctcctcgataacgctattcaccggttcctcttagtcagcttcgctgctcagcccggctgactttatgtgagggaagtcaaaggtggatttaccgcagttcggattcgtcgaagacctggatgaaggggagcgtttgctcgtcgccggtggaggggttgaccacattgatgtctttggcaccgccaccgaccagcgaggcgatggccacgaccttggcacccagctgctccactatgccaaagtcgaggctcagctcattgccgttgcgcagggtgaccagcgagctggtctgcacgtacgacttttcggacagccaagcatccaacagcaccacacggcggccttcgatggaggggcccttgatggacgggtagacgaagtccatcacgaatccatctaggtcctcgccacgagaggcggcggcctggatcatggcagacaccatgggcacagatgctgcggtcaaggcaccaacagcatcgaagtcatcaatcgaatagcccgcatcttccaaagcgtcaatcagtacatggcccatgacagtggcggcacggtggtcgaaagtcaccgcggcaagttcggagaacggacggcccaccacatgctccttcagcaaggtggctagctgttcacgcggctccagcatggcaaagtcattatggctcttcgcgacggcaaggtccggggtaccagtggggcggaatccagattcagtcatgactccagactatcgcctgaggcagtcagatgagtatcaccttcatcggccggcaccacttcaggggcggacagttcgctcacattgcctttatctgattcgatgatcggtacttcctcgatgatcttggtcggttcgattttttgcagcttgcgagcggtgggcaacacacggcgttccaaactggacgcgaacttgttgtaggcgctgaccgtcttagtaatctgggtgcccaatttgatggcataatcacccagcgtggagaaccgttcgtacagttctcgggacaaatcgaacagctgcttggcgtcatcggtgagcgactgctgctgccaggcataggccacggatttcagcacggcccagagcgtgaccggcgaggtgagcgccactttgcgagagaacgcatcatccatcagtgtgggatcggcttcgagcgcggcctgcagtagtgcctcattggggatgaaggccaccacaaaatcaggtgctacatcaaaggcattccaataggccttttcgccgagagcacgtacatgctcgcgcaacgccttggcatgggaccgcagcaaatcatcgcggcgggcaatatcctcggggctggcggtgtccgggatttcgcaggcacgctggtaatcggcataaggcactttggcatcaatcggaatggtcttgcctcccggcagatgcacgatcatatccgggcgcaacgtacgcccatcggcatccgtgaccaccacctgggtgtcgaaatcgacatgttccagcaatccggcggactcgacaatgttcttgagctgggcctcgccccacgcgccacgcaccttgttgttgcgcaacgcggcggacaaggaactggtttccttgtccaaacgggcctgctgatcgttgagccccttgagttgggctcccaatgcgcccatttccctcttgcggccctcttcgatctgcgtgaccttgttctgcaaggtatcaagattcttggccactggcgcaagcgcctcgagcaccttgctctgttctttcaaacgtgcttcctgttcagcacgcttggcctcggcggcctgagcatccgcctgacgcttccgttctgcctccgcagctgcacgctcacgttcctgctgaatgcgaatctgctcagcctgctgcgcctgggcaagttgtgacttggcgaaagccaattgctggttcacgccttcaatctgagcctgtgcggcagcattgcgagcactgagctcagcgttctcgaatcgcgcattctccagcgaggtcttggcctcttccagctcctcgcttttgacgcctcgagccatctcctgacccttatgacggcctagcacgaagccggcgaagaggccaagccctgcaccaaccactagcacgacgatgacgataatcacggttcctatttgctcaaacatggtacccagtatgtcatcgatggtgaatgacggtaaaactcgtcacgatttgacgagacgcgcaatggccgcggaagcctccgcaagtttttcatcggccacctcgccgccctgaatcgacgcctgccgcacgcaatggttgagatgatcgtccagcagcaataacgccacggatttcagcgccgaattcgacgccgaaatctgcgtcaggatatcgatgcagtatttgtcatcctccaccatctgcgtgatggcacgcacctgcccttcgatacggcgcaatcgtgcgatgaccttggccttgtcttcgtcataaccatgcatcgcaaaccccctgatacttatccgtcagctgaacacaccccattatataccctctaggggtatagggtatacactgttgttcagtacaacaaacaaggggaaggaacggttatggagctcagcatcttctcggccgccacggcgctgatagcggcggccgcattgacatggctggtactgcggttcttcttcggaacgcagaaagccacggccggggccatggacgcctccggcgaacgccaatccgcaacaatcaccgtcaagggcgggtactcccccgccgtgatcagcatgcgcacgggtacgccgatcacgctgactttcgatcgacaggagaccggcgaatgcacttcgcatgtggtgttcgcggatctggggcttgacgccatgctgccgggcaacgccaccaccgacgtggaactaccggcgttgccggcgggcgaatatccgtttgcatgcggcatgaatatggtgcatgggttgttgagggttgagggagaggagagtaaggacggtgcggataaggacgggcttcgcccgcgtgctgacggctcggccgaagccgagggggtctctccctcagacttgcgggttggagctccggttgtggatgcggcggaggccgagcggcgagaggcggctgaacgcgccaatgagatcaaggcgctgacgaagctggtgattgtgggcgcggtactgacgttgccggtattcgccgtcaccatgctgcatatggccaatcccgcgctggtgccgcattggatggtgaacccgtggctgcaggccattctcatcacgccggtgatgttctactgcgggcgtccgatccacacggtcggcttccccgcgctggcgcaccgctcccccgacatgaactcgctggtctcgctgggcacttcggccgcctacctgtattcgctggtgacctgcatcgccccgtgggtgttcccggagggctcgcgcgagccgtatttcgaatcggtcggcgtggtcatcaccctggtgctggtcggccgcctgctggaggccaaggcccgcgaaggcaccggcaaggcggtgcagtcgcttatcagactgcgcccgcgcaccgcgcacaagctcaacgccacttccgcagacaatgtggacggcatcgaatggcgtaatccggcgcatttcacggacaccgacatcgacgccatcgtcaccggcgacctgctggtcgtcaagaacggcgagcgcgtgcccacggacggcgtgatcgtggccggcgaggcgcgtatcgacgaatcgatgatcaccggcgaatccaagccggtctccaaaaccgcaggcgacccggtgaccggggccaccgtgctgctcaagggcgactgcgtgatgcgcgccacccaagtcggcgcggacacggtactctcgcagatcgcggcgatggtggcccgcgcccaggcgaccaaggcgccggtgcagcaactggccgataagatcgcccggtatttcgtaccggcggtgatgatcatcgccatctggacgttcgccatctgggtgtcactgggcccggcgccgcaactggcgcacgcgctggtcactgcggtcagtgtgctgatcatcgcctgcccgtgcgcgctgggactggccacgccgctgtcggtgacggtctcgctgggcttgggcgccaccaacggcgtgctggtcaccagtgccaaggcgctggaacaggcgcgtcgcatcggcaccgtggtgttcgacaagaccggcaccatcacgcgcggcgtggtggacgcggccgccgactgggacaagccgagctacgagcaggacacagtcaaggaaggctcgcgtgaggccgtcgcggcgttgcgcgcacgcggcatccgcacggtgatgctgtcgggcgacaaggccgaggtagccgggcgcatcgcccgcgaagtcggcatcgatacggtgatctgcgaggtcaagccggacggcaaggcctactggatcgccaaactgcagcgcgaacgcgacgaggccgccgccaagtccgcgtacggcacctcccgcacggccgcacaatcccgcactctgattgcgatggtgggcgacggcatcaacgacgcccccgcgctggctcaggcggatctcggcatcgccatcggcaccggcacggacgtggcgatgcagtcggcggacgtgaccttgatgagcggcgacttgcgcggcgtcatcaagaccatcaacctgtccaatgccacgatgcgcaacatccgcgagaatctggggtgggcgttcggctacaacgtcatcggcattccggtggccgccggcgtactctacccgttcaccggctggctgttgagcccgatgatcgcgggtctggcgatggcgttgagctcagtgtgcctggtgctgaacgcgaaccggctgcatggagcgaacatcaacgtgggcgttgccgatggtcccgccggttcgggcagcagcatggcggatgtcgaatcagccggatcggccgaatcagccaacgccgccaacatcaccggctccgccacatccaacgcgcctcacgagccgaccgtcatcatcgatgatcgcaccacgctgaatcaaaccaatcacgtatctgaccaatccaataatccaaccaacaaggagaacactatggatatgggaatgcacatgcaccacaccgccccagcggacggcgaaaccgccaccgacccggtgtgcggcatgaccgtggctgtgaacgccgacgcgatcacgcgcgagtatgagggcaagtcctattacttctgcggcgaacactgtgccacgaacttcatgaaggccccgcaggtgttcctggagcagtagtctctgcgtttacctgattcaacgacaatggcctccgcccaaaacgagcggaggccatttgcatatatgaatcaatcaacgaatcagttggcgaagaagaacacgaacagccaagcgccgataatggcgccgacaatcggggccacaaccgggatccaggcctcgccccagcgggaggagcccttgtgcgggatcggcaggatggcgtgcagcagacgcggcatgaggtcgcgggccgggttcaggccagggccggtcgggccacccatggaggtcacgaggccccacacaatgaagccgacgacgatggaggcggcggcgtaatcctgcttgccccaagccagggacaggcagcacagggcgccgaagacgagcaccagggtgccgaacatctcgttgaggaagtagttggccttctggttgtccgcgtcagtggtgcagaaggtgcccagaatcgcctcggcgtcctcggtctccttgtagtgcgggtagtaagtgatgtagacgatgagctggccgagcagggcgccgagcagctgggcaacgatgtacggcagcacgtcgctccacgggaacaggccgttgacggcctgggcgatggtcatggccgggttgatgtgcgcgccggagacgctaccgaacatgagcaccgggaacatgacgccgaagccgtagcccatggcgatgttcagccagccggcgtggtggcccttggtgttcttgagctcaacgttggccacggagccgttgccgaagatcatcagaatggcggtgccgaagaactcggcggccagcttggtaaagagaggataatccactgcttcttcttttctcttcgccgcgcaacaggcatggctgactgttcacggcattctgtgtgactggaaatccgttcgcggagccggcgacgcgatttacgctgggcgcgaaagcaaacgtggtgattgtacactttgccccacgacgaaatgccggcaagatgcgatgtcgaatgtccagccgaatgcaatgcccaaaaagccatcggaatcagccgaagcgaccttgaatctcagtggttgcgaatgacgttgcgcagaggcaggacgctggtgggcgagacggacagttcgtcgattcctaggcgcaggaacgtatcggtcaggctcaagtctgcgccaagctcgccgcagatgccgcaccagatgccatgacgatgggcagcctcgatagtcatctggatcatgcgcagcacagctggtgaatgcgggtcggcaaagcgttcgagactcgggttctgacggtcacaggccagcgtgtattgggtcaggtcgttggtgccgatggagaagaaatcgacttcggcggccagctcgtcggccataatgaccgacgcaggcgtctcaatcataacgccgatctggatactctcgttgaagtcgatgcgctcgccgcgcagctcgcttttggcttcttcaagaatccgcttggcgtcgcgtacctcctgcacagaggtgatcatgggcagcataatggcgatgttgccgtatgctgaggcgcgcaataatgcgcgtaactggactttgaaaatctccgggcgggtcaggcagatgcggattgcccggtaaccaagcgcgggattatcctcgtggcccagattaaagtagtcgacctgtttgtccgcgccgatgtcgagcgtacggatgatgaccggacggtcgcccatctcctgtgcgacttgtccgtatgcatcgaactgaaattcctcggtcggccagtcctcgcgttccagatacaggaactcactgcggaacaagccgatgccctcagcatcgttggccagcacggcggctgcgtcagagggacggctgatgttggcgtacaggtggacccgctgaccggacttggtttcggtgggcttgcccttgagcttccgcaggaggcttaggtgctcctcagcctcggccttcctgcgccggtattcggtcagcgtggcctcgtccgggtcgacgaataccgcaccgctggtgccgtcgattacggcaacgtgaccatcatcggccgggtcaaaggcgtcgccgatacctgtgatggcgggcaggcccatcgtgcgcgccagaatcgcggtgtgcgagttcgctgagcccttggcggtcacgaggcccaaaaccttagcgcggtcgagctgcgcggtatcgctgggagcaagatcttcggcgaagatgatgtggctttcgccgttctgcgcgatcccgttctgcacaataccgttctgcacagcatcgccttgtacactgccatcctgcgccgtgctatcgcgtttgccttgcagcacgttcatcacgcggcgagaaacatccttgacatcagcggctcgagcctgcatggtcgagctatccatcgcagcgaacatggcggcgaactgttcggcggcgctcttcaccgcgaattcggcgttcaccttgtcttgcgcaatcaaaccttcgacgcattccgcatagtccgggtcctggagcataagccgatgggcgtcgaacagttcggccttgttttcgccgaactcagcggcgacgttgtcacgcagttgcttgagctgagcgacggccgtgtcacgggccgcgcggaatcgatccatctcggcctgcgggtcgtcgattaagcggcgttctacggcataatctacggcggcgagcacgcggaccgtgccgatagcaatgccagcggatacgctgacgccctgtatcgttctcattacaggtgctccttgaggaatcgctcgaactctgcagcagcgacagcttcatcgttgccctgcacccgaaccgtaacctcgtcaccttgttgaacatcaagtcccataacaccgaagatacgcttggcatccacggattttccaccgtaggcaacggtgatgctcgattcatattcctgcgctttggcaaccaatcggccagccgggcgggcgtgcatgccttcggggtcggatacggtgaacgtgaatatctgaggcatgacgttgctccttacacgtccggccgtcacgcgcgaagacggcctttccgcaccagctacggactgatactggaaaaaacaaaaaaccggaatctttcgattccggttgtctgtgcccccgcagggattcgaaccctggacacgctgattaagagtcagctgctctaaccaactgagctacaggggcttggttagatgttgaagtattccttgcaacaggtgataaatatactcagatttgaagcgaatgcaactctcggcgtgtcgcgcctatttccggcgtttttgctaatacaaaaatcccccatgcggcgcaaaccgcacgggggatgatgcttaagctcagactcttggtctgtgtgattccagcactaggccggaatgactcactcggccacgaccttcacgaagaaggaagcggtgatctccgggtggagggccaccttggcggggaaatcgccggtggtcttgatggtctcgacctcgatggccttcgggttcaccgcagccttgtcggacagagcgacggcgatggcctcgttggagataccaccgaacagcttgccggactcggacaccttggcggcgatctcgacggtagtgccctcgatggcggccttagcggcgacggcgtcctcgcgggtagcgacggccttggccagacgagcgcgcttcatagcgacgatctgagcctcagcgcccttggtccacgcgaaagcgaggccctgcgggaacaggtagttgcgggcgtagccggacttcacgtcgacaacgtcaccggaatggcccaggttggacacggtcttggtgagaataaccttggtttcagccattgttcaaagcctccctaactcagcgacccgaggtggcgtacggcagcagggccatctcgcgggcgttcttgatcgccttggacagctcacgctgctcctgcacggtcacgccggtgatacgacgggaacggatcttgccgcgatcggaaatgaacttacgcagcagcgcaacgtccttgtaatcgatctcggtgaccttggcggccttcagcgggttcggcttcttcttgaacggcttgaccggcggttgcggcctcttacgtgacatgatgttctccttataaatcttgatattgattgctgctggcagcggggaggcaagtactgatcagaactccgggtcggaatcgtcgccgccgaaatcggaggaagcgccgaacgtggagaagctaccggcatcagatgcaccggcattactccacgggtcgaccgcaggagcggacgggttggcgggagcggcagactgctgggagtatccagcgccaccaccctgatagccaccgttgtaaccgccctggccaccggcataaccaccttggccaccctggttgccatagccctgattgggctgctgaccaccctggaaaccaccggaacgaccctggaagccgccctgaccggacgactggcgagtcacctgtgcggtggcgtagcgcagggagggcccgatttcatcgagctgcatctccacgacggttcgctgggaaccatcctgtgcctgataggaacgctgctggaggcggccggtggcaatcacgcgcatgcccttcttcagggactgggcgcagtggtcggccaggtcacgccaagcggagcacctcatgaacagcgcctgaccatcctcgaactggttggtctgacgattccaggttcgcggggtggaagcaatcgtgaagctcgccacggtcgcgccgctgccaatagtgcgcagctcggggtccgcagtgaggttgcccacgatggtgatgacggtttcgcctgccataacggtccttcttacttaccttgaataccagctgttcagctgactaaacgcttgattcagcccttacgaaggatcttcgtacggatcacggattcgttgaggttcagaacacggtcgagctcatcgctggtagcgggctcggcggtgtacttcaccacgacgtagttgccttcggtcttaccggcaatctcataggcgagcttgcgacggccccagtaatcgggctcatcgaaagagccgccttccttggtgacgagttccagatactgctcggtcagcttcttcagaccgcgctcatccagctcaggatcggcgatgaacatcagttcgtacttgtgcgcagacatcacccacctccttcggactattcggccacggacgttccgtggcaggagtgtgtatgcgtgttaatcatagggcgatgcagatgcacttcaccctgtgagcaacttacctatcttatggtcagggcgggacagtgccgcatgttcatcaacgattgcagcactcttacaacacagccccacttcacggcacgcgctgcggtggggtgctagtacactggttaaggctaaaaacactgcaacacaaaaggatgcgaaagcatgtcggcgattcttgaaggcactccggataaacgactcgtattggtcacgggccgcgcctaccccgagctagctgagaaggtggccgaatgcttgggaaccgaaatcctcgaaaccacgtcctatgactttgccaatggcgagatgtacgtgcgtttcaccgaaccggtgcgtggtgcggacgtgttcgtgctgcagtgtcattcgggcgatatcaacaagtggatcatggaacagctcatcatgatcgacgctttgaagcgcgcctccgccaagtcgattaccgtggtggcgcccttcctcggctactcgcgccaggataagaagcaccgcggtcgtgagcccatcaccgcccgtctgattttcgatctgttccacgccgccggtgcagaccgcattatgacggtcgatctgcacgccgctcaggagcagggtttcttcgatggtccggtcgatcatctaaccgccatgccggtgctgctcgattacgtgcgttccacccttgatctgggcaacaccaccatcgtgtccccggatgccggccgtatcaaggtgtccgaacagtgggccgccaagctaggcaatctgccgctggcattcatccacaaacagcgtgatattactcgtccgaaccatgccgaggcacatggcattatcggcgatgtcgacggccgcgactgcgtggtcatcgacgacatggtcgataccgccggtactatctgcgaagccgtgcgcaccctgaacgaatccggcgccaagtcggtgacgctggtcgccacccatggcctgctctccggcccggccgtggagcgcctgtctcactgcggcgcgcatgaaatcgtgtttatggacaccgtgccgattcccgaagagaagcgcctgccgaatatgaccgtactgtcttgcgcaccgctgctggccgcgggtattcgctccgtgttcgaggaaggttccgtggcgattctgctcgacggcctgcccgaggacatgcgtccacgcaatatctatgcgtgattgatacgccgaaaaaccttacgaaaaaacgccgcttgactatagctgggtgtacgtaagacagtattgcgccgagatcgacgaagcggcacgaaaccgcatggagctgatcgtgcggtcactggcagagcaaaacggcgtgaccgagcaactgaaagccgaaaaccaaatggaatgggtgcggcagatgaacgcttgcaaggcacaggcagaggagattgtgaaagcggaattgatttatgattgagtgagaaaagtccgggcagaaaactgtccggacttttctcatacagtccaaaatgacggtagaattattcacaattttatggtataatttgaatacgaaaattgagaaacaaatcggaatttataaagaagaatattgatgaaactatttttatgttcacacttttcaagtgtaggaagtctgataaaggaagaaattgaaaataagaaagtcgcatttattccaacagcttcactgcgtgaaggctacaccggttatgtcggctcggctcgaaaattattcaaaaagttgagagcaatcgtaactgaaattgatatttcaacggaggcttattcaacgatacagtctgtttttgaagaagcagatgtgatatattttaccggcggaaattctttctttcttatggaccagctccgtaaaacgggaactgatggactactgaaaaaggaattggcaaatggaaaattgatgatcggtgagtcggcaggcgcaattatatgcgctccaagcatccaatatat

SEQ ID NO: 921 - DNA, 3449 bp, Unknown
  gut microbiota DNA sequence
ccgattaagccggttttgttgttaagccggggaacggttcggggtcttggtggctggccgtgtcccatgtggtttcccggcttaacgttccgggttatttgagggtgtgtagttgtcggagtcgttgctcgctgagccatgtctccttggaggggtcggggccggggttggccgcatcgacggctttgcgcatcatgtcgagggtcgcgaacgcgtagaacgcgctggttgtgctcatgctttcgtggccgagcagttgcatgatgagcggtagcggcacgccctgttggtagaggtccatggcgcgggtccggcggatcaggtggcagtggacgcgttcgggcatggacgggcacgtcccgcggcgtgctctggccgccgcggttttgaggatctcgtcgatccggtccacggagagcggctggatggcgccgttcctcgtcgagtggaacaacggcctgtcgccgtcgcgcatggacggtccgggatggaattcctcgaggtaggcggccaggtgggttcgtgtcctttctcccaggggcacgacccggctcttgccgcgtttgccggtgagcgtgaccctggccggcttatccatacccacgtccgcgatggtcagtgcggcgagttcgccgatcctggcggcggtgtcgtacatgaggatcaggagcatgcggttcctgcgcgatttggcgtcgccggtgccccatgcggtcagcaacgctttggcgtgctcctccccgaggtggtcgacgggtttgcgcgcgggtggtttgacacgtatgccggccgcgtcgttgcccagcgcggtcaatgccgggtgttcgaggcccgcgtggtcgaggaacacgcgcatcgtcgtcatcctcagcatgatggtgcggtccgagtacccgcgctcggtccgcatccattcgacccaccggcccaggcgcgcccggtcgaaatgcccgaaaccgatgtggctgcgctgcgtgccttccgtggtttcgagccatcggacgtaggattccaggccgatgcggtacgcctcgacggtcttcggcgagctgccccgcaccttgggcagccagtggtgcagccagtcgcgcgcgactcgccagaagtccggttcaccggagctggcggccgttttccttgccttgctcatggttcctccgtttccgggaccacgcgttcggcgtcggcgacgaggtccgcgtatccgtccatgaaatcggggctggcgtgcacgtagtagagggtgctgtcgatgccggcgtgtcccatgtaggccgccagatagggcagcatcgccatcacgtccacgccgtcgcgagtccaccgctcgatgttcgcgaacgcgaaccggtgccggaaatcatagggcctgggccgtttgccggcttgtggccactcgagcccggcccgcgtccagacgcggcggaacaccacgccgggcatgcccggggagaccggattgccggtggaggtgacgaagaacgcgggacggtcgtctccgaagcgttcgcgggaccgttggtcgcattccagcagttcggcggcgacctcgtcgcccacgggcagcctgcggctgcgaccggccttggaatcgaccacgtcgatggaacgggccttgtggtcgacgtgcccgacggcgagtctcctgacctctcgggtgcgcagcccgcagcaggccatgagcatgaagaacgcgcgagactgccacgcccacggcgacggagactccaacgttcccgcggcccgcaggaacagggcggcctcgcggtccgtcagcaggtacggcgtcggacgcggggatccggccttccactggtcggagagcacgtacgcgtcgggatcgtgggccagtcgcatccacctgccgaagtccctgatgtacgagaaccacgagcggcaacccccgggattcgcgtcgatcctatgggcgatccatcgctccacgacgccccgctccagacgcacggccccgtgttcgaggcaatgccggtcgaacgagcgcaggacccggacgcgggtggcgccatgcctgcccatggacgccttgaaacggatgtactcctccaattcgccggcgagcgggccgacgaatccgtgttccgtgggtctcatgacgatccgccttccggcacgggcagcacgcacgcgagcattcccccgcggtgcgtggccatgtagacgcgtgtggaatcggggtcggcgtggccaagcaccgcgctgatcgtcggcaacggcgtggccgcctccagcatcctcgtcgccgcgtcgcgccgcaacagcctggaaccgccccggcgtccgagcccggcgtgccgcatgacacggctgatcgcctcgtacaccgatgaatgaccccgaagcgcgacatggggcgccttgtaccgcacgaacacacggtcgtcgtcggtggcgggcctttcgtccaacagccaggacgccagcctcgcggccagcggtcccgtcatcggcacggtcaacggattgcccgtctttcgctgcaccagacctatgctcatggaatcccaatccacgtcggcgatcctcagaccgatcacatcgcatgccctcagcccgcacgtcagcgacagcagggtgatcgccgcgtccctcgacggcaccgaccgcgaggcgcacgcctccagcaagcggcggtgctcgtcgtcgggcaacgttcccgcgatcgcgtgggtcctgcgtatgccggccaggccgatcgcgtccgccaggtcatcccgcccgagccatctgaacaacgggcgcaggtccgacgcggcgtgccgcatcgacgactccgaccagcgtgaacgcagcccggccatgaaccccagcacatgcgagccatccgaaccgtccaacgacacgaccccatgagattccagccacgtgaggaacaagcccgccatccgacggtaatgccccaccgtcgccgaagccagtcccgaaccggcgagatacgcctcccaacgctccatgaccacggccaaacccggaaccaccggctccgcaagcctgctcctgcgccacttgcccaggtccaccgaaccggaccgcagatacgagtcgcacaaacgcgccagcctgccgtaatcgaaccaccgctgcctgctgaaaccgcccgtccgctcactgaaggtcgacgcggcgaaccccgcgcccaacccacgcgtgtacaccgcatccgggcctccggcgtaccgttccaacgccctgatggacttgcggtactggcctatggtggattccatataaccggccccgtaaagcgcgcggaccacctcgcccgcgacatggccaaccgtcgtctcacccatggcaaactccttcgttcgaatcaaatgggacaagacgaacataacccggaacgttaagccgggaaaccacatgggacacggccagccaccaagaccccgaaccgttccccggcttaacaacaaaaccggcttaatcgg

SEQ ID NO: 922 - DNA, 3295 bp, Unknown
  gut microbiota DNA sequence
tcgaacaccaaactcaagtccgtatgggacttcaacaccatgagcgacatcctcggaccggtcgatgacggcaacggcggcaaggcatacaacacctatcgcatttaccgcaaggcggccgcgaacgctagtgaggcccgcacctccgcacaggacggcaacaagagcttctcgcagaagaacacggcagacgatgcgctgaacaccggactcgatcgttgggaagtgaagctgttcgacgtggtcaacacatacgacagcggcgctgtgcacagctccgcatccggcgacgctggtaccacatgggttggcatcaaggatgccgtggtcgactccacggacggcagcaccaagacgaagctcgatgcctaccagtccccggccaaggccgtgctcatgctcgacgcgaccgtgaccgacaacaacggcggactcacccccgaaccggacgacggtcaggacccgtgcggcaaggacggctgcaagaccgtggacctcaccctgcagaaggtgtggcgcaacggccagctggaacgccccgacgccatcaccctcgaggtgaccgccacgtacacgaatgcggcgggcgaacaggtcaaggccgggaagctcgaatgcttcaaggacgactgcgccaccgaggagcgggccaacccgttcacggtgaccatgaccgccaaggagaacggctccgcgtggagcgacacgtggcgcacgaagctcaccggcctgccggtcgccttcgttgataagggttccggcccgaacggcgaggacgtgacgcgctactacacgtacaccgtcaaggagctcaacatgacctacgcctccggcgacacggacggcaacgccgagacgaagaccccggccgaggccggctactcggtgtccgtcaagtacggcacggacaaggacggcaagtatgtggtcaccgtcacgaacttctcgcccctgcccgagaccggcggcaacggcacgctcctgttcgtcatgctcggcgtgctcatgctcgccctcggcaccgcatggtacctgcgcgccaaccgcatggaaccggccgcggccgggggagcgggcgcgggaaccgcgctgccggtcggccgcaaacgcggtcggcacacccgataaccagacttcccgccgtcgcacggcggcggggcaaccaatgtaaccaactcgaaccggccccgaccgggaccgatgcaatacagagaaaggaacagtgatgaagtcactagtcaggaaagtagcggcgggcgtcctcgcagccgccacgatgctcggcgtcgccggcctcggcgccaccaccgcctccgcggaagatgctaccggcaagctgaccgtcaccagctcggatgccgcgttcaacggcaagacggtgaaagcctaccagatgttctccgcttccccggatgccgaaggccagaacgccacctacacgctggcctccccctgggacaatttcttcaagactaatgcgaatgagttcggtatcacggatgtgaccgatgccaacgtctccgaaaaggcctacgactacgtatacggtctgaagcaggcgcaccaggacacgaaactggccgagctcgccaccaaggcttccaactgggccaagaatactggcaacaatgtctctgcggtgagttctacagcggtggcggaggcctccggtaacgcctacgtcgctacttttgagaacctcccgcttggctactacgtggtgagcccgcaagccggttccacttccaacacgcgccacacggatgcgatgcttgtcaacgtcaccgccacgaccaagaacatcaatctgaagtccgaatacccgaccgtcgacaagaccatcgataccgacaagaagggcgacagcgcccagatcggcagcaaggtgaacttccagctcaagtccaaggttccggacacctccgaatacacgaattacgtcttcaagatcgtcgataccctttccgcggggcttgacttcaacaacgacgtcaccgtcaaggtcggtgatgctacgctggacactactgattacagcgtgaccacgagtgggaagacgaccgtcaccatcgacctgtccaactacgtgaaggccgacaatgcgtccaaggccggccagaagattctcgtcacctactccgcgactctgaacaaggacgcgttcgtcggcaccccggaccagaacaaccccggcaacctcaactccgccaaggtccagtacagcaacgaccccagcgaggatagcatcggcgaatccaccccgtccgaaacccacagctacaccttcaacttcaacctgaagaagatttacaaggaaggcaccaccgaacacaccctcgccggcgcgaagttccagctgctcgactccaacaagacctccgtcatctctctcgtcaagaagagcgacaacgtgtatcgtccggccgtgaccggcgatagggacgccgacaaggtcactgaagtggaaaccccggccaacggcatcatcgagttcaccggtctcaaagccggcacctactacctgaaggagaccttcgccccgaagggctacaacaagctctccgatccggtcgaggtcaccatcaaggccaccgtcaacaagaccaccggtgcgctggaatcctggacggtcaacggttccgctccgaccaccggtgtgactgtcccggtcgtcaagatcgagaacaagaagggtgcgctcctgccggataccggtggcatgggcactgtgctgttcgccgtgttcggcgtgctcatcgtggccctgggcgccggctggtacgtgaagtccaaccgcaagtcccgccacgcggcctgagcccgcgtcacatcggtcctctccggtgcctcttcgacaaggagagccgagaggaccgggcacgaggcgataggggagaggcccgccgtggccgggcgcacaagcgccactggcccgtcgccctccccgaaccatcgcctcgcgatccgccttccccagcgggaaggcccatgaaggagccctatggttaagaagctgcgcggcctcgcgccgttgctggtcatcgtgatcggactgctcgtcctgttctacccgacgatcagcaacttcctcgtcatgaagaacgcctcgcgcgtcgtcagcaactacgacgcggccgtcgaggcgctctccgacgaggaataccgcagcatgatcgacgccgcgcacgcctacaacaccagactcgccgaggaaagctccggcatcaccagcgcccttaccggcgcggtgaacaccgaagccaccgacgccgagtacatgaagctcctcaacctc

SEQ ID NO: 923 - DNA, 10981 bp, Unknown
  gut microbiota DNA sequence
ccgcgcccagcagaaggccgcggaccggctcaaacgccccaaaccgcgcaaggcggccgagggcacgcgactgtgggacgagatcgccgccgggttgcgcaggcattggagcccggagcagatagccaaccggctgaggctggacttcccggataatggggatatgcacgcgagcgtcgagacgatctaccaggccatctacctgcaggccaggggcgaactcaagcaggagctgaaacgcgccatgaggcaggggcgaaccgcccgcagaccccaaggcggccaaggccgcaaaccccgtttccgcgaacccatggccatgatctcggagcgacccccggagatcgaggaccgggcggtcccgggccactgggagggcgatctcatcaccggcagccgcaacaaagcgccatcggcacgctcgtcgagcgcaccaccaggttcacgatcctgctgcacctgcccgacgggcacgacgccgaacacgtccagcaggccatcatcgacaagatgcagcacctgcccaaactcctgcgcaacagcctgacctgggaccagggagcggaactcgccctgcacaaacggatcggcgcctcgctggacatggccgtctacttctgcgacccgcactccccgtggcagcgcggcaccaacgagaacaccaacgggctcctgcgccagtacttccccaaaggcaccgacctatccgtctacccggaggactacctcgacgcggtcgccgaggaactcaacgaccggccacgcaaaaccctcgggttcatgaaaccaagcgagaagatcatcgaactgctcgacgccgcgtgataacctcaacaaccgacaacgtgaccatggaaggccgctcaaacctcaggtgttgcaaccaccactagaatctgccgttcaatcgtttagtgactttttgttaatttctgtgcttaagtagcaactttatgtgtgttttctctacgatctggtgtatattattttttggtttaccggtgtattgcacgcgcgatgtgtgaattgccgcaacatcgctgatatgcgtacatggaatctggaggaatgtatctgatgacggcatcaactgaatcgtctacgcaatcccatcatgatgagaaagaggccattgctcccgcgcgacttgtggcctacgcgctcggcaacttcggccagtcggcgttctacaacgcgctaagcacctacttcgtggtctatgtgaccaactcgctgttctccggagtggacaaggccgtggcgggcaagctcatcggcatcatcacctcgctgatcgtgatcattcgtatcgcggaaatcttcgtggacccgctgctgggcaacctggtggataacaccaccaccaaactcgggcgattccgcccttggcagctcatcggcggtctggtgtccgccgtgctgatcgtcatggtctacactggcctgttcggcttggtcaacgtcaacaccacgctgttcatcgtcctgttcgtggtggtgttcgtggtgctcgatgtgttctactccctgcgcgatatctcctactggggaatgatcccctccatctcttccgactcccatcagcgcggcatctacaccgcagccggcaccttcaccggatcgctcgggtacaacggtctgactatcgccgtgatgcccatcgtcaccttcttcagcttcgatgccggccagcagaaccagaatggttggaccgcgttcatcatcatcgtggccctgctcggcgctctcacggctctgagtgtagtgttcggtgtcaaggaaaaacagagcacgctgcgcaccaaggcccaggagaacggtaacccgattgaagcgttccgcgccctgattcacaacgaccagctcatgtggaccgctttgtcttatgtgttctacgccgtcgccaacgtggccaccggtggcgtgatggtctacctgttcaaatacgtgattggtcgcatggaccttttcccggtcaccggcgtcatccctattgcgtgcggtctgattatgtcggtactgttcccggtcatcactaggtgggtgccccgccgttatctgttcctcatcggcatgtccgtgatggtcgtggcctacctgctgctgattgtcgcctccacgaatataccgctgctgctggtggcactagtgctgttctacctgccgcagacccagattcagatgaccgtgatcgtgtgccttgaggactccattgaatacggccagctgaaaacaggcaaacgcaacgaagccgtgacgctgtccgtgcgtccgatgctcgacaagatcgccggcgcattctccaacggcttcgtcggcttcgtggccgtggccgccggcatgatcggttccgccaccgccgccgacatgacggccaaggacatcaccatcttcaagaccttcgccttcatgattccgctggtgtgcattgtgcttggcctgattgtgttcgcgattttcgtgaagatcgacgaaaaggcccatgcgcgtctggtcgccaagctcactgagaatcttgcgacggctggcgatggtggtggcaacgacgatggtgttggtgttggtgttggtgttggtgttggtgacaatggtgagcataatggtggccacgccagcatcgcgtcggaagattccgcattggcggaatacggtcccgaactcgccaagcgggtgttgctcggcaaatagtgttgctgtgcgaatgagctgtttcatggggtggtgattggcccatggggcggtgaattcctcatggggcggtggctgaaaatggctttattctgcggaaggtaaaattttaccgaccgccccatgggcaagttaccgccccatgggattttcgccgccccatggatgtacgggtaaaggcggccgaattgcctcgtgccgcccccgtggatatgcaagttaaagagcatcggcagcatgactgaatgcacatagagcgtcccccgcatggttgtgccacgttccatggcggggtcgccgtggtgactgtcgccagtacacgccatgccacgcgagcacgttgttgccggtgttccatggcggaaacgtcgtgggcatacaccttggatgatggcgacgacgattccaacacagtacccagtaaagtaaccgccgataacctcaagaaatacgacatcagcccgcaaggccaggccgatgagattcgcatggtcgccgaggccgtgaacaatatcggcgacaacgatggcgatggcgataagaccaacggtgcgaatggcaacaaggctactggcgtgctgagcaagaccggtagcgcggtgactgccgtgggtcttgcggtcgtcgttctcggtgcagccggcggggtctcgtttgctttgcgtcgtaagcgctcctgataaggactgactcggcattatgatgcggttgccagttgctggctgtcggctgtcgtctgccagatgcggctgtctcggcgtagcgatgcgattctgtcccggttcgcgcatcaatcgattgatgttaataccgggacagaaatcattgtcccggtttgaaaaaacgggcgtttttcgcgtaccgggacaattctcgttgccccgatacgagcgtcaatcgttttatgtgcgaaccgggacaacatgtcgatctcgggattgacggtattccgccgattctgcttgtcggggtatgtggactttgaaaattggtttgtcccggttctcaaaaatgggccgaaattgcgtaccgggacaacgatttctgtcccggtagaaacgtcaatcgattgacgttttcaccgggacaaattcgtgcccagaggaggggaagaggggctccgcaatggcgctgggcatcattgtggttggaggcaaattcgcgtccgggaacaatgggacgaggccccggtcgcaggagtagagcgtgatgttgtcatgattatgaccggctttcccacatggaaggccggtcataatcatgccgtttacccgcacgctccctgcacaccggccgcacatcacccacataaccgtgtacagtggcgtgtagtcgcagcaataaaggagcatcaaaagccatgaccaacggacacatcaaccccgccaacgtgccggacatcgccttgaaagacggtcattccattccgcaagtcggtctcggcgtgctacgtatcgacgacgagggcgtggtccccgtcgtcgaatccgcgttggaagccggctaccgccatatcgatggtgcggccggctacaacaacgaggccggcgtgggccgcgcgctcgccgcttccggatacaacaagggagccaagcgcgagaccctgtgggtcaccaccaagctgcgcgactcccagcagggctacgattccgcgctcaaggcattcgacaactccctgaaactcctccagctcgattacgtggacatgtacatgatccattggcccacgccgttcgactggcgcagcaccgacacctggaaggcgttcgtcaagctgcgcgacgaaggcatggcacgcacactcggcgtatgcaacttcatgcccgccgatctgaagcgtctgcacgaggagaccggcgcatggccggccgtcaatcagattgagctgcaccccacgtggcagcagcgcgaagtggtggcgttctgcaaggagcacggcatcgtcgtggaggcctactcgccgatggcgcgtggcgccgacctcaacgccggcgacggcaccatcgagaagatcgccgccgcccatgaggtcagcccggcccaggtgattctgcgttggcacatcgaaaacggcacgatcatcatccccaagtccgtgcatgctgaccgccagaaggagaatctcaacctgttcggcttcgccctgaccgccgatgaacacgctgccatcgacgccctcgacggccccacccgcgccggccacgaccccctcaccttcacctatgcgtgattgatggcacgtcgtaacgcccacttccgccgtcgtttcaacgcttctggtccgctggagcgcgtgctgattctcatcgttctcgccgcagcaatcggcgtgaccatcggcctgctactgccgcaggtcagctccgacgcggccaaaatcacaggtggctacactgccaccggttcagccgccgacactttgaacgcgctcgccgtagacgacaaccaaagctcctccggctacgaccgcgattccttcggtttccgcaccaccgacgtcgacggcaatggctgcgacgtacgcgacgacgtgctcgcccgtgatctcacggacatcacctacaaatacgccggttcctgtgtggtcgagtccggcacactggccgatccgtacaccgctcagatcatccattttgtacgtggccgcgccaccagcgccaaagtgcagatcgaccatgtggtggcccttgaaaacgcttggcaatccggtgcgcgcgactggtccactgccaaacgccatgaattcggcaatgacccctacaacctgctggccgtcgacggcccggccaatcaggagaaggggtcggcttccgccgcctactggctacccaccaacgccgactaccgttgcgactacgtggcccgccagattggcgtcaaagacaagtaccagctcaccgtcacctcccaagaaaaggacgccatgctcgccgtcctccacacctgcccgggccaggccgtgcccgcagacgaataggggctaccgctcaggattgttgagcataggtgcctgcccctcgtcataagcgcgcaggagccgtcggagcaaaaatgtggtgaagtatggtgcggtgaacacgtgttcgctactaccgatattgccggcggatagtttcacgccgaactgaatttccggataagaatccgaagcgattagcgtccgcatggatttggcggtgccttttttcgatttcacctccaccggcaccagccattcgcgcgtgcggacgaagaaatcctgttccagtgtggaatcctcttttttgtagtagtacaggtcatagccggatttccgtagcgcttcagagacgatgctctcgtacatagcacccttatagacaccaagattacgattggcccgcagatcatcactggcctcgtcgtcaagcatcgctacgaacagaccggtatcgccgaaatatatcttgaacttgttttcgtcataattgcctttcaacggcagttcaggataggacatacatcggcagatattcaccattcccgaggtttcaagccattccacgcatcctcgatagtctttgaaacgcgctccgctggcaaccttgctgatttggaacttcttgttttccttggcgagttgcacgggaatatggttgaacacgttgagaattcgtgcctgatcgggtccttgcgcgtatttgcggatatcctcctggtagtccaaaataagctggcgctgcaattgcagtgttccctcgaacgtgccagtgcgtatatgggaggcgacaaccgcaggcatgccgccaagcacgcagtaatccataaatgccgtggagaagacgttcatttccacttcagagaatggcgtagcatcacacaggtgggtgaacatgctttcgatgacggcctcatcgtatccgcgagcccacagaaattcttcgaagtccaacgatcgcatttcgtagtcggtcttatatcccacgctattgctttcgatttgcttatagctgatgcccaacattgaaccgctgcaaatcacatcatatttgccgtcgattttaaagaacttcagtgcagtggcgatatcaggatgggcctggatttcgtcgaaaaagatgagcgtatcgcccggaatgaactttttggctgggtcgatcagggaaatattgcggacgatggtattcgcgccataaccgtccgcagtgattgcacgatatttcggttcctcaacgaagttgatttccactaccgaacggtagttgtgtgcggcaaagtagtcgatagtctctgtcttgcctacttgacgagggcccttgatgattagcggggagcgattcgggtcggatttccatgcattgagataggcatcggctttgcgtttgagatacatgaggagcccctttccgaattactgctatatcaatgattttacactttcatgagcgagttttctaccgtctggcacatttcatgagcgagtttccggcggtttttcacatttcatgagcgagatggcggggaatgccagctgccagtccgccggtcatccatcaatcgtccgcagattgtccgtctgttgacgcgggaaacatgcccgcgctataactgagcccggtatgaagggagaagggaataggaacagacgatatggcagtaacacacaccgcagcagatgccattgcggcaaccactatgacgaacgccgtggcagacatcgaacaggaaacaccggaaatcgagaaggaacgccagcttgctggagtcggaaccgggaccggagcaggggcgaacaacaagaaaaagccgcatgaccatgcgctggccagtatccttggtcccgcgttcgtggcggccgtggcctacgtcgatcctggtaatgtggcggccaacatcacctccggtgcgaggtacggctacctgttggtgtgggtgctggtgctcgccaatgccatgagcgtgcttatccagtatcagtccgccaaactcggcatcgtgaccaacaaatccctgccggaactgctgggcgagcgtatgagcgatgccgggcggttcatgttctttatgcaggccgaggtcatcgccatcgccaccgatctggccgaggtgatcggcggtgccatcgccctgaacctgctgttcggattgccgctgttcatcggcggtctggtgatcggcgcaatctccacggtgatgctgtggttccaaggtggcaagacgcaaaccacgttcgagcgcatcatcatcgtgatgctgctgattatcacattcggcttcatcgcaggcctgttcgtggacccgccgagccccggcgaagtggtcaagggcatgattccacgcttccaaggcaccgactcggtgctgatggccgcctcgattctgggcgccaccgtgatgccgcacgccatctacctgcactccacgctggtcaacgaccattacgcaggcggcgaaaagccgtcgatcaaaacgcagctgaaaggctcgaaaatcgatgtggtctgggcgctgttgctggccggcaccgtgaatctggcgatgctggtgctcgccgccaactcgctgcacggcatgtctggcacggattccatcgacggcgcacaacgggcgatcgcgcaggtgcttggcccggtgatcggcacgatcttctccatcggcctgctggcttcgtcgctgagctccacgtcggtcggcacgtatgccggctcggaaatcatgcacggtctgctgcacgttaacgctccgatgtgggcctgccgcgtggtcacgctggtgccggcactgattgtgctgtggttcgccaaggacccgactcaggcgctggtcatcggccaggtggtgctttccattggcatcccgttcgccgtgattccgctgatgcgatacacgcataacaaggaactcatgggcaagtgggctgatggaaccgtcaagcacgtgatttttatgattgtggtggcactgattgtggcgctcaacgtgctgctgattgtcctgacgctgatggacagggcgtaatagactccagctgaaatcctgcgatagcacaacataatgagaagccccggtgctggaaccggggcttctcattatgttgagaatggttgaatctgccgtcagttcgcagccatacgccgcgcacgccgttcgcgcagcgcgcgcaaggaaataatgtctcgcgtacgaccggcgccgtcgcccttgacgccgaagaacaccatcaacaccattgccagacagattattgcggaaatacgcagcgcccattgaatgccgaaaatcgaagcggcgacggcggaggcgccgtcctgcttatgcaaagcggcaaacgtttccatcagaatcaccaacacgggtgcgcccacagcgcccgcaatctgacgcgcggtattcgtcaccgatgatccggcggacacttcgctcggcccgttcaggcaattcagggaccacgtggtaatcggcatcagcaggaaacccatgccgatctgacggatgaactggcagatcgatacccaccagatccacgtatccatcgccaccagcgacatgcccaaggtgccaagggtcaacacaatcgaaccgaacaaagccaccgggcgcgcgccgaaccgatccatcgcgcggccgccgaagaactgggagacgcactggccgatggcgcccggcagcatgatcagaccgctcatcgtggccgaatagccgcggtcagtctggatgtagagcggcatgatgaccaaaatcgaactgaacgcgaaaaatgccagcgacgcggtaatggtgccgacggtgaacgaacggttcttcagcacttccaagtccagcagcggcggctgggggagtgccgacttgtccttggctacggcctcgcgacaccgcttgccagcgcgcaggttacgcagcacgaaccagacaatgccgaccagtcccacaaccatcggcccccacgtgaccggtgccgcgaatccataggtctccgaattggtgaagccgaacatcagcccaccaaagccaatcaccgacaggcacaccgagaagaaatccgcgcgggccgaagggtcgtgtgaaccgaaattatgcagtccgaacatggccgccagcagcgagattacgccaatgatggtcatggtcaggaagatcgagcgccagccgttggcatcggtctgccagccgcccaaggtggggccgatggctggcgccacgctcatggccatgcccaccgtgcccatggcaaacccgcggcgagacagcgggtaaatggagaacacggtgatttgcagcaccggccacatcacgcctgtgccggcagcttcgagcacgcgcccgaccagcacccatacgaagtttggccccaaccatgccagcacggagccgagtgtgaacaccgccatcgagcagatgacgatctggcgggtggagaagcgtcgggtcagaaacgcggttagcggcaccatcacgcccatgaccagctggaacacggaggtgagccactgcccggtggttacggagatgtggaattcggaaacgataatcggcagcgcggaactcagctgcaactgcgtgaagttgcccacgaaggtaataaaggtcaatatcgcgatggagatgaacgccgcccggctgagtttgccgtctacatatgattcctcgcggctcagcacccgctgcagttcgccgcgacgatccttgattccctgagctccagtcacgcgccactccacttctgttgcccggcctgttgtcttggcggtgtcggtggcgtatccgttcagtgatatatgcgcctcgcatatcaatgcgtattcggtatattcggcgaccgtcgtttttgcgtgcttggccgagcagcctctcaaagcaccccaacacgctatacctaggggtggtctagtaggttcggaatatgtgcagaagcaggacgcgaacatgctctgtgcataagaccggggcacataatgggcggttggttattgcaagaggttacaagtcaataagattagttttgggagttagcatgagagtccatagggcaggtcacgcagcaagtattccacgcagaaggcaccgcatctggccgtgggtggtgtcgattttggcgttgctcgtagtgctgctgggcgtaggcggattcttcggtttgaagctgtattcagaggccaagcaggtcaaggcgcatgaggaacaggcgatgcagctgctgggcggtgtgaccgacctcggtaacctcgacaacctcgatacggtgagccagcagatcagccaggcaaagaccgagaccgcggccgcgaacgagatcgcgcacgtatgcgttgatggctatgactacttcggaggagcg

SEQ ID NO: 924 - DNA, 1353 bp, Unknown
  gut microbiota DNA sequence
atggcgtggcggtgcgtggtggcttgagaactggatagtggacgcgagcaaaacaagagtttttgaatctttgttttgctgttgatttcgaatcgaactctattgttcgtttcgatcgttttgtgatcatttttagtgtgatgatttgtcgtctgggaatttgctagaggaatcttgcggccatgcactttcgtggtgtgtgttgcttgcaagggcgtatggtggatgccttggcagacaggaccgatgaaggacgtttgaggctgcgatatgcctcggggagccgccaacagggctttgatccgaggatttccgaatgggggaacccaccgaccgtcatgggtcggtaccggcttcggccggggggtacgcagggaagtgaaacatctcagtacctgcaggaaaggatattccgtgagtagtggcgagcgaaagcggatgatggccaaaccttgcgcgtgtgatacccgtcgggggttgcgcgcggggtgttgcgggatcgcgtgcgccggctccgacgggccggccggcagttgcagaaaaccatgtgtcaggggaaccgggttgaataccgggccgcagagggtgagggccccgtacctgaacgcgcatggtctgccgatcgcgtctcccaagtagcacgggtcccgtggaaccccgtgcgaatccgcccagaccgttgggtaagcctgaatattcctgtctgaccgatagcgaacgagtaccgtgagggaaaggtgaaaagtaccccgggaggggagtgaaacagtctctgaaaccgtgcgcctacaatccgtcggagcccttttgtggggtgacggcgtgcctatcgaaaaatgagtctgcgagtcagtggcatgtggcgagcataacccgtgtggggtatgcgtagcgaaggcgagtcttaaaaggcgtttgagtcgcgtgtcctggacccgaagcgggatgatctagccctgagcaggttgaagcgcgggtaagaccgcgtggaggaccgaacccacctgggttgaaaaccggggggatgacttggggctaggggtgaaaggccaatcaaattccgtgatagctggttctctccgaaatgcatttgggtgcagcgtcgggtcattacgtcccgggggtagagctactggatgcttgcgggcccgtatcgggtaccaacagcaaccaaactccgaataccggtgacgcgtatcccggcagtgagtcggcgggggataagcttcgtcgtcgaaagggaaacagcccagaccgtcgtctaaggtcccgaagcgtgtgctaagtgggaaaggatgtggagtcgcatagacagccaggaggttggctcagaagcagccatccttgaaagag

SEQ ID NO: 925 - DNA, 1601 bp, Unknown
  gut microbiota DNA sequence
cgtcacctgcgcactgacgttacggcgcgcctggccgaacagatagatgccgatgggcagggtcagaacaccgccgatgatgaacaccagcgaaatcgggatcacgtcggccagtggcgcgaagatcaacatgccgagcggcattccgagcgcgctcagggtggtgtcaaggccgaatacacggcccaccatcctctcatcggcctcggtctggatgatggtgcgcatcgggcccgtgcagatggccgaagccaaaccgttcaccacatcaatcagcaaatacgccagcagattgtgaaccacgccaagaccaacgacggagacgcccaccagagcgatgccgaaggcgaccacgcgcatgttgttgcggatgagcttggcaccgatggtagacatcagcgcgccgccgagcagcataccgatgctccatcccagctcgttggcggcgagtttatcggaggcggtggtcaggttgatgaatccgagattcaaatcgatgccctcatattcgcgggtcatgagcaacagcgtaaggttcatcggcgccacggacacgaagcacaccaaggcgccaccgagcaccacgttgcgcaggttcgcccggcgccatgtgtagctgaaaccatctttcaagtcagcaaacacacgacggacgctggcaatcagcgaacgatcagcattggcatccgacataggttcgagtgtgggttgcccgctattctccgcttcagccatacgcctcgcaacatgttccgcgctcttcttcggcgctttgatcaacgccacaaagccgacgccgataatggccgtggtcacatcgactaacagaatcgaccacagcggcactgtgttgataagcacagcagccaccgcaggtgccacaatcgtattcgccgaattaatcacgccgtatattgagttgacgcgcaatagtttgcccgagggaacaacatccggtatgaacgactgcacagcgggcgtctgcaccccgcctcccgccgaacgaatgaacagcaccacgaaaatcatggtcagactcgcccatcccatcgcgaagctcagcgacagcacgacggtgaccacagcaatcaccatatccggcagcataatcagcaacttgcgactgtgacggtcggcccaggagccgccgaagatcgagaccacggcctgcggcaccacgccgaacagggtggccagcagcatcgccgaaccggttctggtctgcaatacgatccaccaccagatggcgtactgcacgatgctggagcccagcagcgagaacgcctggccggtgagtagaagcactacacggcggatccacgcacgctcggattccccgttggccactgctgcggcataggcggcaccgggtttgttcgcgctatggaccgctgcgcgcgcattcgcattgtcatcgccggaaacctcgggtgtttcgcgcacagttggttcagttgttgtactactagaagacatacgagtgttctccattcttcaattccgctacaaaggtcacatcacggcatacgcacgccgacgcgcgtatgcgtgcacgactccagcaacgagccgtacccgccgttagatggcaggcttcagta

SEQ ID NO: 926 - DNA, 413 bp, Unknown
  gut microbiota DNA sequence
agtggccagcagcatcgccgaaccggttctggtctgcaatacgatccaccaccagatggcatactgcacgatgctggagcccaacagcgaaaacgcctggccggtgagtagaagcactacacggcggatccacgcacgctcggattccccgttggccactgctgcggcataggcggcaccgggtttgttcgcgctatggaccgctgcgcgcgcattcgcattgtcatcgccggaaacctcgggtgtttcgcgcacagttggttcagttgttgtactactagaagacatacgagtgttctcaattcttcaattccactacaaaggtcacatcacggcatacgcacgccgacgcgcgtatgcgtgcacgactccagcaacgagccgtacccgccgttagatggcaggcttcagta

SEQ ID NO: 927 - DNA, 1973 bp, Unknown
  gut microbiota DNA sequence
acgcctaatcaccgatcatcctttgggaacagcgcgtcgaaggcatgttccatcacggacttacggcggatcacaccgacgagtctgccatcaccatccaccaccggcagtttcttgaactgcttcttggcgaggattcgggccacctctccgacatgctggtcgggagtggcggcaacgaccttgcgcgtggcgatgtccatcaccttcttgccggagagcgcctgcaccttggaggccacggtttcgtcgtcgaacaccaccatcgtcgaaccggtgccggtggaaaccgtacgggattcataggtggcaatcgatttcatgacatcgccgtcgctgacgaagccgacgagcctgccatcgccgttcaccacgggaaggctggagacgttgaggcggatgaactcgcgtaccacatgcgtgatgtcatcgctgtccaggcagctgtagggctgatcgtccatgatcccgccgatggactgttcctgggcctgcttgaacagggaggcggcgggggccacgtatgcgccggcgtagtgatgctcggcgggctggccttcagtgggttcggccgcgacttcggcggaggcttgcgcctcgtaggccttggcgttgcgtgcggcctcctccttggcacggctggtgacggtgaagatgcagatgatcagggcgatcagcgagatggcggcgcacagcaggtaggagaacgcgatgccgctggccgtggcggacttcacaccctgggacatgcgcgaggcggtcacggatgtttctgcggtgaccagaagcgaggtcgcaatggctgccgcgatctggcggccggtgttggcgatggcgttgccatgggcgatcatgtcgttcggcaaagcgttgacgccccaagtgtttatcggcatgttggcgatagcctgaccggatgcctgcaatgcgcagaacacggcgacaaacagcactgatgtcctggtgttgatggtgccgagaagaccaagagagatggtcatgagcgcaaggccgccgatgcccacgcctcgcgggccgaatttgtcgaatgcggcaccggcgaccggactcaggatgatgccgatcgccgcggcgggcagcatgaccatgccggtgacggtggcggattggccgagcacattctggatgaagataggcaacgtcacgttggttgcggcgactgcggcgttgatcagagtgaccagaatcgcggagttgcggaagttgcgggtggcaagggtgtcaacgcgcaacaatggctcatcgagcttgacttgcttgtatacgaatgcgacgaaggccacaagaccaacgacgattgaggtaatgacgaccggactggtccatcccatcgtggaagcggacgagaagccatagagcaggccaccgaacgcgatggtcgaaaggatcacggacaggatgttgagctttgggttcttcaactcgctgacgttcttgagcatcatcgtgcctccgacaaggatgaccagtgccacgactgcgatgccaatgaacatcgggcgccatccgaaactgtcaatcaccagaccaccgacaaccgggccgatagccgggccggcggccatgacgataccggccatgcccatggcggtgccgcgcttatccggcggatagacgagcatcggcactacggcgaccaatggcaacagcacgccggagccggcggattgcagtatgcgcccgacgagcaacagcatgaaattcggcgcgacggcacacagcagtgtgccgaccatgaaagtggcaagagctccggcgaagagctttcgggtggagaatttatcaatcagatagcctgaaatcggcaccatgatgcccgagaccagcatgtagacgctggtcacccactgcacggtgccggtggtgatattgaaatcacgcatcagtgccggcaaggccggtgacatgacggtctggttgagcagcgcgatgaacgagccgacgacgatcac

SEQ ID NO: 928 - DNA, 247 bp, Unknown
  gut microbiota DNA sequence
tattccggtcatgagaagggcgcggtggagtccaaggtcggcatggtgcggcgcaagctgttcgtgccccggccgagcgtatggagcctggagaacttcagcgccgggctgccggaccggtgcctggagctggccacgaaaccgcactgccgcaaggacacggaggaacgtggcctgttctccgaggaccgtgcggcgctgctgccgttgcccgggaagcgtttcgacgtggtcacgtggcggcata

SEQ ID NO: 929 - DNA, 26827 bp, Unknown
  gut microbiota DNA sequence
agcggaaacgaatatggtgcggcgcgcattgctgccatgattgccgccgccgttactatcgtcctcactgttcttgcagccttcggctctatggtgccatacgcgcaagctgattccttcggcactctcaccatcaatgccgtatggggccgagatacagccgcgcccaaattgcttgccggcgatacctattccatcgtgcgcgtcgccaccgtcacaacgaacaatgatggtagcgtctcctcatataaaaccgtcggcgatttttccggcctcactgccgattgggaacgcctgacatcaagtgaatatcacgatgctgccaagaagctcgctgcgcacgcggcgaaaaacaagctgtaccagcattccggcaccactaacgtagctggtcagctcactttccagaatctgccgctcggcctatatctggtctcccgcacggattcggcgaaagccaacaaggcatacgactgtgatccgttcctcatctcgattcccggcagcggagatacggccgccgatctcaacatcacggtagagccgaaattcagcaccagtactccgcccaccccgcctgaacacgaacacaacccaggagagatgccgggcaatcctggcgttatcggcaataccggtgccgccgtgggaggtatcgccggtgttgcggccgtcatacttgtcatcgcatttgccgtgttgaaactacgcgtgcgatatcgctccgatgataccgagtcatcacaccagttccgtgccgacggaggaaaagcatgacgcatagcaaggcctcgttctcatccgcacagataaaacgtctgatcaagctgcgggcggtggtgaaggtatcgccatcacgcatcaggtatgccgagtggttcaaacgggaatgcgtgatgcgcgccgatgccggcgaatcgcccacgtacctgttccgtgaggcgggactagggcctgagctcataggcgaaaaacgtattgaacgctgcatggaccgatggcggaagaaaatgcagctggaagatctggaagtggcaagcagcccggaacgcctgttttctgtggatatggacacggagcaagacagagaagtcagcaaggtcgatgtgcgtgacgtgcgcgatctgatcatctgcaagcaaacacgttatatcgagagcctgcagcggcagatcgatgagctgcgtttgcagcttgcacagcaaaccaagtccaacgatatgcaatgagcggcatggggcgagttgaatcgtccgtaaacataacgcgccgaagtcgtggcaaaggagcacacatcgcgaacgacacgtaaaatcgaacacatggagttgaacgaattgccccagatggatccgcgtgcgctgaaggccacgtctgtcaaagccgaagacgaacacgccaattcagccgaaccgcaagcactgaaaatcaccgccgccagctcgaacccaaagatgttcacgctgccctggcacaagcccttggccacctggcctaaggacctgctggccaacctgccgcgaggcatctcccgccacgtcgtgcgattcgtgcacgtgggcgacgaggtgtacgccatgaaggagatcacgcgccaggtggccgagcgagagtacgagatcctgcgtcgactgcagaagctcgaactgccaactgtgaccccgatcgccgtggtcatcggccgtcatacccgtgaaggggagccgctggaggcgattctggtcacccggcacttgaagttctcgctgccgtaccgtgcgttgttcgcccgcaacctgcgcccggacaccgccgaacgactgattgacgccctcgccgtgctgctggtgcgcctgcacctggccggcttctactggggcgatgtgtccctgtcgaacgtcctgttcctgcgcgacgccgacgctttctccgccttcctggtggacgccgagaccggtgacctgcaagcccagctcaccgacggccagcgcgaatacgatatcgacttggcccgcaccaacatcatcggcgaacttatggatttggcgtccggcaagctactgcccggcgacgtggatgagatcgaggtgggcaaccgcctagtcgaccgctaccactcgctgtggagcgccctgaccgacaccgacaagttcaacccggacgaaatgtggaagatcgagcagcgcgtcaacaagctcaacgagctgggcttcgacgtggacgagctggaaatgaagaccgccgaggacggcaagcgtgtgctggtccgcccgcgcgtggtggacgccggctacgccaaccgcaagctgctgcgcctcaccggccttgacgtgcaggagaaccaggcccgtcgtctgctcaacgaccttgacgcctaccgtgcctccacgtggcgtgagggcgaggatctggaaatcgtggccaccgactggatgcgtgaggtgttcgagccgaccgtgcgtatgattccgcgcgaatatcgctcccagatcgagcctgctcagttcttccatgaggtgcttgaccatcgctggttcctggcggagaaggccggccacgacgtgccgatgggcgaggccgtgaccagctacatcgacaacgctctgccgagctacagccttgactccaaggcactcgccgaacttaacgaagaggccgattccggcgtcattgacgacgaatccacctacagcgacccggacgacgacggctacaaccccgatgacgatccggatgcggcagtgtggagtcattaagcggacaatccggtggactgtctgtaggtgagcccatcacacaaagaagcccctcaaatagaggggcttccgtgtatgtacaacctattacggcctcaagcgacaatcactccgccgcagccttgcgccgtgcgttggacaccgcgtacaggctgatacccgccgccactgaagcgttcagcgactcaacagacgagctgatcgggatgccggcaatcgcgtcgcaggtttcgcgcaccagtcggcccaaaccgctgccttccgaaccgagcactacaacgagcggatcggattcaaagccagtctcgccgacgagcttatcgccgccaccgtcaaggccgacaacgtagtatccacgctccttcaagccctcaagtgccttagtcaggttcaccacgcgcgccaccggcatatgcgcggccgcaccggcagacaccttccaagcggcggcgttcactgaagcggaacggcgttccggcagaatcacaccattggcaccgaatgcggccgccgaacgaatcacggcacccaggttctgcggatcggtcacgccgtccaatgcgataaacagcggtcgcgcagcaatacgggcggccgccgaattcgcggcctccattgccttggccttcttctcagcacgatcggccagctcgttcagcgaggagtactggaacggatcgaccttcagaatcacgccctgatggttgccagagcgggcgatacgatccatctccagacgatcggcctccagcatgtgcaggccgttcataccagcgattttcacgatttcgcgagtacgatcgtcatgttcaatacgagacatgatgtacagcgtggaagaaggtacgcctacgcgcagtgcttccagcacggaattacggccgtacaccagatccgaagtatccgccgaagcgaacttgtccactcgacggcgggctgccagacgcgggtcggccatctgccgacgttcggccgctttcttggccttgtacgccttgtgatagacgcggtcctcggccttgggagtggggccgtagcccttcagtttgttgcgatgcttgccacccgaccccttggtcggtccttttttgatagccataggtgctattgtcccagcaccccgcgccaaaacgcggctattccgccgtcggtagccggtaaggtattgagagtgaagaagcagcgtatgatattcggactgtccctgctgtattggggattatggttggcgattctgattctgtggatgggtcgcttcgtgacctcattcttgtcgatatatttggtttccgcgctgcgcctcgatgagggtgtggtgggcacagtcgtggccatgtacggcttcggcgcaatcatcggctgcctgttcggcggtaccttgtccgacagattcggccgccaatccatgattatcatcggcgaaatcggcgcagcggctgccctgctggtcgtttccgtactcactgatcctgtgtctttaggcgcggctctgttcgtctatggtgcgttcgcctcgctgcccagcccggccatcgccgcgtatatcgcggatgtggtgcctgccgaacgtcagcaacgtgcatacgtactgcaatcgtgggcgattaattttgggtacgcgattggaccgattgtggccaaccagctggtcaagatctcgtattcgctgatgttctacgttgaagcggcggtgatgatagccgtcacgatattgctgattgcgttcttccgcgaggtgcggcatttggggattactgtatcggtgccaagtgcggtgcgccatgaagacgaatgcagtgttacccatgcggaattcgccggcattgagaggccgaatcactcggatgccgcaccggctgccagtgtcaagggcgccatgtctcgcaattggcggcgcgtgctcaccgatactccattcctcggcttctccctgctgatgttcggctacttccttgtgtacttccaaagcacctccggcctgcccattgccatgacggaccttggtctagggctgggcgagtattcggtgctgctcaccatcaatggcggtatgttgtgcctgctgcagattcccgcgatgaaactgttcgcgcgcatgggcaattcacgcgtgctggtgatgggcctcgccgtaaccgtcatcggctatgcggtgcaggccgcggcccattcttggggcggattcgcgcttgccgtagtgctgtggacgctgggtgagctgggcacattccctatcgccaccactacggttgccgccatggcacccgcgtcggcgcgtggcacgtatcagggcgtctacaacgtagtgtggtcggtgtcggttgcgctggcgccgctgattggtggctggactatcagcaacttcggcggtcgaacgctgtggatcgcctgcattgttgtgttgattgccgtgaccctcggtctcaagctcaccaaaggctcgcgcgaccgcgccatggcccgcagtcttcacgattcgctgtaagtgttattcggtttggagatacgggcaagaccgcatatggcgagtggttcttatcgagaactattctctgcgcgtatgatgtatggcatgcaatacattcaacaaaccatcgttggcattgatggcagcgaggcgcgattctttggctatgtggccgacaacagcgaggagatggaaccggaccgtatacgcccggctatcctgattttgcctggcggcggctacgccatgacttctgaccgcgaagccgagccagtggccctgcaattcctggccaaaggcttcgccgtattcgtgctgcgctattcggtgcagcccagccgctatccggtggctttgctggaggctgccgaggcaatgcgcctgattcgcgccaatgcggatcagtggcatgtaaaccccgcgcaagtggccgtactcggcttttccgcaggcgggcatctggccgccaacctcgccacctcggtcggcgacgaagacatccgcgaacagggcggcatggacccggacgccgtgcgcccgaacgcgctgatgctctcgtacccagtaatcaccgccggcaagtacgcccatcgcggcagcttccaatgcctgctaggggaccaagctcacaatcaggctttgctggacaagttctccatcgaaaagcacatcgacgccaaaacgccacccgtcttcgtctggcataccatgaccgacgacgccgtgcccgtggagaacacgctaatgctcatccaggcctgccgggccgccggcgtgagcattgaggcgcacctgttccctgaaggcagccacggcctgtccttggccaatgcggaaactgccggtaacggcttctatgcgcacatcgtcgaatgcgtgcagtgttggcctgatttggctgaggcctggttgcgtcgcctgttctaggcaaaacgctattacgctgtgcgccaagtgcgccacgcggttatggaataatggcaatcgtatgcatcggcagcagttgcgccggtgtccataaccgcgcagtcctgtgcgtccagccgggagagaaaacccggcagcggccgcaaggctgactactccgcggcaataccaaggagaacattatggatgatctcaaagatcaatccgcagtgtccacgaccgcaacgaacggggtcgtggaatcggaagaggtgcgcgcacaggaagcgctattgggggataccgatccaagtctgaccagcgccgacgacgtggccaaagccctgaacgtcgacccatcccacggcctgagcgaggaagaagccaagcgccgactggccaaattcggcccgaacgagctcgccagcgccccgcccgtaccgaaatggaagaaattcctggcccaattccaagatccgctggtctacctgctgatcgcggccactattatctcggtgatcgcttggttcatcgaaaaagccaatgcgcagcccggcgcggaaggcggcgaagtgctgccgttcgacgccatcgtgatcatcttgatcctgattgtcaatgctgtgctcggctatatgcaagaagccaaggccgaggcggccgtcgaagcgctcgcacaaatgacggccccgcagacctcggtgctgcgcgatgacaaggtcatgcgcatcaacaccgccgacgtggtccccggcgacatcatcgtccttgcggaaggcgattcggtctccgctgatggccgactggtcaacgcggccagcctgcgcatcgccgaggcttcactgaccggcgaatccgtgccggttggtaagaagccggacacactcaccgaagccaaggcgctgggcgaccgtgccaacatgatcttcaacggcacttccgtgacgcaaggcaccggccgcgcaatcgtgaccggcaccggtatgaacacgcaggtcggcaagatcgccgacatgctctccgccaccgaagatgagaaaaccccgctgcaaaaggagatggattacgtctccaagatcctcggcattgcggtgtgcgtcatcgctgtcgtggtgctggtggcgctcgccgtgctggaaggcttcaacgacgtccatgacgtgattgattccttgctgttggccgtctcgctggctgtggccgccgtgccggaaggcttggccgccatcctgaccgtggtgctggcgcttggtgtgcagcgtatggccgcgcacaacgccatcgtcaagaaactgcattcggtggagaccttgggctccgcttccgtgatctgctcggataagaccggtacgctgacccgcaacgagatgaccgtggagcgcgtggtcaccccgtccggcgcagtgcagatcaccggcaccggttacgcgccggaaggccgcatggttatgaccggtggcgtcagtcctgaatccgagcaggcccagattgtggccgatgaagtcgtcgccacgcttgtggccggcacgctcgcgaacgacggcgaactacgcgaggagaacggccgttgggagattgtgggcgaccccaccgaagtctcgctgatcgtggccgcacgcaaggtcaaggccgatcgcaagatcaagcgctacacgcgcgttggcgagattccgttcacctccgaacgcaagcgcatgtccatcatcgccaaggacagcaccgattcagacaagctcaccgtgttcgccaagggcgcgcccgacgtgctgttgagctactgcacgcgcatccgcgtgggtggtcaggtccgtaagctcaccgaaggcgatcgccagtcgattctcgccaccgtcgaacgtctctcctccgaggcctaccgtacgcttggcgaggcctgccgtccgctggaaaccagttctttggctgatgtgcccggtgtaagcgtcaacgccgcaggccaggtgtccgacatcgccgatcaggccgaagccatcgaaaccgatctcatctggaatggcatggtcggcattatcgatccgccgcgtactgaggtgcgcgactccgtgaccgaggcccatcgtgccggcatccgcacggtgatgatcaccggcgaccacccgctgaccgccgcccgcatcgcctccgaccttggcatcatcgccaaggacggcaaggccctgaccggcgaccagctcgaccagctgcccgatgaggccgcactcgacaaggccacgtccgaagtgtccgtgtacgcgcgcgtggcccccgagcacaagctcaagatcgtcgaatccttgcagcgtcaaggcaacatcgtggccatgaccggcgacggtgtgaacgacgccccggcagtcaagtccgcggacatcggcgtggccatgggcatcaccggcaccgaagtgaccaagcagagcgccaagatgattctggcggacgacaacttctccaccattgtggccgccgtacgcgagggtcgcgtgatcttcgacaacatccgcaagttcctgcgctacctgctgagttccaatgtgggtgaggtgttcaccgtgttcctcggtgtggtgtttgctggcttcctcggcatccgccagccggaaaccgtgggcgtcaccgtgccgctgctcgccacacagttgctgtggatcaacctgctgaccgatgccgcgccggcgttggctatgggcgtggacccgcagaccgacgatgtgatgggtcgtaaaccgcgtaaggtgacggaccgcgtgattgacgcctccatgtggggcgacatcatctacatcggcgtcatcatggccatcgtcacgctgattggtatggacatgcacctgtccggcggcttgttcaccgaccgctcggtggatgccatcggccatgaagcgcagatgaccgaggcccgtacgatgggcttcacgattctggtgtttgcccagctgttcaacgcgctgtcctcccgttcgcatctgcagtccgcattcgtgggtctgttctccaacaagtggctatggggtgcgattggtttgtccgtggcgctgcagctcgtggtgatttacgtgccgttcctcaacggtccgttcggcaccgtggcattgagcccgatggcttgggtggaatgcatctgcctggccgcaatcgtgctgattgcctccgaactgcgcaagattgtgctacgcgcgatggccaagcgttaagccatcgcaatagccctgattgtgggcatatagcagtgggccgggctctggtattcagagcccggcccactgctatatccaaacggctcctcatggggcggtaactatcccatggggcggtgatttcctcatggggcggtcgctgaaaacggcattattccgcgaaaaaggaaaatgtgctaaccgccccatggggaagttaccgccccatgggaaacaggagaacgctgcagacctcagttgtggctgccgtcggtgccgtcagtagaggtggagttgtcgccgccgttattgttgtcgctattgttggactcgtcttgagacttctgctgtgcctcttggtcagccttctgctgagcctcttcctgagcttgcttggcggcatctgcctgctgcttggcctgcatcgaggcggtgacgtcggactcggccttctgcagtttagaaatcgcattattgacgtcggattcggacggactggtcccgttcatcaccgtattggcctcggtgatggcgttttgcagcgcggtgcgggtgttttcatcggccacactgcccgcggaattatccagcgtgccctgcgcctgcgaaatagccgagctcaggttcgatttcagtgtgttggtatcggccgtcgcctttgaagtattaacggccttgatcgcattgttgatggcatccgtcttgtcagccatgtcgctggcatcattctgcagctctttagtgtgagacttcaactcagtggcgttgaggctggaatcgcacttggcggtgtcagccggattgccggcgtcttgcaacgcctgattcagcgtggtgagcgtattggcatcggccacatcgctggtggatgtttgcgcgctggtttggccattggatatggcggtggtgagcttcttctgagcattcgtgtactgcttggccgctaccttgcactcggccaatgccacggcttggcttgccttgctgctgttggaatgccaccagagcaggccggcgacaaccagcgctatcacggcgactactgctacggcaatgctgatgatcttgcgggtgttctttttgccgctaccgccgtgacgaggctcggcgccatcggaatcgtcctcatcggagacctgatccaacggaatggagggaggcatcacagcaggctgagcctgtgccgaagcggccagggcggccggttggaacacctgtgtggctgcagcatcatcggcagacgctacttgcgttgccggcatggcaacggtctcaccggatacggtggatgatgcgccgtatgcctgtgcggccgcggtttcggcattcggcatggcctgagcttcgaaaggctgtgttgccatgacctgatcaggctggaacgcttgtgttgcctcggcatctaccgcaggctgctcggcctgattggggtggaacgcctgtgtcgcggcgtttgaagctaccgaaacaggcgatgtcgccggtgccgctggtgcggctggtgctgctggcgtcaccggcgctgtcggttccaccgggcggaagctttgcgtcgtctgatcccaaacgtattgctgctggccgggcgcagcggcgattggtgtttcggatactactggctgcgtggctgccgccggctgtggtgcttgtgcggcaaccgcagccaggaattgcggcgagaacggttgcgtcatggccggatcgatgggctgcgtcggctgagcggcttgtacggtcggcacagcttgcgtgggttgtgaggcatacgctacttgcgcgggctgcacaaactgtgtgggctgtgtgggctgcgcagactgcgcagactgcacagactgcgggaactgcagagccggtgtggcttgtgccgtgggttctgtgctatatgctgccgtctcttgcccgggaatcggaggaaccgttggcctgaccggcttttcgggctgctggaagtcgaactggaacccgccatcgctgttggtcatgacatctccttgggattaagcaaatggccggcatccgccggccgaatggtacgtcgcaacgctcagtcgtcgatgtgcgcgcggtagaaattctcgtaggaacggctcggcgtcggaccccgctggccctgataatgcgagccggtgcccttggagccataagggtgctcagcgggcgagctcagctggaagaagcacatctggccgattttcatgccaggccatagtttgaccggcaacgtcgacacattagacagctcaagcgtaatatgcccctcgaaaccggggtcaatgaagcccgcagtcgaatgggtgagaatccccaatcggcccagtgagctcttgccttccagacgggcggcaatggacgggtccaacttgacgtattcccacgtggaacccagtgcgaactcgccagggtgcaaaatccacggttcgtcgggagccacctcgaactgttcggtgagcgcgccttggttttccgccggatcgacataggtgtaggcgtggttattgaacaaacggaagtaccgatccaatcgcacgtcgatggaagcgggctgcaccatttcgggggtccacggatcaagtgagatatgacctgcggactgtgcggcgagaatgtcgcggtcggacagcagcatgtgaaaaactccttgggcaaataaatactgccttcaagtctagcgccttgggcggaaacgtgagaggctcctcacgcttccgcggtccatcaatcgcaagtattctcaggtttttctcagagaaacttagaggtagacccagaaagcagtggttatataaaagatgtcagcggaaagctgatcaggagccgcagcagttcccgacaattgaaccccctttcttcttctctctcctttctctccccggcgggcaaccgccggggttctttttgtgccctgaatcattcccccgaatgaccgccattcccaagccatagcggtacactagctgtgtaatcggcaggaaggggggcaccgatggcccgcaacgatgaggactacgatttcttcggcgatggtcagtatgacgattcgcgcagctcacgtcgtgcacagaatcgacgcccatccaggcgggatgccggccggcgattcgccgctacaaaagccagcagcccaacgtcgatattgtgccgcagacttgccgttgtcagcggactgctagccgtcgtggtatcggccacctcggcggttcatgagatcgcgccttacgccatttcctttatgacggcagtgccaggacgatacattgcgttgatggcggcggtgcttatcggcatcaccctgattctggtcatcgctgcgcgagtcaccatgcctcggtacgccactcacgggggagtgggcgcgggcggcatcatcgcactggtgtgcgccatagtttgcttggttatcggcgtggccgtgggcgtattgttcccggaaggactgattcagcagtcgaacgacaaggcacccgtcgaagataccgcacagatggagcaaggcatcgaacaagctgccggcgcgtgcaaagaaggatggcaggggcttgatacgggcggtttgccgggcatcaccaccgtacagatgtgcactgatccgagagtggccttcgtatcctttgaatcggaatcgtccgcagccatcagccgggcacctatcgaaagcaagatttccgaactgctgagccaatacgctgataatgagcaaacgaaaggtgattggcgattgctgaacggcaaacgctggatggtgttcggcgaggccagcaagatgaccgcactgcagcagcagtggggcggcgaacttgagacaatcaccgcagccgcagataccgcagacagcggtaacgcctgacagattgccggtatcccttgaaaagtcccaaggcgattcggcgcggattacccaatgtgattgaaatcatggtccatcgttttccgcacagcgcgcaagacctctatattggaatggtatgagcaaagaagcgaatgccagccagcctctgatcggccgcgaatccaccactgtgcccggacgttttggcgagccactcaccgtggagcacagcgtcacctcgcgcggcggcttcgaccagcatgccgcgcatccgctgttcctgtgcctgcacggatggggatccagcgaagaagacatggcggacatcatgcgcctcatcgctccatataacgatttcgtggcattgcgcgggccgctgacactcgcgccggcccgtgagggcagtctcgaccccggcaactacgcgtggttccacgatgccctgcctatcggcgatgatcgtgactacgacgcgtatgccgccgccacagcagtcgaccgatgggtggccgacaacattcccgccgaccgtgacgtggtgccgcttgggttttcgcaaggtgggctggtcgccgtgcatttgttgcgtatcaatcccgagcggtaccgggccgtcgtctccctgtccggcttcaacgcacccggtcaggtgcccggcacggcccccgccgactctcgcctggccgattatgatatccccgtgttctatacgtacggcaagaacgatggcgtaatcccaaaatacgaactgttcgccaccgccgcttggctggaagagcatacgtggctgaaaaccaagagctaccacggtctggatcacaatgtgagtcttgaggagttcgccgatttgcgccagtggctacttgacaacgacattacctctggcgtgctgtagtcagccgccatcactggaattggcgcggccgtcgcagcaatcggacatcgagggcgcttgtggctgactcggtcatagactgttctcccatgagcgaagtgagcactgcaagcactactgcacatactgaagagaatcatgtggacgagtccccgcgcggcatcgcggttatggttgtggtgggcgtgctggtcgggctgttgtccggactgttcggcattggcggcggcaccatcatcgtgcccgcgctggtctggctcggcctgacccagcggcatgcggccgccacttcgatgttggcgattgtgcccacctcggtgtccggcgttctggcctatgcggttgaaggcaatgtggattggattgctgcgctgctgatgttcctgggcatgttcatcggcggtcagattggttcgctgctgttgtcccgactgccggaagtcgtgctgcgctgggcgttcgtggtgtttatggcgtttatcatcgtgagccagcttatttttataccttcgcgtgattcgtcaatcgaatttaatctggttactgtcttgctgatgattgttttcggcgtgctcgccggtattttggctggcttgctgggtgtgggcggtggcgcgatttgcgtgccggctttgtcgatcctgtttggcgcgtccgatttgatcgcgcgtggtacttcgctgttgtccatgttcccgaatgccatgaccaccaccgtggccaatgtgcgccgcaaaatggtgcatgccaaagccggtctgattatcggcattgtggcggcactgaccgcaccgctgggcacttggattgccggggccatgagcccgcgtgccggcggaatactcttcgcaacctatctgacggttctgctgattcgcagcatctgggtagccctcaaagtcacacgggaatagcaatccccaacttggctcccctcagagaagggagccagggaaactagatgccggaatcagcgtccacttgcataacgtagatgttgcgcctcagggagcgggcttgggctcggttgatgtcgccggcttcgtacatgtcctgaatcataccgagttcgataccgtagctctcgcgctttacgtcctcgacctgcgtgatggtttccgtagtgccgctcatggtcggacgtgcctgcaatgaagcctcggcacgacgataatccagcaacagtgccgaacaatgctcggtgttgtacgtatcctggcccatctcgtcaataagccggccgataacatgatgaatcgcctcgacctgcagttcgcgggtgcgcgcgaaaatctggtcctcgctcaccaatggtgtggtgtggcgaatcttggacaccgtgcgtttggcgtaattgctcatctgccgctggaacatgcgtacacgaccgcgaatctgcgataccgcgtgccccgaagtcggatcagtggaagtgtgacgcaacgtattcataatctggtcaagcatgcgctcgcaggtttcgacgttcagctcttgcgtggccgtatccgccgccggatgtgctttggtgtcggcaagccggtcgcgcacgaattccttttcccaatgcagcgcttcgatctgcaattgctcgaatccctggggatcggtatcgccgatgcgctgctgcaatcgcccgatgcgcttggtgtactggtcgattaccatcagaatcgcacgacgattctctggcgtgatgcgtccggtcaattcctccaccgtggcgcgtaacacatcgatggtcaccggaattatttccgcgctgggatccttgccacggttcggagccaatagcggtaacaggaagttggccagcagcaaggtcacgataatcacgcctgacgcaatgaaaatcagctcgtcacgcatcgggaacggcgcaccgccggcaatgtaatacgggatggtgaacatcaatgacagcgtgatggttcccttggggccgccaaaggtcatcactgcggccgagcgccagcgttcgggtgtcattttgcggcgctggccggagattgtatctcgcgcaacgcgcagcatggccgcaatccagaagaatcgaagcgcgattaccaccagagtgaccagcagaataatgccgatcagcgcgatattgctgatatacgggtcagaccagctggccatcatggcgcgcggcagctgcatgcccagaagaatgaacaccgcaccgttgagcgagaaactcagcacaccccatactgaagtggaaacgatattcgtgcgtgccacattcggccccacgccggtgcggtcgaatcggatgaacaggccagcggccaccaccgacagaatgccggacacattgaattcctccgcgcccaaatacagcaggaagggcaggaacagttccatcagaatacgtgtggtggtggtttcccagccgagggatcgcacggtctcgaatagccagttggccgctgctgctatcaccaggccaaataaggtgccgccaaagaaggagatcacgaattcgccggcggcctgccccacggcgaattctccagtgaaggcggcggccagagcgaactggaagccgacgatgccggaagcgtcattgaagagtgattcgcctttcagcacgctgcgctgacgctgcgtcagcgaggcttctttaccgagggagctgacggccaccgcatcggtcgggccgagtgccgcgccgagtgctaaggctgaggctaaggtgatggacggccagacggcatgcaaagtgaatccgaccgccgccatcgtgacgatagccagtccgatagccagcgataggctcagatccagcgttttcagcaacgccgacttatcgatttcgtgggcttccaaatacagcaatggcgcgataaacagcaccatgaacagttccgggtcgagcgttgcatccgggaaaaacggcagatacgtaaccagcacgcccagcacaatctggaccagcggcgtggagactttgggcacgaagcgactgacaaacgagctcaccaccaccgccgcaatgatgcataggatgagctcaaataccgccatgttgccgccttctcccttaaatttttctccaccaaaagtatatgggaaccatgaagaaaacgttaagcttgcggccgattatgcacatcatgagacgatatgagaaaaggcatacactcgttggtatggaatatgacgaggcgatgcgccgtgcactggaactggccggtcaggctgcagccgctggtgacgtaccggttggtgcggtggtgctggatgcggccggccagattgtcgggcgcggatacaacacgcgtgaggctgatggtgacccgcttgcccacgccgaaatcatcgccatgcgtcaggcggcccaagccttgggcgcctggaatctcgccgattgcacgctggccgtcacacttgagccgtgcccgatgtgcgcgggtgcctgcatccagacccatatcggcaccatcgcgttcggtgcctgggatcccaagctcggtgcatgcggttcgatttgggatattccgcgcgatccgcatatcggccatagtcctgaagtgcacggcggcgtgttggaaggcgagtgtcagtccatcctgactgatttcttcgcccagcggcgatagacacggacgcattacttacctcacgcaaccaacacgcggcaccaaggcaacatattccatttcttctaccatcgaaaccagtagtgcaatgccaatccacacacgtcgaaggagacaatatggccgagaacacctcgactttcaccggtgccgccgctgacggtaccgcactcaccgccgtctacctgacccagcccgccgccaatgtggcgatcggtctggtgtttgccggcagcgacctgccgcacatcgtccactggggccgcccgctggccaagcccgacaccctgctggccgcctatgacgccctgaagccgcagcgcgtgtccggcgcgctcgacgacaccgcttggccgtccatcctgcccacccaggccgaaagctggatcggcgagcaacgcgtggtgctgcgccgcgccggcgtcgagctcttccccaagttcaccgtgaccaacatcgagaccggcggcgtgctggaagccaccctcgatgccgtgtccggcgaaagctacaccgatgtggccggccatgcccgcgccaccggcccggcccgcgtgcccggcgtcatagtcgccgcgcgcgatgaggagcagggcgtggaagtcgaatggcaccttgaactgctccccggcggcctggtccgtcagaaggccaccgtaaccaacctgttcggtgcagacgccggagccccgctcgagatcggcaagatcgagctcggcttcccgctgcccgaatccgccggcgaaatcctcaccaccaccggtcaccatctacgtgaacgcagtccgcagcgccagccgctgaccgtcggccgtttcgaaaagccgcagctcgccggccgccctgacttcgacgcatccctgctcctgaccgccggcgtgcccggtttcggcttcgagcatggcgacgcctattcggtgcacgtgggctggagcggcaactccgtactgtccgccgaacgtctgccctacacgaccggcgtaatcggcggtggcgaactcctgttcggcggcgaagtgacgctcgccggccccggcgaaggccagaactcctacgacaccccgtggctgttcggctcctatggcgatggcctcaatgagatcgccgcccgcttccactcctacgtgcgctccctgcatccgcgcctgttctcgcacggccgtccggtgatcctcaacacgtgggaagccgtgtacttcgaccacaacttcgatacgctgaaggcactcgccgacagggccgccgactccggcgtggaacgattcgtggtggatgacggttggttcggttcccgccgcgacgacacctccggcctcggtgactggcagattgcgcaggacgtctggcccgatggtccgaagtcactgaaggcgctcgccgactacgtgcacgccaagggtatggaattcggcttgtggttcgagccggaaatggtcaaccccgattccgatgtggcccgtaaccaccctgattggattctctcgcccaccgctggccgactgccgctgcagggccgcactcagcaggtgctcgatctgaccaatccggatgcgttcgactacatctacggctgcatggaccagcttgtcggcgagcttggtatcgactacatcaagtgggaccacaacaagctcgtcaccgagcccggttcccgccgctccggccgcccggccgtgcacgcgcagacccttgccgtctacaacatcttcaagggcctcaagaccgcgcatccgggccttgagatcgaaagctgctcctctggtggcgggcgcgtggatctcggcatcctagagcacgccgatcgtatctgggtctccgactgcgtggacccggttgagcgcgcggacatccagcgctacacctcgctgctggtgccgccggcgatgatgggcgagcacgtgggcgccagccccgcacactccacccagcgcgccaccagccaggaactgcgcatggccatggcgttcttcggccacatgggcatcgaatggaacctgttgaaggagccggacgaggcgctcgccaagctggccgtgtgggtggccgaattcaagaagcaccgcgactggttcgccatcgacacctgtgtgcacgccgactccaacgatccggccgtgcgtctggacggtatggtgatgccgaaccgtgacgccgccatctaccgcttcacccagctgaccaccagccagacctatccggccgcgcccgtgcatctgcccggacttgaccccgagcgcacctaccgtgtcagcccgcttgacccgagcttggatttgaccggtctgaccaacggccagagcactctcggctggtggaacgaggaaggcgtagtcctgaccggcgaagccctgcagcgctacggcattcgtcccccgtccctccacccccagcaggcagtattgctcaaggctgtggcgttaagctgacagcctagtaggctgtcagtagccacggcctgagcgaagcgacagctgagcgaaggtgggattgagccttgccgataggcaagtccgtaattgctggtcgtggcggagtaactgtggcgaagcaacgttcttggctcccctctctgaggggagccaagaacggcctacccaatatgcttcacaatcacgcgactggcggcggctttggcccagagctgccagtcgtggttcataatcgtgaacttgaccggctgggtctggctgtgacggtagaaacgaatgccgtcacgtagcgaatcggtgccgagcttggccaaaaacgcggactccccggcaatcagcacatgcccgggcatcgcgatgttcgccaccgtagccaccagcgatcccaaccggaaacacgtccggttcaccaactgcgtggcctgcggcacgcgtcccttggcatcgcgcgcaaagtcctcaaaactgaccgcgcgacccacaatcgcagagtactgttcggcgatcgaatcgtcagtcaagcattgtgaacagccgatatgtccgctggtgcagcgcggcccctccggatcgataagcacgtggcccaccagaccatagctcttatccgggtactgtactggcttgccgttcacggccagcgaataaccaacacccacaccgatggtcaccacggcgaacatatccacgccgacacccggcccgaaccaggaggcatccaccagcagagaatcgatatcattgaacaccccgcacggcaggccggtcgcctctgtggccatcgtccccaagtccgtggccccgtcccaatgcaggaacggggcgaacgtcacaatcgaatcgtcgaccacatgcccacctaccgcaacgcccaccgcagtgggggagggtagtccggaagaggcgatatcggcggaacattcgcgcaccagccgcgtgatggccgacaccacatactcagccgattgatccgccccgatcggcacctcgtgccggccggacaccacctcgccatgcgcgttcaccgcagcggccacaatcgacatcccatgaaccttgacaccaatgaaggtgcgtgcgttcgaacacaacaccagcgaagtctgcgggcgtccgcgacgatccgaactttcccttggcgtgaatcgctcgggcagcttgcctgacgggccggcctcggccggaagctcctcgatcaccccggcgtagatcagatcgctggtgatgcgggacaaggccccttggctcagtcccagcatctgtgccaacgtagtgcgggctatcggcccgtattgggcaattgccgccgccacgcgatgcgtatgctcggatccggaaaaccactgtggaatcgcgttggcatcagacatgcaagcccccctcgctgtatttattgcgttaatcacaaaataccgcgctttttgttgcttgcgcaagtgggctcgctggcgctgggaatgaaatggccgaaccgttatcttagaaagtggaagaaccgccggcatcgaagccggaggaaaagaaagataaaggagtcaacaattatgctgtccgattccccacatgcaacgcctagactgaagcgtctggccgtgcgcaccgccgccgtggtgtgcgcgattgccgtcggcttcggtctggcaggctgcggctccagcaccgcaggcaccgtcacgctggatttcttccagttcaagtccgaggccgccgaccagttcaagtccatggtcgccgattttgaaaagcagaacccgaccatcaaggtcaatatcaacaattccgccaacgctcagaccgatctgcgcacccgcttcgtgaagaatcgtgtgccggacgtgatcaccttcaatggtgacatcagctttggcaacttcgccgcctccggtgtgttctacgatttcaccgacgaacccatcgtggataccctcaatcccggcatggtcgagatcgccaagaatctggtgcagaccaccgattcctccaagaagcgcctgtatggtctgccctttgccggcaacgcctccggctacatctacaacaaggctctgttccgcaaggtaggtctcgacccggagaacccgccgaccacctggagcgagttcaccgatatgctcaacaccttcaaggacgccggcatcaacccgctgcagggttccgtggccgacgcctggaccacccaggcaccgctcgtctccctggccggcacgctggttcccgaatcgaagtacaccgagctcaagcaaggcaagaccacgttccaggaactgtggaagacctcagtcgagaaggaatccgagctcttcacctactccactgcggacaccggcgtcacctaccagcagggcacgcagaacttcgcccaaggcaaggccgcgatcatcccgctcggcacctacgccatcccgcagatcctgctgatcaaccccgatatcgaacttggtttcgcccagatgccggccaccgatgacgccagcgagcagatcctcaccgccggcgacgacgtgatgctcaccatcggtgcgaacaccaagcaccccaaggaagcgatgaagctcgtcgaattcctcatgcagaaggatcagcttgacgcctacgccgacgcccagtccgccatcacgccgctgaaggacacctacttcggcaacgatgcgctggaaaccgtgcgcccgttcttcgaggaaaaccgactggccgacttctgcgaccactacattccttcgtccatcaacatcggcggctacctgcagaccatggtgacctccggcaacaccgaccgtttcctgaaccagatgcagaccgaatgggacaaggtccaagccaggaccttcgagtgatcggtaggagaggagaacatcatgtcacacgcaaccgcaaccaagaccgctgccaagaaacccgccaagaagaaggtctccgccttctccacccgcaaagtggaccccgcttactactggatggtggttccggcggccatcatcttcgccttcttcctgtacctgccatttcttgatggcgtaaagtattccttcaccaactcgcagggctacggcgattacaagttcatcggactgaagaactacatcgccctcttccaggacaaccgagtgggccatgcctacctgttcacgttcctcatcgccatccttatcacggtgctgattaatgtgattgccctgttcctgtcggtgctgctgaactcgaagatcgccttcaagaatggcttccgagccatcttcttcatcccctacaccctctccgtgctggtcatcggctacgtgttcaagtacatcttcatgaaccccctgcccgagctcggcaaggcgctgggcatcaagtggctgtccacctcgctgttgaccaatgagcaactcagctggatcccgatcgtcttcctcgccgtctggcagggcatcgcctactcggtgctcatctacctcgccggcctgcagaccatcgacgatgaaatctacgaggccgccgccatcgacggcgtcaatgcctggcagaagttctggaagatcaccttcccgctgatcggaccgttcttcaccatcaacctcgtgctgtccatgaagaacgcgctcggcaccttcgaccaggtcgtcgccttgaccgagggcggcccgaactcctccaccgaaaccgtcacctacctcatctggaagggtggcctgaccggtggcgagtacgcctaccagaccgcaaacgccgtgctcttcttcatcgtgctggcgatcatcgccttcgtgcagctgcgcatctcccgcagccaggaacagatctgatttaggggaggataagaaatgactactgcaacagttaccccgtccaagtccggcaagcccgccaagttccgcagggaccacaagatcaactggtggctgaccgccgccgtggccgtgctgagcctgaccattctgatcccgctctacttcaccatcgtcaccgcgctgaagactccggccgaagccggcaccttcgccctgcccacctcgtggcagtggcataacttcgccgacgcctccgccaaggtcaactacccgaaggccgcgctcaactccgcgatcatcacggtggccgccgtggtgctcaccctgctgaccaacaccttcgtggcctacgccgtggcccgcaacatggacaagcgcttcttccgcttcctgtactacttcttcatcgccgccatgttcgtgccgttcccggtcgtcatgctgccgattgcgaagcagatgggctccctgcacctggacaaccaggtcggcctgatcattctgtacacggtgcttggtttgggcacgaacctgttcatcgccaccggcttcatccgttcgattccggtttcgctggaagaagctgcccgcatcgatggcgcatccacctggcgcatcttctggaccatcatcttcccgctgatgagcccgattaacgccaccatcgccatcctgaccgcgctgtgggcctggaacgacttccttctaccgttgatcattctgaccgatcagtcgaaccagaccatcccgctcgcccagtacgtcttcagctcgcagttcgccaccaactacccgatggccttctccagctacctgatggccatggccccgatcctcatcgtctacatcttcgcccaaaagtgggtcgtcggtggtgtgatgaggggagcggtgaagtaaaacagcgcaggcgctgctttacttcaccgcgtcgagcgagacgagccgattaaggaaacagccccgtgggctgtttcccggcccgggcggccggataggtcgcgtactcgcgaggtcatgttgggtctggccgtaggccagtcctgaattgcaggactctgtgaagtaaaggtccgcttccacccaagcctcctccggctctcaccggaggaggctcttctgtcctgttgccatactggaaaccgccacaataaaggcgacggtcggttgatgtggcggtggcgcacaaaggtcatgtggttttgctcgttgtgcgaatgaaaaagtgacgaaaccgtacggcttacggtgcaattgagcgcatctgctgtgtcgccgtgccactggcttgtcccggtccacatatcaaccgtttgacgcgcgaaccgggacagaatccgctgtccaggttcgcggtttcgggcgattttcacgaaccgggacaattttcattgtcccggtatgaatgtcaatcgttttatgtgaaaaccgggacaacatgttgattccgggatcggctctattccgccgattttgtattacggagcatatgacctgcggagattggcttgtccctgtttgtaaaaaaggacaaaaatcgcgaaccgggacagcggattctgtcccggttcagacggcaatcgattgacatacgaaccgggccaacgccgaagtccggagcggttcccgaggcggggtttgcttgaaatccggtgtgccagcgaaatccccaccagattcccgcaggcgtgtcaactaaatcatctatccccgcaccagtgggttcaagcagacaatccaagcgcgcccgaagttgctcttgcgcgtcgcaatcagaagaaccgttaatatgtgagctgccgcaggtcaggtagattatggtggcgaagtggcggcggaacaagcgggcgagctccttcataggttcgagcctcgagtgcatcatccacgagcacaggcgatatagccacacccacgcctcgaacaggagcatggaccctctgccgggctcgaagccgatcgtgatgtgcggctcccgcccgtcgccgtcggcgtcacggaagtccgcagacccgaccctccaaggcgaccgcagccgaagcgcggcggtgaacaggtgagaggcatccatgcctccagcctacccgaccaacatcaccccacggcacagtcacccaccacaaacagcgaaagggcccatatgttgctaaatagcatgtgcagcttatgagaattgagccgtagcagtgccttccggctctttgcagtttttgtttccggcacaccaacgcagttccccaatggaaatgtaattcagcgctttttagactatgagcaacaggcaatgtagaccataaataatggaggagccaacgatgaccacttcacaacgcacagtaattccagattccatccgcaccaacggtgccaccccaaatccgtggtggtccaatgcggtcgtttaccagatttacccgcgttccttccaagacaccaacggcgacggcctcggcgatctcaagggcattacgtcacggctcgactatctggccgacctcggcgtggatgtgctgtggctatccccggtatacaagtctccgcaagacgataatggctacgatatttccgactatcaggacattgatcctctgttcggcacactcgacgacatggatgagctgctggccgaggcccacaagcgcgggctcaagatcgtgatggatcttgttgtcaatcacacttccgatgaacacgcctggtttgaagcgtccaaaaacaaggatgatgagcacgccgactggtattggtggcgtcccgcccgtcccggcaccactgccggcgagcccggtgccgagcccaaccagtggggctcctactttggcggttctgcatgggagtattgccctgagcgtggcgaatactacctgcatcagttctcgaagaagcagccggacctcaactgggaaaatccggctgtgcgccgcgcggtatacgacatgatgaactggtggcttgaccgcggcgttgacggcttccgcatggatgtgattacgctgatttccaagcgcacggacctgt

SEQ ID NO: 930 - DNA, 15646 bp, Unknown
  gut microbiota DNA sequence
gtaaaggaaaagccgccatccgttccgcattcatatacggcaaacgattcgcggctttgcgtaagttgatggctatggtgagcgattcatgcgacgtcgactgcggatgggccatcggtacatcccggcataaggcgtgtccccgctacaccagcatcgagaatagggccattcgtggattggcaaacagaacattgccgacaaacgacccacggcaggcgcgtgcgatgaacatcgcgtagcgatacaggttcatggcatctccttgatggggtcttcgtacggcagacatcgagaagcctatcatcattcaaatcgacggtgaaacccacgcatgcctgacaatacacaaaatcttcacaaaaggattgggcttaccgcatacgctccgcctgaataacggtccggggatgaatcaggggcgagctaagggttgcatctcgtgtttccgtcatgatttctggcaaaatagtgaagctgaacatgcgcggaatcgaccggaatcggaaagggactaatcatgcgagttctcggcaatatcctgtggatcattcttggtggattggccatcgcaatcggatgggcattggtgggactgattctgtgcatctccatcatcggcatcccgttcggcattcaagcgttcaagatggcgggactcaccttgacgccgtttggcaaaaccgtgcaatacggcggcggagtcggctctgccttggccaacatcctgtgggtggtgctggtcggctgctggatggcgctcggctatctgggtgcaggcgtgctcaactgcatcaccatcatcggcattccgttcggcatccagtcgttcaaaatggccaagctcgcgctctggccgttcggcgcacagatctacagtctgtaacaattgtttctgcagtaggtccggtgcagcgcattatcatcgtgcgttgcaccggacttttttatatacaacaggcatttcacacaccgtgatttgacggattcggacgtaagaccttatggtgtgcacaccatgattcaacacatcgcattcagcagcaacggcgtgaacgaacacgccaagcgtcagcagatgaacctgccggcgatgctcgaatgcgccttcaaacagggtttgcgcactgctcagttccagccaataaccggaaacaagcgcagcctgctcgctgccatacaaatctgatcagtacacctctcattggcgcatagctgaatcattgccggtgatatcgagccgactcgttcgcaccatgcctcataaacgcacctgcacgagcatgcgttcttggcatagtcgcaactcaatgcaccgcagcaaaacccattgcataccatcacatattcagaaagaacaacagatcatgaagtatttcactactgacacgcatttcgggcatccgctggtcagcgtgctgcgcggattcaccacgttcgaccctgggcacacgcagtatgacgctctcctctcctcgcagggacgcaaggccgccgaggattgggcgaagggcgtggtgcttgacgattcccggctcaatttccgcaaggccgcagacaccgatgcgcacgatgaagcaatcgtggccaatatcaatcggattgtcggcgaggacgacgagctgtggattttgggcgatatcggataccgaacatcggtccggcatctgaagagctgcctgcgtcagctgcgctgcaggcatctgcacgcggttatcggcaatcacgatgactggtggctggacgatgcacccgcgcgagatctgttcgaatcgattgagccgaacagcacggcggagctgaccggtctcggaattggccgcccgcaggcaacggagaccgtcaatctatcgcatttcccctaccgtgaggatcttgcctatggctggccggatgatgccgtacgtttccgcgatcaggcattgccgttcgacggacatcgtctgctgtatggtcacacgcaccagctgtctccggagggcgcacgccacgaagccctcaacgttggactggacgcatggaatctgcaaccggtaagcgaaacacagattgccgactggttccatgcacacgcgaccgattcaacgcacgtatcaccgctggatatgcccgactcccccgggccggcgcccattgactccgccgcacagcaggaaccaggcggctcggtttcggcagccgaatcataatacaagcaatattggggcgagcagaaccttatgccatcgctggcacctgtctcgccccacagcacaacgaaaggagcttggctatggcaaagctcattattctgcgaggactgcccgcttcgggcaagtccacgtgggcacgctcatggtgtgaggaccccgccaacacgtggccgcattgcgtgatttctctcgatgacattcggctcatgatcgccggctcggcacaggtccgaaaccgactgcaatccgagcacggcaagcgattcaatgacatggtggttgccatgggacggcacatgattgccgacgcattggatgcggggtgggatgtagtggcggatgcgcaacacgctaatccccggtatgcagccgaactggcgctactcgctcaacgtcatggcgcactgtgggaaacgagggattttgacgttcctctagacgaattgttgcgtcgcaatgcggcgcgtgataccgctgaccgtgttccggaagattacattcgttcgtcctggaagcattttcacaccgcgatgttccgcccgttggaaccgggcgatccgaatggaaacctgttggagcgtatgcgcgcggacccttacgttcgggttattccggtgcgcggcgaaacagacgtgtatgcgtgcaatttcactgcagaggcatttcgtgaacatcggtggacggatcgcaccatcaatgcgcgagggctttttgtcggcggcaacggtcaggtggtgcaacgcgggttcgagaagttctttgctgtggacgagacggaggagacatcgttcgcccaagtcgtcaatcacgctcaagaacatccagagtcgttgcccgtgcgcgttgagcgcaaggagaacggatttctcgggctcgtgggcgcggcgggaactcctggattgttccgcttctggtcgaagtcggggcaaacggattattccgcgcttatcgagcgcctgtttcctccagattcagcggtacgtgccgaattgtggcgtatgttgcatgagtggaatgtcacggcggcgtttgaagtcatcgatcgcgagtccgaccggcacatcgttggatacgaatcatccgggctgcgcttgctgcatttgattcgtaatgccgaatcgttctccatcgatgccgctcacgaggaaacgttcactcttgccggcggcttcgtgcggccggaaacggtggcgatctgccattcgccggaagaagtcgcccaggcaatcggcgacgccaaggcaagcccgcatgaaggcgtggtgctatattttgccgacggttggatggtgaaggtgaagtcagaccggtacaagttggtcaaggcgatgcgccctcttatgcaacgcgtgctgctgcgtggtcgttccttcaacaagtccggcgacattgccgatttggctcgccgtatcatcgattacgcacacgaacaccacatcgacctggcctacgagcggcaggcattcggcgagcgcgatatcgatatgaccaaggtcaacgacatcgtggaccacgtgcggtgactgctgagttctagcgcaatatcttctgaccaacgtatgtatcacgaaagcatgtgtcgtgaaagcatgtattgcgctagaaccaaatcattctcgtggaggccggataatgaatctctatgctttgaacatgacgcaccatatgccggcatttccttgcgcgaacaactgttcattacgaacattgtactgatgccgttacagaacagaagagggtgctgtcctactttgctgacgacgttgcattgaaactcgactcatgccatgtgttctacactccgaacgtggggatccgaggcgtatccagctacgagcacaacttcgatttcctgttccagcgtagcgctaaccatccggcccggttctgccaggcaccgaaccgattcgacaaggacgccgtgaaagacatcatgttcggttgggatgacacgaagaaggatcccaagcgcagggattcccggctgatagtcatcggcgacgaccggcagacgccgttgcagcgcggcgcgctcaccgcgttccgcaactacggtgtgccgttatcccctactccaaattggaagagcgggctcccgtggaactcgccgcgtagcttccgagccatataaggactcatcccgacgactcaccgcgagcaccgggatgagtccttggttcttgtgttttgccatatgattgagtcatgtcggacgacaatgtccggcacgaagggagaccaatcatgaaaaaggcaatcgcgctgcttgttgcggcgatgttgcttaccggcctgtccgcttgcgggggaagcactacggccgatgcgccggccaaatccgatggcacgtcaaagaccgagaccaataaggaagagcccaaaccccagccggccgatctgaccggcacatggaagcagaccaattccaacgacccgagctcatacatggaagctaccatcagcggcgacaccatcgaggtcgactggatcggcaccgacaccaagagcctctactggaagggcacctatcaggcaccggccgcagccggcgattggaaatggaccagccagggcgacaccgagaccatggccagcgcgctcctcgcctcgcaggatgccaccaaggacttcacctacagtgaggcggacggcgtgagctgggagaccaccgcgctcggtaccaccatcaccgtcaagacggccaagcaataaatcccgtgtcgggcggatcaagccctaaacacgaaaccgccccggtcgctctttgcgagcgccggggcggccctgcgacatatcgacgattagacaatctgtcgcattttcttgactgccgcccacatgaccgtctatcatcatttatagatcagcgacaagaatacacaggtatccttcccctcgaaggatcagctggtcgtattattggattttggcctgtccttcatcgaaagtcggcttcatgccgtcgtcgtcacagcacgactagagttgagacgggccatctattccttctaccattcaggttgcgcccatccgtcgaagttgatggatgctctggtcagaggattgtatttcggccgataatagttctttgatttgaaatatctgctggaatcataaacatcatggaccagcacaatcttcggttcaagaagcccgaagaacttttcgtctcccttctcgtacactcgctggaccgtccatagactgtagtcggcgagcgccaagagaatttcgtgatcatacggttggacgttgaatttggtggtgtttcgcaattcatgcgttaccgtgccgcgacggctgcgctgttgcgcgatgtccacggcatgctgaaggttgaggttcgatgtgctgctgcctcgttccgcgacgtcgagaatcaacggatctatcttccctgagtatttgagtagatgggacatgaggtcggcgtagaattcacgtggttgttcgttgtgcctctgctgatagatcgccggtatcttacggcccacaactactcgtgcggagaagtcgatctcctgcgccatgagtttgaggaattcatagcgtagttccgcaggatctttgctggcatgcgggtagaagccgtgccatccctcctttgttctcttttggacgctgggaaagctctggaagaatttgctgctgttgatctcctcacaaaaaccgtcgatagtcgcacgagcatcgtcgaggggacttttcacatgtacgagcccgatcatgaagcatcgggaaactccgtccatcccgatggaggaggttttgcggccccgcttcccggaatggaaggtcatgtcaccggcctcatcgataaatcgatgatggtcctgtggcccgtctactttctttatgctcatgcggacaagtctactatgcgtcacgttcgtcatttcccctcctcgatgacctgcgcgtctatcacatccctctcgtcgtgcaggtcagggatggctcggtcgaggagcgcggcgagactggccgcgtccctgtgggtgtagtggttggtcatgctgatgctggtgtggcccatgatggcggttctggcgtcgtcgggcatgttggcgcgggcggtcatgctggcggtccagtggcgtgcgctgtggatggtgaccggcgggcggccggcggctttcaaggccttgttccagttgtagcgttcggtgctgctgcgcacggggttgcctcgtgagttggtgaatatgaggtcgcgtgggcctatgtcgagtcgtttgatgcgcgcccacaatcgttgccacaggctcgtggatatgggtacgaaccggtgggcggcgtgggttttgggtgtggtgagccacaggataccgtacaggtgctcggctttgagccaggcgggtatcacggcgtcctccggtttgccgtattgctggatctgctgctgcacgttgatgccgggcacgccgtcgcgttgttcgagctcgtagggcatgagcgcgtagcgttcgccttccctcatgccggccgcgaacgcgagttcgaacagcagcatccaggattcgtcaacgtccacggtcagggccggtccgcgtcgtttcgctccccggttgggcacggcctcgatcagctgcttcggctggtctggcgagaggatcctggtctcggtgggctccacccttggcggcttgaccctgcggcacggatccacggggatgagctcctcgagttccgcctggtcgagcatcatcttcaggctcacgaaatggtccttgagcgtggagggcgcgagccgtttggaaagcacgcgcatgcattggcggatatggtcaggggtcagctcggtgaggcggatacagccgatgacctccatgcacgcatgaatcctgccggcgcgggtgcggtacgtggtgggcttgacgttgagccggtattcctccagccaccgctccgcgtaatccttcaggtacgggctcttggcgccgggcagcaggccggtgcgttccatctcggcgaccttcgcgtcgaaccgttcgcgggcatcggccttcgtgcgacccttggccgagacatagcgtcgtttgcccgtggcggggtcgcggccgacctcacgccggaactcccacgagccatccttgcggtggatgatgcttcccgcacccttcgtgcgtcgtctgccgttcgtcgccatgatgttcctcccttgtcgggagcgccttcgagcatccgctacaagcgccctcaaaaagggcactctattggcacactatccgggccacaaacggccagatacggggcataatcggccattcttcaataatcgaaaaacggcgcaattccacagttccgaaaactcgaaaacgttggaatcacgccgttttctggggtgttcacaccctacttggacacattgaacttgaactccacaatatctccgtcggccatgacgtagtcgcggccctcctgacggagcttgccttcctccttgatcttggccatggagccgtcggcggccacgaaatcgtcgtaggagacgatgtcggccttgatgaaacccttttcgaagtcggtgtgaatcacgccggcggcctgcggggcggtccaacccttgtggatctgccaggcgcgcacttccttgacgcctgcggtcaggaaggtctgcaggccgaggatgtcgaagcccacgcgggccagctggtcgagaccggactcgctcaagccagcgtcggccagcatttcgcgggcatccgcctcgtcgagctcggtcaggtccgcctcgaactgagcgttgaggaacacggccggagccggggccacggatgcggcgagcttagcctgcaggtccttgttggccagctcgttgtcgtccacgttgaacacgtagatgaacggcttggcggtcatcagatgcaggtcgtagacggaatccttgtcgaagcggccttcgcgtgcggccttgtcgagcgtctcgccggcttcaaggatggtctttgcctgcttgactgcgtccatgtaggccggctcgatcttcttgcccctcagatccttctccagcttgggcagcgcgttttcgatggtctgcaggtcggcgaggatcagctcggtgttgatggtgtcgatgtcgtcggccggatccaccttgccgttgacgtggacgatgtcgtcgtcctcgaaggcgcgcacgacctcgcagatcgcgtccgcctcgcggatgttggccaggaacttgttgcccaggccttcgccttcggaggcgcccttgacgatgccggcgatgtccacgaaggtgacggtggccggcacgatcttttcggtatgcacgagcttggcaagcactggcagacggtcgtctggcagcggcacgatgccggtgttcggctcgatggtggcgaacggatagttctccgccagcacgttgttgcgggtcagtgcgttgaacatggtggacttgccgacgttgggcagtccgacgattccgatagtaagagacatgattccctagcttagtattaggcttcgatggcgtcgacggccttgatgaccgcaccgcggaacgcgctttcctccagcgaggtcacacccttgattgtggtgccgcccggcgagcagacggcgtccttcatgacgcccggatgggtttcgtttttgaggtatagcgcaccgacgccttccaccatcttcgcggctagacggtaggcggtggcacgttgcaggccgtatttcacgcccgcgtcgccgagcgcctcgatatacatgtcggtgaatgccggtgcgcagcctgcgatgcacatgccaatgcccatatgcgcggaatcaacgcgttcgatgaggctgatcgatgagaacagccgctcgaacacttcggcttgcgtgtcggtcagcgtgttgtcggcttcggtgacgagtacccccttgccgacggccatcggcgtgttcggaatggtgcattggatatgcgccgcgttgaaatcggcgccgaacaagtctcggtatttgtcaagatcccagcccgccgcgatggatacgacgaatttgtcttcgtcggcaatcgcgccgatgactggcttgatgacactttcgatttggtacggtttgatggcgatgacgaccatgtcggacgctgcgacgacttcggccgcgttgtgcaatggctttgcacccactttcatcgtggtcttttccagcttgtcgtaatgcgcggcgcaagccacgatgtcggcaccgtcgacggcgccggctgcgacgagtccttcggcgatggcctgcgccatattgccgtatccgatgaatccgatggttggattggacatggtgtcctccttgtcgtcttttctaatggacgtaattgttttggatgcgatggtttcggagaatttcgggaatgtcagaacagttcttccaggtctcccctgttcaacgcctcgtcgaacaggtgcttgaacaccacggaaccatgtacgccgtcgtgctcgaattcgttggtggtccaatagtgcgatcgtcccacacgggacagcgtatcgaattgcagaccggagtcgacgtacatgtcgtcaaaatagacggcagcctgcagcggaacctcattgcgcgccaactggtcggcatcgtagatcgtgccgaaatgcgtgtcttccataagcacgtccatggctggtttgaacggacgcaacgcacgttcctgctcgaacatccacgggaacatggcctcgccggtgaaattaagcggacgaatgtcacccgcgaattccggatgctcgccacgcacgcgctgggcggcccagcaaatcggcgtttccagctcaccgttggcgtagatgaactcctgcaacggccaatacagcgggcgagatgaagtcgcatccatcacggaagacaggaattcgtcagacagttccgccgaggtcgaggccgaaccgtcgccgtcaaggaatgcctggtcaagaatccaatgcacgcgttcgaaacttggcttcatgccgaaatcggatcccaagcattggaagcgttccaccgtgagcggatcgccgttcggcaatgtgaccttgcgcgattgcagaacgtcggcgacggccgcggcacgttcgatatcgatcgggtaacgctcgtagaactgcttcgtctttgccgccatgcgcgggaatgtatgacggtacacgtcggtcgcatcggcgggaacatgaggaatgccgcccgtggtgaaactggcgataactccttgcgggaacagcgaaagatacgtcaacgtcaggaatccgccatagctttggccaagcgtgacccaacgtgcgcccccgaattcggtacgacgcagatgctcgaagtcacgaacgatcgaatcggcgaggaaacgcttcaaaaacgcggcaccggccttgccgtcgccatccatgccctcaatcacatgcgtatcgacacgagacgaacgcccagtaccacgttgatccggcaacaccacgcggaaatgcttgatagcctcctcaatccaaccatcggaacttgggccgagcggacgcggaccggaaccgccgggaccaccctgcaggaacacgagcagcggcaggtcgtcatgcacatgttcgggagcggtgaccacacggtagaacaggctgatcgattcgccatcgaacccatgaccgggctcgtggcccgtccaatccaacggcaccttgatggaacgatcctcaatatgcaatccgggcacgtagtattcgctcagcaacgtcatgcattcacctttcctttggcgtcatcggcatattcaatgcgagtagtgactttttgatggcttccatcccacccacatgcggggacaaccttacctcacaaaagcggctttaccttaccgctatttcattcctgcgcatgatggcgtcacagcatatctggcgctagggtggaacgtatgtcgaatctcaagcagcgtctcttgtcatggatgcatggccatgtcttcgcaggcgatctcatcatcacgcttgttataggtgttctgctgttcggcgtgaccagcggcatcacctataatccgggattgctgtttgaccttaagccttccacgcagatgacatgggaagcggcaatgcttattccgctgctaatccgtcgatggtggccacagaccggagcgttgctctgcgtggcattgaccttggcgcatctcatattcggcccctgcttgttgggtgccgatattctggcattgttcatgctgtattcagtgatcgtctacggcaatcccaaaaacacgaaagccttcattattctggcgttgaccatcggtcttctggcttcggcgctggtggcatggaccatgatcaatggaccactgctcaccggaggcaaagtgcatacatggagcagctggaatgacccaaatccaaatggcgttatggtcacggaagacactctcggttccatctacacaggaacatccatatcggaagtcgccgacatggtggcgacttccatgctggtgctgactccgattttcgaagtatgtatcatttccaccgtcattgtagcgttctggcagcgtgcccgtctggcaaccattcgcatgatgcgggaacgcaatgaggcaatcgccgcgcgagaccaggatgaacgcgatatcgccgcgttggcggaacgcgcacgcatcgcacgtgacatgcacgatgtggtggcgcacaccctgtcaatcatcatcgtgcagtctgatggtggtcgctatgcaggcacgcatgatcccgcggtggccagaaacaccatggagacgattcgacacgaatcggaacgcgcactgcatgacatgcaacgtcttctgggagtattcggaggttcaccgcacgccgattataacgatatcggcaatcttgtggaacaagcgcaaaacgtctcccccgacattcgaatccaacggaatatcaccggcaccgccagcccggaacaactcggcgaacaagcctcgatagcttcctaccatgtagtgcaggaggcactgacgaatatccgcaagtatgcggggccgcacgtcgatgtgcacattaaagagtcatggaacaacggtttgctcactttgaccatcaccgacaatggtcatggcgcggcggccaatatcgacgggcatacgccaggttacggcctgctgggcatgaaagaacgcatcgaatcggccggaggctcgttgcaggctggccctcaactcggcggaggctttgaagtcatggccaccctgccttacggcggtaaagaacaggtgacagaagaaaccggcgaacagtatgcctcggaacagtccgaatcgtgcaacacaactgccgtatccagcaaagcgaaattctccgacgaagcaatcgcacctcacacagtcgtcaacatatcggcgcgaatcccagatcagccatcggagcagacgaaggaaaccaaccaaccgaccggtcgcgatcatcgttcgaatgccctgcaacatttgcgcatcaccgcacccaatctgcatgatttgctcaaatcgttgaaactgaaatccgtagaacttgcaaatacatccaattcacgaggactgaattgggtggaacgtgtttccgcgtggacgcagcgccattatgcgctcatggattccgttggtgccgtggcattggtcatgctgctgaatcgcatgtcggttacgttcttttttgatagttcacctcatgtgcagctctctcatgcgatcgccgcatgctgcttgctggcgctggctcttcgacgcagttttcccgagacttgcgcgcttattgtgttcgtattgtcggttgtgcaattggtgtttttgggatcgattgaggttggacatatcgtagcgtcgctgtgtgcgctgtattcagccgtattgtatgggcgtgaacacgcatggcgttgggccggtcttgccgccgctacctgttcggtgctaatgggcttgaaaatcgcggctgatcaacacggatacactaccttgttcggcgccatcgccgcttttgcaggcttgacgaaaccggtttcagtcacgtcaagtactacggcggcgttctttaccggcgttatgtatacggttgcagtgctgatgctgtgcgccggcattatggcgtgggcacgttgggctcgttccagtgattcaaacgcactggtgttgcaggcgcgagaggaagcgctggtggccgagcaggagaagcagcgtattctcgcggcgaatatggaacgtgaccgtatcagtgccagcattcaggctgaagtcaccgccacgttgaacagcgtgattagtcaagccgtcgatggtatccgcatgctggatagcgccgaagcacaaggcaaagagcctaccgccgacgagatttccacagcgttcaaagccattggcgaacaggggcgcgccgcgcttaaacgtatgcgcgaactgcttggcgtgcttcgtgagactggtttcagcgatgacgctcatgccggtagcgcgaacgaactgcagttgaggcccgcagcaccgttggaggagcagctgcagcgcgcgtctcgatagccgattcaagttttcagggagatttaagggtttgtttcgcgctgtgagcggaacaatgccgataaggtggagagtatgagtgaagaacagaagattcgtgtggtcattgccgatgatcaggaattggtacgtgccggtttcgccatggtgatcgggtcccaacctgatatggcggttgcggcgcaggctcgcgatggtgcagaggctgtggcgttggcggaaacactgcatcctgacgtggtgttgatggatgtgcgtatgcccggcatggatggtattgaggcgactcggcagatcagttcgttgcagcatcgcttcgctgccgatggaacgcaatcagaagtcgcccgtaccaaagtgatcattctgacgacattcgatttggatgaatatgttatggctgcgatcactgccggggcttccggttttctgctgaaagatacggaaccggaaacgttgttgaattcgattcgcacggtttttcaaggtaatgcgattatcgcaccgtccgccacgaaacgtcttatcgagaaaatgatggaaggcgatttcatggctgcgaacgtcggtaggcctgaaaattccgcaactacttctgctacggattcaacatataccgatccggaattggacgaactgaccgatcgcgagcgcgaagtgcttattgaaatcgcgcatggattgtcgaatcaggagattgccgacaagcttttcatcagcctgccgacggtgaaaacgcatgtggcgcatattctggcgaagatcaatgcgcgtgaccgtgtgcaggcggtggtgttcgcttacgaaaaccatttggtctgattgatttgttgttttgcgtatgcatgatacgcaaaaaggactcctaccatgtttgtggcaggagtccttttcgttgtgtttgctatgaagcttaggcttcggcgagcgcctcaacaggaggcgtgctcactgccctgcgtgcggggaatacgctggcgagcaatgctgccacggctgccacggcgagtacgatgccgttaatgccccattcgaacgggaacaccactttgccgtacatactgaacaccacgtatgcgcccagccagccgaacagggtgccaagtagtacgcccgcgatgccggataccagcgagatgagcagggcttccaccgcgagggagcgtcgcagctggcctcgggtcatgccgatggcgcgcaatgtggcggattctcgggtgcgttcgatcactgacagcgacagcgtgttggccacgccgacaagtgcgatgagcacggccacggcgatcaatcccaccagaagcatcatcatggagtcgatcatcttcgcccatacgatgcgttcggcgatcggtccggtcactgtcgcatcagcgctcttctccaatgcggcctgcatgtcgttgtagatgccgtcaacggaaactcctgacttgtcagtatctgccttgaccagcaacacatgggtggcggcgtcgaggtcaccattggtgaaatggctttcatccacgaatccgacagctccatactgtgcggatacgcgacggtagtcggcttggtttgcttgcaatgtcagcgaacgcgtagtgacgccgtcctggttccattcggtggagaaatcagccgtgccattggcgaactgcagttccttgccggtttgcgcattgtatgttggcatgagcacgctatcactgtcgatggaggcgttacccaagttggcacgcatgacctgcttgacctgatcgatgttcttcacaccgaccagcaatgcggacgtaggctgggttccatccgctttctccaaggtcacggaaaccgccggcgcatacaatgtgtcggacacgccgttgatgtcggctacatccttgaccatttgctgactgatgtcatcgcccatggccacgatgtcgacgctataacgggtggcgagcgcaccattcatagtctctttggcgctagcggcaccggttgcgatggtgga

SEQ ID NO: 931 - DNA, 9222 bp, Unknown
  gut microbiota DNA sequence
ccaactgagctacgcaggaatattcaattttcatcccggccggagttacccgttcaggtgagctcctgcgactgggcttgaaccagtgaccgtccgattaacagtcggatgctctgccaactgagctacgcaggaatgtctgctgtgtttgagatttctctcgcgcacaagtcacatatcctacatgcctgccacgaaaaagcaaattacatgcgtgtagggcatgtcgcgctgaattccgcagaatcggactcatcgaatactatctcatacagccaaaaaccgaacacggatatacactagcgactaacggtagaggagctggtgtctgcttggcaaatactggaatcggtgaaacggaacaaccgtctgagtatgcgaacccagtgggaacaatcacaagagttctgatgttccgctgtcactgcatggcagcggttgtgacatggatcggccgcggctgaaggtcgaacaacatgacgatgcggcgatactgtcacgcgaaatttcattgtggataacttcggaagctagaaccacataggtcgttttggctggacatcctgtttcggacccctcaaggtgggtatcaccggcaaagaagccggaatcacatcacactcacactatggggaggaatctcatgaatgcaccactgttgtttgattggcgtcgcgacgaagcccgacgtgccagccggcggcgtcagcaggcgcgtcagcgggctcaggaacggcaacggcgtatggatgccataatcgcgttggccgccgttatcggcctgctgcttgccttgggagtagggctggcatccacgcctcagcatgttgcgtatgcggatactgcggtgaccggagatgcggcatacacggtggaggatttcaccgatatgtctgatttggcgtggcgcaatggcaatcagtgcgaatcccgattcgactggccggtcgacgatccacaggtcgaacaacagttcgagcggccgatcaacccgtgggcaccaggtcatcgtggagtggatcttgttgcggagcaaggtaccgtaattctgtcaccacaggcagggaccgtgagttttgctggcaaagtagctggcaaagatgtggtgagtgtacggcatcgtggaggtgtcacgtcgacattcgaaccggccgttaccgagctctcagtgggggatacgatctcccgcagacagcccgtaggcatcgttgaaggcagctcggaccattgcgaagaccgttgcctgcattggggcctcaagcgaggaacggccgattatcttgatccacagcaatatgcggggagtcgaaaaatcgtactgaaaccgtcatgatttaacggtgattgtcggccggaacagggccgtacggaagagacatcgcaggcggctagcggcgtgacgagtatgaatcacagaccggcatcggccaaggaaatatatccggggtcgatcagcgcggacttgagattgctggcgctgacagccagcaacggttcgctgatggtcgggatcttcttcacgccgcctacctcggagttcctgattgaaggcatggaattcagcgcttcgtccttgttgagcttggcgcaggcctgagcgatatccgtggcgatggtctgtctgtcttccatgccggtcatccattgcttgccattgacgatggatgggatgttcgagacatacgcgccgtatccggttactagaggccactgcgagtcacggtccttgtcggaagcggaggtgtcctcgtccgcatcgtcatcggaactggatgagtcgtttgcgttgtcgttttcaggggatttgatcgggtccggcacggcgtcgcggctgagatccttcttgccggtgatattgccgacaatgcccgagatggtgatctgcggattgatatcggcggcagagccggtgtatcccagatcgtccaattccttgacgacctcggaggcgatgtagtcgttcatcgtgatgatgccgtcaatacgggtgagtgtggactgtccgtcggtttttgccagacgcttgtcaagcactttcgcagtggagccttccttagcggcatcgtaggccacggcttgccaatcgttttccgtggatttgccgtccaaggtgcctgaagggctttccacaacgcccttctgatagtaggagcccagtacctgccagataccacggaacgcctcttgggcgaacgtggaatcgttggcgttgcctttttcgtccacggcggtgtatggcagcagcacctcaatgtatttggggttgtctttactggccttatccaacttgagtttggacaccatcttttccgcctgtagcttgccgatggtctgggcgtccgagaacttgacgaaggcgtccggcttatatccctcgatactgttgccgagcaataccacatgcatgccggattccttggccagcttgagcgatgagaccagccggtccacggcctgcgcctgctcgtccgatgcagtgctgtcgctctcagtgttggacgaatcgtctttggacgagtcgtcttcggaagattcaccgtcagaagtagcttccccatccgtggcatcgttggtgctcaggttctggctcacgtaatcgccgtattggcgagtggaagcgtcggcctcgactactggagccacgagcaatgtcatgttgtcgggcgcgatggcaatgccggaatcgtccgtggtgttattcgaaagatgatcgaccacaaagtcttggatggcgcggctttgcttggccaacgagtcggacgtcgtatgatcgatatcgcctttcttgaaaccggcgtcggccagagccttggctaggtcaggcaccagcttcgcccatttgttcagtggcgtctgctggttcagcgtaatgccgtccgaaggtgtgaacacggccacgccgccggcagaattggacgtcaccgtggtttgaccatctacaacggtcttattgtctgaggtgcacgcggtcagtgacagcaccatcgcgcaggatgcgataatggcggcgagcagggtggttgagcggcgtgcgaacaccataagcggcgaaacctcctcaagcgggcgtgaaaacaagctgaatcacgattctagtaggccgtatacgaaagagtcccggaccagtggacaaatcgccacatatccgggaacaattagaggtattacgtgcgtgcatcgaacaactgtcatgattatcgtgctgaggaacattccagatgaagcacgacaatcatgacagtttgcgacatgacatgacccatgtaggtccgcacgatgtgttcgatgatttactcggccagagccttggccaggttctcgtccagcgcattcatgaagccgtcggtgtcgagccacggttcgtccgggccgatgagcatggccagatccttggtcatctgaccgccttcaacggtgtcgacgatgaccttctccagcgtcttggcgaagtgacggacttcgggcgtgccgtccagatcggcgcggtgcttaaggccgccggtccacgcgaagatggatgcgattgggttggtggaggtcttctcgcccttctgccagcggcggtagtgacgggtcacggtgccgtgcgccgcttcggcctcgacggtctggccgtccggggtcatgagcacggaggtcatgaggcccagcgaaccgaagccctgggccacggagtcggactgcacatcgccatcgtagttcttgcaggcccagatgtaaccgccgtgccacttcagggagctggccaccatgtcgtcgatcaggcggtgctcgtaagtcaggccggcctcggcgtacttgtccttgtattcggtctcgaacacctcggcaaagatgtccttgaactggccgtcgtaggccttcaaaatcgtgttcttggtggacaagtacaccgggtaatgacgcatcaggccgtagttgaagcaggcgcgagcgaaaccgcggatcgaatcgttgacgttgtactgcacctgggccacgccgccgtcttcgccgtagttgtagaccacgtgctgaatcggctcggagccatcgtccggagtgaaggtgacggtcagctggccggctcccggaaccttgaaatcggtggccttgtactggtcgccgaatgcgtgacgggctacgacgatcggcttggtccagccgggcaccagacgaggcacgttgctcatcacaatcggctcgcggaagatcgtgccgcccaggatgttgcggatggtgccgttgggggacttccacatcttcttgagaccgaattccttgactcgggcctcatcgggggtgatggtggcgcacttgacaccgacatggtgcttctggatggcgtgggcggcgtcgatggtcacctggtcatcggtctcgtcgcggtgctcgatgcccagatcgtagtagtcgaggttcacgtcgaggtacggcaggatcagacgatccttgatgtccttccagatcacgcgggtcatctcgtcgccgtcgagttcgacgacagtgccttcgaccttgattttggccatgcttcctcctgatagatggtgtgaagatgatttagtcatagcgcatgtttgtaacgacttgaagcaatcgtccggtccgtgggaaacggccttgttggcgtcccacccgggcaataggctggaaaccatgtctcaggaaattgaaatcggtttgggcaaaaaaggccgtctcggctacgcactcgacgatgtggcaatcgtcccctcccgtcgcacccgcgaccccgaggacgtctccacctcttggcagatcgacgcctatgagttcgatgtgccggtgatcggtgcccccatggattcggtgaccagcccggccaccgccatcgccatgggcaagatgggtgcgctcggcgtgctcgatctggaaggtctgtggacccgttacgaggatccgaccccgctgttggacgaaatcgccggactgccggccgatcaggccaccgagcgtatccagcagatctatgccgagccggtcaagccggagctcatcacgcaacgtctgcacgagattcgcgccgccggtgtcaccgtggccggcgcgctctccccgcagcgcacccagcagttctactccaccgtggtggacgcgggcgtggacctgttcgtgatccgcggcactgtggtctccgccgagcacgtctcctccggtcaggaaccgctgaacctcaagaagttcatctacgaccttgacgtgcccgtcatcgtcggcggcgcatccaactacaccgctgccctgcacctgatgcgcaccggcgcggccggcgtgctcgtcggcttcggcggcggcgcggtctccgccacccgccagaccatcggcgtgcaggccccgatggccaccgctatcgccgacgtggccgaggcccgccgcgactacatggacgaatccggcggccgctacgtgcaggtcatcgccgacggcggcatgggcgactccggcagcttcgtcaaggccctggccctcggcgccgacgcggtcatgctcggcgcgccgctggcccgcgccaccgaggcccccggcaagggcacccactggggttctgaagcccgccaccagacgctgccgcgcggctaccgcaccacggtcggcacggtcggcccgctcgaacaggtgctgttcggaccgagccaccaggcggacggcaagaccaacttcatcggcgccctcaagcgcgcgatggcctccaccggctacgtcgacgtgaagaacttccagcgttgcggcatggtggtcaacccgtattccgcacgataatcccgattgccccctgaaaatgggggtttgccctccatgcaggaggcttaacttgcccgaaggcgcgctcaagtagtttgacttggcgcgcctttcgtgatgttgtagtacagacgctcgccgatgatggtgagttgcaagggggcttgaagggggtcatcatggagtattcgggatttttccgcggcacatatcagtacgggccgttgccgagttatgacggattcatcgttgtggagctgtcggatcgcccggtgcggtatcacatccaacccacattcataggcgggctgaatgcgaaggaatgtcattccatggccatggctgcatgccgcatcgcctgcacatcggcggacgcgatacgtggcaaactcagcgtcgcacatctcaacagagccatgacaaaaccatgcctggaccggctgcaaaccatgcaatacctgctcggcatccacatggtcactcatccggagctcaaagcgaaattctgctatctgcccactgtccccacattgatcgacggcatgatcaccggcaaggacacgctggaaatggcggtattcatgaccatcggccaggaaaatctgcgagtcaacctcaaactgaagtacatcggttctcgatggatgtgcatctatgccgatttgggctgaccagacggccccgcccgcacaccgattcctacgctggtagcggaagacggttctgccgtgtcataggctggttcgcctatagtagtgaccatgcgtgaacatgtagaagaacccagatatgtcaccaccgatgacgacaccgtctactcgctgctgtccaaacgagcagctcgcacgccggatgacatcatcgcggaatggcaggatgacaacacccaccaatggcgcagcgccacagctactgaaatgctgtcccgcgtacgcgaggtggccaagggcctgttgggacttggcgtcaaagccggcaccatggtgctgatttactcgcctacctgctatgagtggggtgtggctgatttcgcttgcgcggcaatcggcgctgtggttgtgcccgtctatgagaccgattccgcccgtcagaccgcgggcatcgtcgaggaagtcgatcccgccatcgcctttgccggcgacttccagcgcgcacagacgcttgagcagatccgtgtcaatcatccgggcatgaaatacgtgttcaatttcaaggccgatggccttgacgctgtcgttgacttcgggcatggcgtatccgatgagacgttggatgcggctatcgctcgtatcaaagccgatgatctgctcaccgtggtctacacctccggttccaccggcaagcccaagggcgcgatgctctccaaccgcaattacacgcacatcgtgcttaacggctacgagattctgcgtggcatgctgtacgacgacaaccgtctgctgctgttcctgccgctggcgcactgcttcgcccgctacatccagtacgtgtgcatcggtggctgcggcgtggtcggatacattcccgacgccaagcgactgctcgccgatatccgcagcttcaagcccacctacctgctgggcgtgccacgtgtgttcgagaaggtgtataacgcggcctcgcagaaggctggtgccggcatccaggggcatatcttcgcccagtcggtcaagcacttcgtcaagtggagcaaggatgagcaggccggtcgcggccattcgttcatcgagcgcatgcgccattcgttctacatggccacggtgggcaaatccattcgttccgctctcggaccgaacctcaaatggctggcctgcggtggtgcgccgctcaacgtggatttggcccactttttcaacggcatgaatgacatcaccttcatccagggttatggcatgaccgaaaccgccgctccgatgctcgtcaattgggaggacgacaacgagatcggttcggtcggcaagcctgggcctggcatgggcgtgcgtcttggcgaagacgatgaaattgagctgaccggcccgaacgtgttccttggctactacaagcagcccgaactcaccgcacagacgatgactgccgacggctggatcaaaaccggcgatctgggtcgtatcgacgaccgcggcttcaccttcattaccggacgcaagaaggacatcatcatcaccgccggcggcaagaacatcagccccgccccgatggaggatgtcatcgacacctgcccgatcgtggctcatgcagtagtagtcggcgacggcaagccgttcgtgtccgcacttatcgagctcgaccccgaaatgctgcattcctggctggaaggtcagggcctcaatgccgacatgacactcgccgaggccagcgacaacgacgcggtgcgcgcctttatccagcagtacatcgaccaggccaacgccaatgtctcccgcgctgagtccgtgcgcaaattcgcggtgctggatgaggaattcagtcaggagcacggcacactcaccccgagcatgaaagtggtgcgtcccaaggtattgcagcgctacgccaccgtcatcgaggaggatctgtacgcgcccaagccatccaacaagccgctgcccgccactgccaagatcatcgacagcacgctggagaccgtcaagaaatcctccgaatcggtcaagcaggcgtccgaacaggtcaaacaggcctcggaacagatgaaaaccagcgtgtctgattcgattgctagcgtgtcggagaagatcaagaagtcgaaggccgaacccgaagagggcgagaccggcgattccgctgacaatgccgctgacaccggcagcaagccggaccagccggctgacgagaagaatgaggagtaacgagaagtggccatccgtgagatcagggtcgtgcccgacccagtcctgcgcaccccctgcgatgagatcaaggaaatcaccccggccgtgcgccgcctggttgacgacctgttggaaaccgtggacgatccgggccgagcgggcctgtccgccaaccagatcggcgtgagcctgagggccttctcctacaacatcgacggcaaggtcggctacgttctgaaccccgtactcgaggagaagtccggcgagcagtatggcgatgaaggttgtctgtccgtgcccggcttgtggtacaagacccgtcgtgccgactacgctcgcgtgcgtggcatcgacttggacggcaacgaggtcgtgctcgagggctccgggctgatgggccgtatgcttcagcacgaatgcgaccacctcgatggccacgtgtatttggatcgcctggaaaaggaagaacgccgcgaagccctgcgctacatgcgcaatcgtcaggcgaagtagtccatactcggctcccactggctggagccgtcgaacgtagtgagactgagggtggttctgccggtaccgcccgtgactcccctcagtcgcctacggcgacagctcccctcagagaggggagcctgtttttttt

SEQ ID NO: 932 - DNA, 49004 bp, Unknown
  gut microbiota DNA sequence
ggcacacaacaaattcgcgtcatgctcgcgacggcttgtgtcggtcggctgcacaactcgtgaaaccgggggagcagctgcacgcaggtgcgcatggccaggcaagaaccgacaatgaaaggtagtaataccatggctcagatcactatgagcgatatgctgaaggctggcctgcacttcggccaccagacccgtcgttggaacccgaagatgaagcagttcatcctcacccagcgcaacggcatccacatcatcaacctgttcaagtcgctcgacatgatcgacaaggcgtacgacttcatcaagaccaccgtggcccacaacggcaccgtgctcttcgtcggcaccaagaagcaggctcaggaagctatcgccaaccaggccacccgcgtgaacatgccctacgtctccgagcgttggctcggcggcatgctgaccaacttccagaccgtctccaagcgcgtcaaccgcctcaaggaacttgaggaaatggacttcaccgacgtgcacggctccggcctgaccaagaaggagctcctcctgctcgagcgcgagaaggacaagctcaacaagcagctgggcggtatccgcaacatgaaccgcaccccgtccgcgatgttcgtcgtcgacatcaccaaggaagccctggctgttgaggaagctcacaagctgggtatcccggttgtcgccatcgtcgacaccaacgccgacccggacaccgttgagtacccgatcccggccaacgatgacgccatccgcggcatcgaactgctgaccagcctgatggctgacgccgtcgccgaaggtctgctggagcgctccggcgccaacaaggccgagggcgaagccgccgagcagccgatggccgcttgggagaaggaactcctgaccaacgaggctcctgccgaggcttccgctgaagccgccgctccggctgccgccgagggcgaaaccgccgaggcccccaaggccgagtgatgctctacgatgggaagtgcctgaataagcgcttcccatcgttcacgggtaagcaaaatttctcaaggagaataatcaatggcagcaattaccgccgcactgatcaagcaggttcgtgaagacaccggcgccggcatgctcgacgtcaagaaggctctgaccgaagccgaaggcgacgtcgcccgcgccaaggaaattatccgcgccaagggtatcgccgcagccggcaagcgtgaaggccgcaaggctcaggaaggcaccatcgcctccaaggtcgtcgagaccgccaatggcgagaccggctacgccgtcgagctgaactccgagaccgacttcgtggccaagaccccgaagttcgtcgagttcaccgaggaagttctcggctacgccgtggacgccgacgccaactccgctgacgagctgctcgaggccaaggctggcgacaccaccgtcaagctggctgtcgaagaggccgccgccctgttcggtgagcacgtcaaggtcggccagttcgccaagatctccggcgagcacgtcgaagtctacgctcacaagaagtccgccgagatgccgccgagcatcgtcgccatgatcgccaccgacaaggccggcgccgccgtggctcacgaagctgctctgcagatctccgccatgggcgccaagtggctgacccgcgaggacgttccggccgatgtggtcgagtccgagcgtcgcgtggccaccgagaagtccctggccgagggcaagccggagaagatcgttccgaagatcgtcgaaggccgtctcaacgctttcttcaaggaagtcgtgctgcttgagcagccgttcgtcaaggacccgtccaagaccgtcggcgacctgttcaaggaagtcggtggcaacgccaccgcattcgctcgtgtcgaggtcggcaagggcgaagaggagtgagcctaaggcttactccacgcgcttagcgtaatttcaacgaaacgccatccggttattcaataatcggatggcgtttcgctattccaagggtgtcgttgctagggggtgtcgtcgtaaaccgatacgcttgtctacggataatttcgcactttcggttttgagaaaggcacaatatgactgatagcgacaatccgcgcagagttctgctcaagctgtccggcgaagcattcggtggtggcaaggtcggcatcgatacccaggtgattcgtcgcattgccgaggagatcgttccggccgtacaacagggtgtgcaggtggccatcgtggtcggcggcggcaacttcttccgcggtgccgaactgcagcaggccggtatcgatcgttcccgtggcgactacatgggtatgctcggcacggtgatgaactgcctcgctctacaggactttctggagcaggaggggcaggccacccgcgtgcagaccgccatcaccatgggacaggtcgccgagccgtatattccgctcaaggccatccgtcaccttgaaaagggtcgcgtggtgattttcggcgccggtgccggcatgccgtacttctccaccgacacggtttccatccagcgttccctcgaaatccactgcgacgaggtacttatgggtaagaacggcgtcgacggcgtctacaccgccgacccgcgcaaggacgagaacgccaagcgttttgaaaccctgagctacaatcgcgccctcgtggacaatctggccgtcatggacgcctccgcactgtccatggcccgcgacaacaagaagcgcatccgcgtcttcggcctcgaagagccgggcaacgtgacccgcgccctcgtcggcgatgaaatcggcacgctggtctccaccgccgaatcgcgcgtggccgagtaagccgcaaacgcccacaatcgaatcaagcgttcatagacgaacaacactgacgaacaccaacacacaaggagtgaatatgtctcttatcgaccaggccaaggaacagatggccaagaccgtggaaaacaccaaggaaaacttctccggcatccgcaccggtcgcgcaaacccggccctgctcaacggcatcaccgtggactactatggtgcccccaccccgattaaggccgtcgcctccatcggcgttcccgaaccgcgcaccctgtccgtcaccccgtttgacgcttcccaggccggtgccgtcgaaaaggccctgcgcaactccgatctcggcatcagcccgaaccgtgatggcaacgtcatccgtctgaccatgccggaactcaccgaggatcgtcgtaaggaatacgtcaagctcgccaagggcaaggccgaggatggcaaggtcgccgtgcgcaacattcgccgtaagaccaaggaaaccatcgacaaggccgtcaaggacggcgagatgggtgaggacgaaggcgatcgcctgctgaaggatcttgacaaggtcaccaagtccgttaccgacgagatcgatactctgctggagaccaagcagaaggagatcatggaggtctgattcagaccaggtccggagaattatggaacgcaacgaacaaccccatgaagaggccgaggagacgctcgaccagatcaacaagaagaccggccgcaacatgccgcaggccatcgccacaggcgcggcactggtcatccttattgtcgcgtgcctgctgctcagcgtcgacctcttcgtgctgctggtagtcgtgttcatgattctggcgctgtgggagctcagggtggacttcgccaccgtaggcctgcgcctcccggtgtttatgctgtggctgtgctcgtccttcaccctcattgccacctactattccccgtaccatctcatcacgatgtcgctgagtatcatcgtgtcgattattctggtcgccatcgcggccagcgcaaaaatcagcgtcggcaaccgcctatctctggcggttgccggcaaactgtccaacacggatgccagcgcgcgcctcgaatcctcgtttaatcatgagggcggggaacagcatcattcccggctcagccatgtggctgtgtccgtgcttaccgtgttgtatattccgttgttggccagctgcgtcatcatctcactgacttttaatgggcatccgattgcacacgccatcatgctggtgttcctacccgccctatccgatacgggcggtttgtttgccggtgcctggctcggcaaacacaagctcagcccgcgcatctcgccgaagaagtccgttgagggccttgtcggctcgatgctcttcgccatggctggcgcatttgccgtattcgcatgcacgtatgatgcctcgaaatgggccactcgttggtgggtgccgatcgtggcgggtattctcatcggtgccgtgggcacgttcggtgatttgtgtgcttccatgctcaagcgcgatatcggtatcaaagacatgggccatctgctcaaggggcacggcggtgtgatggatcgtgtggattccattttgatgagtgcaccgttcacctgcgccttgctgtggatcaccggactgtgattcgcatgtctcgtgcatgaacaatgtggcatcgtgtgtatatcgcacggtgccacatgccatatatggggaaatcatcgttcaatatgcgttcgctatgggctaagacatgggccatctgattcgtatgcggcacgccgtatggtggattctgatatttctattgcatgtttgactattttctgatattgagagcgaagcgaacccatcatgaccacacagcatcctgacactccggaaaccggcattactcccggcggcacatcaggtgccttccgtgacgtgctatccaaggaccatgcccgccgtagtaagccgccgctgcactttgtggatatgacgcccgagcagcgcgtcgagaaagcggccgaactcggattgccgaagttccgagtcaagcagctcgccaaccattactttggccatttcgatgtgaatgccgccgaattcactgattttccggcagccaagcgcagcgaggccgccgccgcgtttttcccgcagctcatcaccgaggtgacccgccaagtggcggacgaaggcaccaccatcaagaccttgtggaagctgttcgacggctccctcatcgaatcggtgcttatgcgatacccgacccgcaccacgctgtgcatctcctcgcaggtcggctgcggcatgggctgcccgttctgcgccaccggcaagcttggcctgacccgtaacatgtccaccggtgaaataatcgaacaggtgcgtgtggccgccaagatgatgcgcgacggcgaagtggccgggggagagggccgcctgagcaacatcgtgttcatgggcatgggcgagccgatgggcaactacaactccgtgctgtccgccgtacgacagatttccgccatgcctcccgaaggcttcggcatttccgcgcgcaacatcaccgtatccacggtgggcgtggtccccggcatcaagaagctcactgccgaaggcattcccgtgcgtctggccgtttccctgcatgcccccagcgacgaactgcgtgacgagctggtgccgatgaacaagcgtttcaataccaagcaggtgttggatgccgcgcacgattattggctggcctccaagcgccgcgtcagtatcgaatacgcgttgatgcgcggcatcaacgaccaggccgagcatgcgcagttgctggccaagaggcttaaccattacggcgacaactgggcccacgtcaacccgattccgctcaaccccatcgagggctcgaagtggaccgcctccaagccggaagacgaacagcggttcctggagatcctgcaccgcgcgggcatcaccgccacactgcgtgacacccgcggtcaggatattgacggcgcctgcggccagctcgctgccaaggagcggtagctacttcagcgcatccttgattgcgcccacgaagtagtccagatcgtcgggcttgcgggacgtgatgagcttgaagccgttggcgtcgtccacgtgcagctgctcgtcgacgtaatggccgcccgcgttctcgatatcagcggcgatatagcggcagggcgcggcggtcttgccagccaccagacccgcgttgaccagcagccacgcgccatggcagatcgcggcgatcggcttaccttcgtgcgcgaactcctgcgccagcgtgatcgcatcctcattgacgcggatacgatccacattgcaggtgccgccgggcaccaccagcaggtcgtagtcggcagcctgcacgtcggacaggcgcgcgtccggggtcagcgtttcgccttcgtagcggtcgtgctgcaccgtctcacacgggtccaaggtagtggcggcaagcgtcaccttggcaccggcggccttgagatcgcgcagcgggcgcgtcagctcggtctcctcgataccccagttgttgacgatgatcagtactctgctgttttcgacagccatgtcaatctccttgattcggcggacaacttccacgagccattctctcatgccgagcggctgccataccggtgctcaatatgatgattctcatattccagaaacgggtgcggcgcatgtaacgggcggtaggtagtctgaaggactgtaatgcaaagccgaacaggggagtgaagcatgtcgttggcggtacgagtcatcccgtgcctggacgttgacgccggtcgcgtggtgaagggtgtgcatttcgaaaacctcaaggatgcgggcgacccggtggagctggcggccgaatactatcgtcagggcgccgacgagatcaccttcctggatgtgaccgcatccagctcccaccgcaacacgatgattgacgtggtctcccgcaccgccgaacaggtgttcattccgatgaccgtgggcggcggcgtacgcacgcccgaggacgtcgactcgctgctgcgctgcggtgcagacaaggtcggtgtcaacacggcggccatcaatgacccgtcgcttatcagccgcgtggccgaccgtttcggcaaccaggtgctggtgctctccgtggacgcccgccgtgaaaagggcgagcaacacacgcaatccggcttcgaggtcaccacaatgggcggccgcaaatccaccggcattgatgccatctggtgggtcaagcgcgccgagcagcttggcgccggcgagattctgcttaactcgatggacgccgacggtaccaaggaaggctttgatctcgagatgattcgcgccgtgcgcaaggaagtcaagattccgatcatcgcctccggcggtgccggcaaggtcgaggacttcccgcccgccatcgaagcaggtgccgacgcggtgctggccgcatccgtattccattacggcatcctgaccatcgccgatgtcaaggcggaactcaagaagcacggctacaccgttcgctaaacgaatacaccttgctcccgctgggcgaacaatccagtgaattgttcgtggcaatgcgctatgcgcacgtcgcacataatccgggagctgtcagcgaagctgactgagggtggtccacataaggaagataggtatgacagacactacatacgacaattccactgaactcgatccccgtattgccgcacgcctgaagcgtgacgccaagggcctggtcgctgccgtcatccagcagtacgacacacacgaggtgctgatggtcggctacatgaacgacgaggcattacgccgcacgctgaccaccggccgcgtgaccttctggtcccggtcccgtcaggaatactggcgcaagggtgatacctccggccatgtgcaatacgtcaagggcgtgtccctggattgcgacggagacgcactgctcgtcgaagtagaccaagtcggtgccgcctgccacaccggcaagcgcagctgcttcctcgaaggcggccccctgtccgtggtcgaaggccatcgcccggccgagcagtagaacgggcttccctgactgggggaagccgaacgaccgcgtactacgaaacaagacatcgagttgtaagtaaaggagcgaatatgagcgaatgcagcgtcaaacacctgaagtggggcgccacctggcccagtcgcggccagttccacgaactggccgacgccggctaccgtgtgattccgatcgtgcgccgtctgctcgccgactcgctcaccccggtcggcttctacgagcgtctcgccggcggccgatccggcaccttcatcctcgaatcggcggaatacggcggcacgtggagccgttacagcttcatcggcgtcaactcgatggcccagctgcgctccaacaacggtcaggccgactggctgggcaaggtcccggttggtgtgccagtcaccggtgacgtggtcgaagtcgctcacgccacgttgaagactctgaaggccccgcatgtggaaggcctgccgaacctgaccagcggtctgatcggcacggtcggctgggatgccatccgccactgggaaccgaccctgcgcgccggagctccggacgagaccggccagcctgagaccgtgcttgccctggccaccgatatcgccgtggtcgaccacgtatccggttcggtgtggctcatcgccaacgcggtgaacgtggatgataaatccactcgcgccgacgccgcctacaacgaggccgtcgctcgactcgaccagatgcagcgcgatgccgccaccccggctccggacgagtcccgcgtcaacatcctggacgaaacggtcgcccaacccgagctgcgcttccgcaccgagaagagccactacgagcaggccgtcgaacgcgccaagcagcacatcgtcgacggcgacgtgttccaggtggtcatctcccagcgcctcgacatcgattcgcctgctgacccgttcgacgtgtaccgtgtgttgcgcacgctgaacccgagcccgtacatgtatttcatggcgttgaccgacgctcagggccgcgacttcaacgtgatcggctccagcccggaaaccctcatcaaggtggacaacggccacgcgatgaccttcccgattgccggatcccgccctcgcggcgccacccctgaggaagacgagaaattcgccaaggagctgcttgccgatccgaaggaacgcagcgagcacatcatgctcgtcgacctgtcccgcaacgacctgagtaaggtgtgcgtgccgcagtccgtggaagtcgtgcagctcatggacatcaagcgtttcagccacatcatgcacatctgctcgacggtcaccggcaaggtcgacccctcgctgaccgcattcgatgtgttcaagtccgcgttcccggccggcacgctgtctggcgctcctaagccgcgcgcagtcgaaatcatcgacgagttggaaccggccgaccgcggcatctacggcggcaccgtcggctacttcgatttctccggcaacatggacatggccatcgccatccgcaccgcgttcctgcgtgaccatgaggcgagcgtgcaggccggtgccggcattgtgctcgactccgtgcccgccaccgaatggcaggagactcgcaacaaggccgaggccagcgtcgaatccatccagatcgccgcccagttgcgcgaactgtaacgttcaacgcatagcgatgcctccgctgacagaagttgtcagtgggggcatcgctgtctgtatgtcagtgggtttcgcccatgatgtcggtggcgtcggttccggtgctcacagcggcctcgatggcggcttcgatgccgcgcgccatggtcgcgatctccatggtcggcgtgccgttcggtttgtgaccggacgcttcaatcgcacccaccgccatcggcataatgaccggacgcacgaacccggccacgccaccaaaactcacgttgaacgcggcggacacgagacgcatcacaccatacagggcgatcaccataccgggcgtcgcattcttcaccttgccgatcagttgcgcggctgcgtatggacacatgagcgtcggctgagcccggtcggcatggtgttcgctatgatggacagtcggactttggtaagagacagtattcgtaacaggcaagtaggttattcatggctattgaggtgcagggacttgaaattcagatcggcgcgcgcacgctgcttcaccccaccaacttccatgtggccaagggagacaagatcggtctggtgggccgcaacggcgccggcaagaccacgctgacccgcgtgatcaccggcgacatgctgcccaccgccggcaaggtgcgcgtctccggcaagctcggctacctgccgcaggacacgcatgcctccgatcccacacagaccgcgctcgaccgcatgatgagcgcgcgcgacatcgccaccatcatcaaccgcatccgcaaggccgaaaaggatatgaccgacccggatccggacgtgatgagcaaggccatgacccggtacgacaaggccatgcaggacttcgacaaggccggcggctacgcggcccagtccgaggcgatttccatggccgcctcgctcggcctgccgcaggaggtcatggagcagcagctcggcacgctctccggtggccagcgccgccgcatcgagctggcgcgcatcctgttctccaatgccgacaccctgatcctcgacgagccgaccaaccacttggatgccgattccatcgaatggctgcgcggctacttgaagaagtacgagggcggcttcctggtcatctcccactccaccgaactgctggacgaagtggtgaacaaggtctggcatctggacgcgcagctcggccagatcgacatgtattcgcttggctggaaggcctacctgcaccagcgcgtggtggacgaggagcgccgccgccgcgaacgcgaagtggccgagaagaaggccgaccgtctcatgaagcaaggcattcgactgcacgccaaggccaccaaggccgtggcggcgcagaacatgatgcgccgtgccgaaaagctgctggaaaacacctccgaggcgcagaaggccgagaaggtggcggacatccgtttccccgagcccgcgccctgcggccgcacgccgatcatggccaaggatatttccaaggcctacggttccaacatcgtgttcgccggcgtgaacctggccatcgacaagggctcgcgtgtggtgatcctcggctacaacggtgccggcaagaccaccacgctgcgcctgctggcccacatcgaggagccggacaccggttccgtggaatacggtcacggctgcaagatcggctacttcgctcaggagcacgacaccttggatctgaacgccaccgtgttggagaacctgcagcatgtggcgcccgagctcgataacacgcaggcccgttcgattctcggctcgttcctgttctccggtgacgacgcgatgaaaccggctcacgtgctttccggcggtgagaagacccgtctggctctggccacgctggtcacctcgcgagccaacgtgctgctgctcgacgagcccaccaacaacctcgaccccgcttcccgtgaggagattctgaaggccattgccaagtatgagggcgccatcgtgctcgtcacccacgatgagggcgccgtcgaggcgctcaaccccgagcgcgtgctcctcatgcccgacggcgacgaagacctctggaatgattcgtatctcgaactcgtagctgaagaatagtagtaaactcgtagccgaagaatagtagtaggagaggtctgccatgccaaccacaacaggtaagaaaatcgccatcgtcaccggcagcgcgctgggcttgggctacgagctcgccagccagctcatcgccaacggctggctggtggccggtgtcgacttcaatgccgaacgtcaggccgaactgaccgcgcagtggcccgatgactcctaccgcgcctacgtcggcgacatcaccgacgaagcgttcgtgaaggaatccgtggcggatatcgccacgctcggccacatcgatttgctcatcaacaacgccggccagccttcgttcaaggtgcccaccgcctacgaggccgccgacgtcgacaaatgtctcaagggactcaaaggcatgattctgtggacggtggaaaccctcaaggcctgcggcgagcagaacgtgaaaatcgcccagattatgagcaccgccgccacacgcggcaacgcgaacgaaagcgtgtactgcgccaccaagtggggtgagaaaggctacaccaagagcctgcaggccgcatacaagggcaccagtgtcaaggtggtcgccgtctatccgggcggcattgataccgctttctaccgtgacagtcgcgactacgtctccgaggccaagcagcacaccttcatgcagcccggcccgctggccgaagtcatcctcttcaacctgatcaacgaggccaacctcaccgtcaccgacatcgagatcaaccgcaacagctgagcctgctagtctgagatttcagcgccttggtacatacttggtgccaaggcatttcgcgtgtggagagcgaatgcacatcagtgacgatgagtttgaacgggccattgaacaggtgttggatgatttgtctgaacggtttgcgcgggtgctggagaatgtcggcatcgtcgttgcggacgaacccaatgagcgcgaactggctacaatgagcaatccgtgcggtgagctgctcggactgtatgagggcatacccgtcacgaagcgaactacgggctacagcggcgtgatgccggacgtcatcaccctgttcaaggggccgcatgaacgcgtatgctcaacgcaggccgagctgcgccaacggatccgcaaaaccgtgttgcacgagatcggccattttttcggcttcgatgacgagtatctgcactcgcacggctactgaagcgatgctagtttcactagtggggagccgtcactgccgtatgttgccaggtctactgcaagtggtgcaacgcgcggatgatggcgcaacggtcctcgacggttccctcgttggcgcacatggtggcgtaccaacgcggattgcgcaaggtctcgacgccggtggcctcatccgtggcgacgagcgtgtgcagatcgttggcgtactggaaatgcaggtggctgagcagcccgccctcggcgaacgccttgcgcgaaggcagcggattgatggcaagtagccagcggaacgggctgtcttcggcggccggatcggtggtgtggaacacgaaggtgggggagccttcgagaccgtgctcgatgacatggtcgatggtgtattcgtaggtgtcgaggctggtgtcgtcctcggcgaaccattcgatggcgagcgcggcatcgtccgtggagccggattcggcggccggctcgttcacacgccagtagccgatatggatgatgttctccgggctggtggtggagcaagccatcgaccagaacgtcctgatgccgcgcgcggccatcggggccatcttcgggttggcgagcaccgcctgctcggcggcttcccaggtctgctggatggcggcgtcatccgaatcaatgtaatgctcgaagctttcccattcaccgagccagtcggtgatgtcgaaggccgtggaatccgtggtgttgctggcggtcattgcgcgttcctttcatgggtggatgcggtggcgaaattggtagaggcattagggttggggctgctggcatctgggttactggcatgcgagccgttgttcccggaatcgtcggcgccaagattgacaatgcggtcgcaccagccggcggcgagctcctcatcgtgggtgaccacgagaatcgccttgccttggctcgccagttgccgcagcagttcgccgacctgctccatgtggtagcggtcgagtccgctggtgggctcgtcaaggatgatgaggtccttgccgcacatcaatgccgagccgatggcaacccgctgcttctgcccgccggacaggctcatcggatgccgttcgacgaacgctgcaaggtcaagatcggccatgacctgattggcttgagcggtgatgccggcatccgtctcgtcgagtccgatgagcagttcctcgcgcacgctgtcggagaacagttggtagttgacatcttgcatgaccaggaatccggcgcgggtcaggtcgcgcggtttcgcgggcacgccgttgagctcgatgcggcccgaaacaggcttgatgagtccggtcaacgtgcgcacgagcgtggtcttgccgcagccgttgttgcccatgagcccggtgatttcgccggcacggaaccgcaggtccgggatggcgcgggtgaagccgtccttgcctttgtatccgatggtgaggttatgggtgccgagcaatgccgaagtgcactcatccgcggccgggcttgaagccagcgtcgcaatccggtgccgatacggttgcaggtccaacgcccgcaatcccatggcggccacgcagccgggggagagggacaggaattcatcggcctcgtaatcctgcacgatatgcccgccgtcgaataccacgtaccggtcggccacgccgttgagccatgcgagtcggtgttcggcgattacgatggtgagcccttcgtccttcatctgctcgatcatggcgcgcatgtccgcgatggcgttcgcgtcgagattgctggtcggctcatccaataccacgagcctgggccccagcatggtggccgccgccacggcgatgctgcttttggccgcctgacaggtggaagatgctgcgatgcagcagatgcccaatgccaaagcgctcagccacggccgtgatacgacgattgatgtcctcggccggcagccctatgttttcggccgggaaggcgagctcgtcggtgacgttcgcgttgaaatactgggttttcgggttttggaacacgctgccgaccagcggggtgagccggtcgatcggcacggtctccacatccagcccgcacgtggtctggttgccggcgaacgcaccatggaagaatgaggggatgagcccgttggcaacgcgcgtatagctggttttgccgcagccgctcgccccgcacagcacgatgcactcgcctgcgggcacggtcaacgtgatgtcgcgcaatgccggctctgcggcatggtcataggtaaaggagatgccacgggaggcgatggttcccgcagacgtgtcgagtgggccacccttgccggtcccaataatggcagttgcattcggctgcgattggttgccacccatcagatcacccccgcgatatcgagcgcgagcggcaaagtgaccacaatcatgaccagccagtcgaccacggtcatacggatcagcgtgcgcgaggtgtgctcgccctcacgcccgagccccttggtcagtgccgccaccgacaggtcctgtgccacattggtggcgttcatcagcagcggaatcagaatgtattccaacgattgggccgggtgacgaaccagcccccagccgccggaggcgatgccgcgcaacgccatcgcattgcgaatctgccggtaatcctcggcgatggtcgggaagaagcggatgaccaccacacagggaatcaccacggcctcaggcacgcgcatacgccgcatcgcgcagatgaacgcgctcgcggacgtggtggtgaacgtatacgcgccggtgatgaaacagggcagcatcatcgtgacgcccacggccagcgcggagaccacatgcagccacggcagtcccagggcatcggggtcgagcattcccagcgcggtgagtactgcataggtcacgccgaagttcaacgcggttcgccatcgggcggccgccagcaggggcagcaggaacagcacgaccatgacgatttgcgtggcgagccctacgtggaagaacagcatgaggttcgccaccagcagaaggtagagtttcgcgcgcggatcgagcgtccggcgggcaggattcatcaggcgataccggccttgatgaagtgcttcttcatcatgcgctggccgaaccagccgccgagaaccgcgcacaccagaatcgcgatcatcgagatgaagaacgtgccggtgttgatgttgacgaatacgccgtcgatgtaggctgcgtccttgccgcgcgcctgcaggctcgccacgtaggcgtccttcatgaaccacaggggcaggatcgggccggtcaggccgtaggagaacaccacgtagctgacgagcagtagcgccttgctcttatacttgccggcgcgcgcgatgaggtcggccgccaccgggaacacgatgctggcgatgaacgaaagcacgaaatgcccggagatgaacaggaacagtccgatgatcacgcccatgacggtgatgccgccgaatttgccgaggcgtgcggccagcagcatgtacacgcagccggagatgagggccgtgatggcgggcaggaagatggagccgaagccgccggtgaacagggtgctcaccagtgtggcgatgcacaccatcacgaagtacagggccgcaaacacgccgatggtgatgaggtcggagacctccagtttgccggatttggcgggcttgttgagctggtcagaggtttcggcgggcgtgttcggtgcggtcacgatgttttccgtttcgtatgcattgacaatattcctctcgccaatctaacgatgatttcccgcaaaggcaatagtctgtctgtgatttttagcatggcttggcgcccctccctgtggggggcgaaggacgtggcgcgggcggggtgtggttcgcggctatcggctagtatggtgcggtcacgacagagggaggcatgctgtggccgatgtgatgcgggagctggaacggctgcgaccggtgtatgagacgggcgtcctgcggttgctgttgcgccagaacgcgatgctgtacgtgtcgctgctgcgttccacgttcgacccgctcaccggcgagctgccgcgcgagaccgtggaggagcggttcgcgcaaagtctgaacgctctggccgacgccggcgagtatgcgccgcgcgaggaccagaccttcgccgaggccgcccatcagatcctcgccgacctgacccgtgaaggcgaaggcgactacgcctggctcgccaactcgcatgatgcggcctcacaccgattcctctaccgtttgacggcccgcgcccaccgcgccatcgaggcgctgagcaggctcgaagacgaatcacgcgccctgtccggcgcgcaggccaacagcatcatcatggaaatcgagcacgcgcgcatgcagctgaccgccgaccccggcgagcgcatcaaactcctcaaccgtgaaatcaaggaacgcaagcacgagatcaaacgcatccaacagggcaagcagcatgccacgctgagcgaagcccaggtggaggacgtgatcgccgtgatccacaacacgctgcgcggcgtgcccatcgacctgcgcgaactcgtgctcgacgagcgggacaacggcgacgccttgcgtcggcgcatgcaggccggcgacatcagcgtggacgagaacctgacccgctaccacgatgaataccgccgctcgttccgcgaatcagacagcggccgccgcttcgaggacgccttccaggtgatcatcaccgacgagggtcgccagcaaatcgacgaagccctgcgcgccatcgccaaaaccccgtatctggccggcgaatccggcgtgctgctcggccagatccgcgacgaactggcccgcatctacgacggcatcgaagccgtgcgccgccagatgcgcgtctccgacgaggcgatcagccggctcgtgcgccagcaaaccgacactcgctaccgtacgatgctcacccgcttgaaccgactgtacgcgcgcctcaacgcggatgcgaaaacccatatgggagacgcctcgcgcccgtacgacacggccacctcggacgcgctgttcgcgccattgccgatgcgcccggccaaatccatgacccgcgccaccgcacccggcctgagcgacctcgccgccgaagccccgcagtcgactccggtggccgatctgcgggacatggtcaacagcggcggcccccgactcctgcgcatggtcagcctcatccggcgcaacccggtgaccgttgacaggtccgatgacaggcccggcgcaaccctcgtggacatcgccgccagcttcaaccggctgcccgaaagcgaacgccgcgaaagcgagatcgtcggcttcctgggcgggctgggagccgtaagcggcaacgccatcgccgacgagccgtccactgacggcgtcggcgtcggggtcgacagcgacatcgccaccgagccggccccggcgcagcgcggcgataccgcgacctggcattgcgtatcgatcgacggcgagccccggaactggatcactagaccggtgctggccgacatggacgagctgagcatcattgtggaggaaggatgaccgtggccgaggaacacgaggaacacgaggagcatatggacaacgccaacccgtacgccctgttcgaaggcgacaccggcgacatgccggccgaggcacgcatggccgccatcgccctcaaacgtgaccgctatatcagcgggcccacctacgacaccgtgctcgacaaccgcgacgccgtcgtacgctccctgaacaacgacctgctcgacttggtgatcaacgaacgctaccgcatcatgtacgccacgcccgtggccggcgacgacgtgaccctgcgctcgctcaaaacccgtgtcagcctcaaacgcgaggaggccgcgctgctcgccttcctgcgcatccgcgtcctcgaatacgagaacgtgcacgccgaccccgccgactggctcgtcagctttgaggagatccgcgccgcgctcgccaccggcgccggctatctggccgcccgcaacgatgaggaaggcgtggcaaagcagatcggcgccatcgtctccgcgatgatcacctacgggtatttggtgcgcctggacgacgaagccatgtaccagatcacgccgctcgtgcccgtggtgctcgaccgcgaactggccgacacctggctcgacgtcgcggaacacggcgacggcgacacggaagatgacgatgacgacgagaagggagccgaatgatgcaggcgacagacgtgcagatgatcgcggaccggtggatgctggaatcccgccgactcatcaactggggctcctatgagggctaccacgaattccgcccctccacggaccacaagctgccggtgaccctgctcgccggcgccagcgaatccggcaaatccacgctggtcgacgcgcagatctccctgctgtacccaaccggcacgccgttcaacaaggcctcgaactccggccgctccgaacgcagcgactacacctacctgcgcggcatggtcggcgtgggcagcaccgaaaccggcgacgagccgctctacctgcgcggccgcgacgagaacggcgcaccgcaacccgtgtggggcgccatcgtggacacctatcgcaaccagaccaccggccaggtgctctcctgcgccaaattcctctacctgatgcccggcgacggccgcggcgacgtgcgccgacagtacgtggtctggggcaagcccgtggaccccaggcgcatggaccaataccgtgacgccccgttcacgccggcccagctcaaagccacctaccccgactgcctcacattccccagcgccgaagcgttccacacacacatctggagcgcaatgggcctgagcgaggccgcctgccgactgctgcacaagatccagtccgccgacgcgccctcccggctcgacgacatcttcaaacaaggcgtgctcggcgtgcccgaagccctggacctggcccgcaccacggtcgaggactacgaacgttacgacgagaacttccacgccatggacgagaagacccgccgcatggacacgctgcgcggcatccaacaggcctacggcgaatacgccgccgcacgcggcaaggcccgcgccttcgaaccggtcaagccggccgtcgacggcacggtgccggccgtgctgcgcgactgggcattggcccgcatgcgcggcgaagtcgccgtccaactgcccgccgaccgcgccgaacaacagaacagcgaggcggaagccaagctgctgcgccgccgaaccgaagacctgcacacccgtctcgacatgatccgaggccagatgcagggtctggacggcggcaacctgacccgactcgaactcgaactcgaccaggcccgccgcaccctcgaagacgtgcaagccaaccgaacacgaatcgaacaaacgttcgcatccatcggcgagacgctgcccggcgacgaacaggcctggaacgaacgccgcatcaacgccgtgaacttcaaacgcgaatacaacaaacgagacggcgaatgcgaggaagccctcaccgccgccatcaacgcgcgggccggcgcacgcggcgacctcgaacgactgcaacgcgacttcgaccggcaacgctcccagcgcacccgcatctcccagcagatggacgaaacccgcgccatgctctgtcgcgccaccggactcacccccgccgaactgccgtacgtggccgaactcatggacgtgaacgaacacgaggaagactggcgtctcgccatgaacgtcgcctacgcgcccatcgcccagaccatcctcgtcgacaagcgccacgaacagggcttcgccgccaaagtcagcaccatcgacccgcgcaccatgccccgacgcacctggcagttcgtggacaccgcacgccactacgacgacaccggcgcgcacgcgaacatactcaccggagaacaggacggcgactggctgtccggcaaactgcgctaccgcgacgactcgcccttcgccgactggctgcgctcgcagacccaggacgaacgattcgacgccctatgcgtcaccgccatcgacgacaccgaccgcaccaaccgtcaggtgcaggccgacggtcagatcaaatccggcgcacgcggccagcacggcaccaaagaccgcgcccaggtcatcggattcgtcaacgaaacctacctcaacgcgctcgcagcgcaggtcgacgccgcccgcaacgcgctcagccaagccgacaccgactacacggccgccaaaacacagtccgataacctccaccgcgaactcgaactggccaaccagctcgcctacacgtcctgggagcgcatcgacatcgccggcgcgcaacggaccatcacggacacgcaggacgccatcgcatccatcaaaaacgatcccaagctcgccgaactcgccaaacagcgcgacgaactgaacgccgaactcgaccgtgtggaacgccagcgcatcgaatccgaccaggccgcggcccgcgccggcagcgccgtcgaagcggcgctcatctggctgcgcgaccatgccgacaccggcacgacggacgccgccggtgccaccgccgacaatgacgatgacgccgcgtccggcccgctgccggacgaagtcacggcggcgctcgccgaatcctacgacaaccgattcgccggactggcggacgccgccatgcgcgcgcacatgatcatcggcgcgggcgcggcaggaacgcaggcaccgggggagagcttccccgaacgcaccatcgccggcatcggcaaggacatggcctcccgcatcaacctgctgaacggccaggccgatgccgcacgcaccggcgtcgaatcgaagatgagcacctacatcgcgctctacgcggccgacgatgattcgctgaccgccagcgtggaggactaccggtactatctcgacgaactcgccagcctcacccagctggccgcggttgccgccaccgacgccgaataccggcgctgcctcgaacagctgctcaggagcttcctgaccatcaaacgcgccatcgacacggatgccagcgacatccacgaccagcttgaccgcatcaacgccatgctcaaaggccagcagttcggtcccaagcacggcagcctgtccctgcacgcggacgtgcgccgtcccgagcgcaccttctgggcgcagctcatccgcgtcatcggcaccctgaacgattggaaatccgccgacgtcaacgattccgacgcctcgcgcaaggctttcgcggcctgcgcgccgatggtcgggctgctgcgcgccgaactcgcgcaggtcaaggacgcgaacggcgtgaaaagctacggcgcccgcaacctcgacccgcgctgccgctcgtccttctacgccatcgtgcatcatgccgacggcccggatgaacgcatcacctccaccggcggccgttcgggcggcgccttgcaggagctcacctcattcgtatacggcgcggcgctcatctacctgctcggcggcggcctgaccagcgagccctcgtacaccacgctgttcctcgacgaggcgctcatcaaggccgacggccgttacacgcagcgcgccctcacggtgctgccgcgcctcggattccaggtcatcgtctccgctccggaaagcaagaccggcgaaatcctcgaggtctccaccaaggcctacgtgacctacaaggaccccgacaccggcctcacctccctgcgcgaggccgtgctgcatcagaatgacatggacgatgaatcatcgtcggatatattgaaggatgacggggttgccgaatgagcagtcctggcgtcgccggtattaagacgattcggttcgactcgacgatgttcgaaagcaggtgatgggaactgtggccggcatgaaagacatcgctgcgatcaccacatgcgtgaagaaacatatgcgttcacatatgtacgacatcgaaccggcatggccatttcccgtgccggtgggattgccggaccaagcatttttggaaaccaatgcgattgcggtgcatgacaacaacaatgagatacggcaatgggcaagcaagaatggttgcgaaatcataaccaagcatcgcaccataggcacctctgtcgagctgatctccaaagtcgtcgttcctgacgaatcaatagccatgcgtgtggttggtcgtacgctggcggcggaatgtcgcgaagcgcgccgccgcatagcatgtctggttgctgcttgtgacgttgctccggaaacaatcgaatcggccgctcgcatgacaggccatgaacagcctgacgacttcgatctgcttgtcagcgcagttcgatatttcaggcatcatgacgtgaccggtatgacgccgcgacagattccactgacaggattcagcggcaaatggctgaatgagtcaaaaaccaatcgtcgtaaggccatttgccgactgctcggtgtcgaaacgttgggtctgtcaaaacggccgaccgaactgcggttccgttatctcgatccggtccgcgacgatgctgagctcgaacgcatcatatggtgtccgtgggaaggcgaagcgttatccggcattaaatatgctgtcatcgttgagaacaaagacacgtatcagactatgccgccgattgcgcagggcatctgcatatggggttctggtcgcgctgtaagcgatgctgtacctgcggttcctgcactgcgtgacatgcgtatcgtgtattggggtgatatggatgcggatggactggaaatactttcgacattacgtgaatcaggtatcgaatgcgactccatcctgatggattgcgatgcatacgatcggtaccacagatttggtaccgatcgtactgaacgcagcgcgaagattgctatgcgggagcctaagccgacgcccggccttcaatcggcggagcgacgtctttatgaacgactgtgtgctgacaaaaccatcgcttatcggcgcatcgaacaggaacgcattcccatgcgtgatgcagttgacgaattacgcaagcttggcatccccgtggagtccattgaaaatcaggatttgccgatttaggctgagtgattggggatgttgccaagagctagaacggcttagctttttctcgtctcacattatgccttccgattaataatgcaacggcattgcatagctgcaaggtccggcactgctatccgatactatcgaactgttgttttgcgttgcgcgagaagggacaaacatggcaaccgcttggggtgacgagagtgtgcggaaaaccggagttccctcgcctatgtacttgatgggcgcatgcgtatgtgatgatacggaaaccgaaacaaggcaaagattggcgttgcttaagcccaaaggagcaaggaaattgcactggcgagacatgcggccatcattgcgtggcaaagtcgttgatgccatggctgcaatggacattgatcatgtcattgtggctgcggtaccaatgagccagtggaataccgccgaacgcgctcgccgtaaatgtttggaacgtcttctgcctctgctggaaacagaatacaacgtggacacgcttgtgcttgaacggcgcgagatttcacaggacaggaacgatatccgtttcatcgatggattgagaagccgcagatttatcgggccaattcgtgtcgaactctgtgcaggggagactgatgcaaggctatggctccctgatcagctgctaggagcgtacggtgatgcccaggccggtactggaagatacgatgaattcctcggccatgttcgaacagtgttcatcgacagtgattgatgtcctaaaaccgtgtatacttcatggtaagccaaccccgctggggaaatggaagtgagagccggacgccccgagtatcttgggggccggctcttgcgtttcggtccactgatggtccggaattttgcatactctggttcagttttccggcctgacacgccatcgaacaagcgttcgaatttggtcgtgtgttcgggtatccttgggacagatttggcgcgcgcatgaccgtgcgcgcgggaacggtgagatggaaggtggggtgtggctgtggcggcaatgcagactggcgcaaggcgcgcaacaagcgcaacgggcgcgaaaaccggcaagggcaagaacggtgaggtcatcgtcgaaaaggtgatgaccagcgactccttcctgagccgggagatcaaaaaggcgccgctgatcgaacacgatggttcgctggtagctgatatctcgcacatcccgaacgatctcaagatcacgattcagggtgcgcgcgaacacaacctcaagaatgtcgacctggcgattccgcgcaatcgcatggtcgtgttcacaggcctgtccggttcgggcaaatcctcgctcgcgtttgacaccctgttcgccgaaggccagcgacgctacgtcgaatccctatccgcctacgcccgccagttcctgggtcagatggacaagcccgacgttgacttcatcgagggcctgagcccggccgtctccatcgaccagaagaccaccaaccgcaacccgcgttctaccgtcggcaccatcaccgaaatctacgattacctgcgactgctcttcgcccgcaccggcatccctcactgccctgaatgcggcgagcccgtcgcctcccagaccccgcagcagatcgtcgacacgctgctcggctacccggagcgcacgcgattccagattctcgcgcccgtggtcaagggccgcaagggcgagttcgtggatatgatcgagctgctgcgctccgacggctacgcccgcgcgctcatcgacggcgagatgacgcagctgtccgacgacatcaaactcaccaagcagaagaagcacaccatcgaggtcgtggtcgaccgactcgtggtcaaggacggcatccgccaacgcctgaccgactcggtggaaaccgccctcaagctcgccaacggcagcatcatcatcgacttcgtggacgaggaggaaggcagcccggtccgccgccagccgttctccgaacaccgcagctgcccgaacgggcacacgctcgaactcgacgaggtcgagccgcgcaccttctccttcaacgccccctacggtgcctgccccgcctgcaccggtctcggcttcaaactggaaatcgacccggacctcatcatctccgacccggacaggtcactggccgacggcgtcatcgaaccgtggagcggcaccaagatgacctcccagtactacggccacatcctcgaaggtctggccaaggaaatgggcttctccatgaagaccccttggaagggcctgccggacgacgtcaagcacgacatcctctacggccacgacttcaaggtcaacgtctcctaccgcaatcgctggggacgcctgcgcgaatactccaccggcttcgaaggcgtgatccgcacgctcatgcgacgccacgacgaaaccgattcgcagtccatgcgcgaatactacgagtcgtacatgcgcgaagtgccctgccaggtctgccacggacgccgcctgaagcccgaagtgctcgctgtcaccgtggacggaaaatccatcttcgacgtgtgcgacatgcccgtcgtacgcgaactcgcctggatcaacggcctgaaactcgaaggctcggcacagctgatcgccggcgaagtgctcaaggagatcaaggcccgactcggcttcctgaacgacgtcggcctcgactacctgaccctctcgcgcgcggccgccaccctgtccggcggagaagcgcagcgcatccgactcgccacgcagatcggctccggcctggtcggcgtcatgtacgtgctcgacgagccgtccatcggcctgcaccagcgtgacaacgaacgcctcatcgaaaccctgcaccacctgcgcgatctcggcaacacgctgattgtcgtcgaacacgacgaggacacgatacgccgcgccgactgggtggtcgacatcggccccggcgccggcgaacgcggcggcgaagtcatctactccggccccgccaagcacctcatagaagccaagcgctccatcaccggcgactacatcgcccaccggcgagagatcgccgtgcccgccaagcgccgcaagatccacaagacccaggtgctcaaagtcgtgggtgcccgcgagaacaacctcaagaacatcgacgtgagcttcccgctcggcgtgctcaccgtggtcaccggcgtctccggctccggcaaatcctcgctggtcaacacgatcctttacccggtgctcgccgacaagctcaacggtgcacgcatcgtacccggccgccacacgcgcgtggaaggcgtggaccaggtgcgcaaggtgatccacgtcgaccagaacccgatcggccgcacgccgcgatccaaccccgccacctacaccggtgtgtgggacaagatccgcaccctgttcgccaagactcccgaagcccaggtgcgcggctacggccccggccgcttcagtttcaacgtcaaaggcggccgatgtgaggcctgccacggtgacggcacgctgaagatcgaaatgaacttcctgcccgacgtctacgtggactgcgaggtctgtcacggcaaacgatacaaccgcgagaccctcgaagtcacgtacaacggcaagaccgtggccgacatcctcaacatgcccatcgaggaggccgccgacttcttcaaggcgtacaccggcatctcccgatacctgaagaccctcgtggacgtcggcctcggctacatccgacttggccagcccgcacccaccctgtccggcggcgaatcgcagcgcgtcaagcttgccaccgagctgcagcgccgatccgacggcaaaaccgtgtacatcctcgacgagccgaccaccggcctgcacttcgaagacgtgaacaagctgctcaaggtgctgcagtccctggtggacaagggcaatacggtcatcgtcatcgaacataatctggatgtgatcaaggaggccgactggctgatcgatctcggtccggagggcggcgacggaggcggcaccatcgtcacgcagggcacgcccgaacaggttgccgaatgcgaagcctcatggaccggcaagttcctgaaacccatgctttagccttccattgcagctgacctcgggtgggttggggtgtttgttgctggacatgctccgggccgctcaggtcaagtctttacggtccagcaacacacaccccaacccacccaatccctgatgattggttttgcttaatagcgaggaggattatgacgaacgatattgagcggcatagtccggatgagtggcggaagactgcggcggcgttaatgtcggaaagcatagctgtgggtgccggggaaacgacggcgaaggtgaatgcgaatggggcacctttgctgggggattctcgcgacctgttccgacccaagacctcggatattcccgccaaacccggtgtgtacaaatggcgcgacggggaagggcgcgtcatttatgtgggcaaggcaaagaacctgcgcaacaggctcaccaattatttccagccgctgtatctgctgcatccgcgcacgcagaccatggtgctgaccgcacgcagcctggagtggacggtcgtcgccaccgaactggaatcactgacgttggaatacacgtggatcaaggaattcgacccacggttcaacgtgcagttccgcgacgacaagacctatccgtatctcgcggtcagcacgggggagcgaattccgcgcgtgtgggtcacgcggtcgcgcaaacggcgggatacccggtatttcggcccctatgccaaagtgtgggaattgcggcacagtcttgaccggttgctgcgcacgttcccggtacgcacctgcaccaccaacgtgttccataaggcgcaactgaccggacggccatgcctgttcgcttccatcggcaaatgctccgcaccctgcgtgaaccgcattgaagcggacgaacaccggaggctgtgcgaacagctggtcggcgtgatgaccggacgactcggacggccatacatcgcccagttgacccgcgacatgaaagaggccagcgccgaactcgaattcgagaaagccgcccgactgcgcgaccagatccaaatgctggaaaccgtggtgcaacagaacgccgtcgtcttcgaccaggatgtggacgcggacgtgttcggcttcgccagcgacgagctcgaagcctccgtgcacgctttttatgtgcgcgccggctcgattcgcggcgaacgcaactggagcgtcgaacgagttgaggacatcgatgacgccgacttgatggccgaccttctggtgcaggtgtattcggacgccgccggggacaatcacccccagtcggccgcgaccatctccactaatcgcgaggccatcggctccacgcaaaccatcacggccacggacgctgtggcacgcgcccaggccacccgagaacgcaacacccgtcaggagaccaccgggcgcgcggacctgctggcacccatcgcaccggtaccgcgcgaaatcatcgtgcccgtcgaaccggcccgccgtgaggaactcgaaggctggctgaccaatctgcgcgggggagcggtgaccatccgtgtggcctcgcgaggcgacaagaagcagcttatggaccgcgccaacgagaacgccagccaagcactgcaacgcagcaagatgagccgcatctccgacatgggcgcacgcacccaggccatgaacgatgtggccaaggcattgggactcgcggaagccccgctgcgcatcgaatgctacgacatttcgaacactgtgggcggtgccttccaggtggcctccatggtggtgttcgaagacgcgatcgccaagaaatccgaataccgacgcttcgccatccgaggcaaggacggcaaaggcgcggtggatgatctgtccgcgctttacgagacgctcacccgccgcttcaagcacggcaacatcgccggcgactccggcgaaagcatcgacgcggaacagcgtgtggcctcggccgccggcaagatgaccactgccgtggcggcggagacaatcgctgcgaacggtaacgacaatggtgagggcggttccgacatcagtggcaaggggcacgcggtgccggtcggagtgcagaacgatgcgcgggagtccccgcccgacatcgtccagcagaacacaaaccggcatcactttgcctacaagccgaacctggtggtggtcgatggcggcaagccgcaggtcatggccgccgccaaggcgcttgaggactgtggcgtgaacgacgtggccgtctgcggactggccaaacgcttggaagaggtgtgggtgccggacgacgactatccgatcatcctcaaacgccagtccgaaggcatgtatctgctgcagcgtgtacgcgacgaatcccaccgcttcgccatcacctaccaccgccagcagcggcgcaaaggcgccctgcgcagcgcgctcgacgagattcccggcatcggcgaaagctaccagaagcggctgctcaaccacttcggctcggtcaaagccatgcgcgaagccagtgtcgaggacttcgagaaggtcaaaggcatcggccacgccaaagccgaagcgctgtacaacgcgctgcacgagcagtgagccggcccggtccagcagcccagagtaaattttcggttgcggggcctgtggttgacatattcgaagcaaagtgtcggctagcatgggaacagacatcaaggaggggatatggccaatcatcgttgcgctgtactcggcaaacccgtcgcacactcattgtcacccgtgcttcacaacgcggcctaccgttcgctgaaactcgacgattggctgtacgacaagcacgaggtgggggaagacgacctcgacgctttcctcaaaggccttgactcgacgtgggctggcctgagcctgaccatgccgttgaagaagaccatccaaccgtacggtgttccggaaaatttgtgggccaaggaactgaaggtggcgaataccgcggtattcgactggagcgtggctgccgatgatcccgcttggccgaacggcaagccgggcatcaagctatacaacaccgatgtcatcggcatccaactcgccttcgaccatgccaatcgcgaactcggcgaacaccacaccgcgtcgagaagcggcaccgcgctgatcatcggcaatggcaacaccgccacttcggcgttggccgcatgctgcatgatgcccgaaatcggccatatcgtcgtcgccgcccgccaccccggaaaaaacaccgggcttaaaccagtggccgaaaagttcgtcaacgtgcataacccgtacaacgaaatcgaattaggcgacgatcaggccctgctcgaggcagcccgcaacgccacctatgtcatcaacacgattcccggacacgcggccgacaacgtcgcggatgccctcgccgatgccggaaccgagccattctccggactgctgttggacgtgatctacgatccacgccccaccaagctcatggaagcctggcgcgctcatggcggtcacgccatcggcggcgaagaaatgctgctgtaccaagctctcgtacaggtattgctgatgaccggtatctgggatgacgacccgcccagcgatgccgaccagcgtctgcaggacaccaccaccgaagacgaccagctggagatcgcgatgcgcaaagctcttgaggaggcgctgtaatgaatcaacagacaacgaaccgcgataccggcgaggcggccgccacgaatgcgccggcgaattccgcgacatccacatcgactccggacaaccagccgaccccgcttgatgccttcgaagtgctgctcatcaccggtatgtccggcgcaggccgctctcatgccgctgactgcgtggaagacatgggatggtatgtggtcgacaacctgcctcccaaactgcttatcccgcttgtcgacatgatgaccacctccggttccggatcggagtcaggcgtccacaagcttgccgccgtcatcgacgtgcgctccagctatttcgacgagctggccgccgtgctcggccatctggatgatctcggcgtcaaaacccgtattctgttcctcgacgccagcaacgaagtgctcatcaagcgctacgaatccgtgcgccgcccgcacccgctgcagcacggcaaccgactgatcgacggcatccttgaggaacgtcacctgctggaagacctcaaggaacgagccgactgggtcatcgacaccagctccctgagcatccaccagctgtccaccaaactctacgaggcgatgctcggctccggccccaccaccgtggcagtacacatcttcagcttcggcttcaaatacggtatgcccatcgacgccgatttcgtggccgacgtgcgttttctgcccaacccgttctgggtgcccagcctgcgcgagcttaccgggcacgacaagccggtcgccgactacgtgctttccagcaagggagccaaggaatttctcgacgcttatgagaaagctatcgagattgcgttggaaggatacgcccaggaagacaagcactacgtaaccatcgccgtcggctgcaccggtggtcagcaccggtcggtggcgatgagcgaagagctggctcgccgcttacgcgcacatgggctcaacgtaaccgtttccgcgagagaacagcacaagcgtcactcatcgtaagcaggcgtcgagcggtcatcgggcaagcgttcggtgaccacactgcgagaaagcagagcccataatacgtatcaaacgggttcgcttgtccaccagattaggtatcacagaaagccgatggcttccgaccgtgtgacagcagataacggcacgaagcgcctgaagcattgagaagaacgggactgtaggaggtagatcttggctcttctggacgatgtcaaaagcgagttggcagcctttgaaggcgattcgccagccgcgatcaaggcccaagctgcggccatgatccgttttggcggcggtcttcgaccggtacagaatacatacgttatccaagccgtattcacctcgcttgacgttgcagaatggctgaagaacacgttgaggaacacgttcgggcacgaagccgaggtcaatcacctcacacgtcagaccccgaacggccctgtcgagacctatgtggtgctcgtcacccgcaacgtagtggccttggctttgcagaccggactggtcgaccgccgcaagcagcaggtccgtggactgccgtctgaagtggtcaacggatccatcgcccaaatcaaagcggcatggcgcggcgccttcatggcccgtggcttcctgtccgatcccggtaaggccagcttcctggaaatcgcttgccccacggaagaggccgccatggccctgtgtggcgtggcccgtcgtctaggcatccaggccaagcatcgcacgctgcgtagctccgagcgcgtgacactcaaggatcccgacgccatcgaacgcatgctcaagctcatgggcgccacccgttcggcccgcgaatggaccggcaagcgctccgacggcgaggcccgcggcaaggccaaccgtctggccaacttcgatgacgccaatatgcgccgttccgccaaggccgccgccgaagccagcgaaaaagtgcagcatgctttcgaagtactcggcgataacattccggacaacctccgtcaggccggccagctgcgcatcgatcacgtggacaagagcctcgaggagctcggcaagatcgccgaaccgcaaatcaccaaggatgcgattgccggccgaattcgccgactgcttcaacttgccgagaagacggagaaggctcgcgcagccgaaggcaagtaacccgacaatccgatttgccgtgcctattcggcaaaacgcgacaacgatgtgacaaaacaccgcattcagtcagtagacgaatgcggtgttttgttccggaatgcctgtaatatgcaaagtggcaaaattggccactttgacgtgcgattcgtcaaggaaaggatattcatgaagacactcaaggaccttggagatctcaagggcaagcgcgttctggttcgcgctgatttcaatgttccgctggacggcaccaccatcaccgatgacggtcgaatcaaggctgctctgccgaccatcaagaccctgcgcgaagaaggcgccaaggtcatcctcatggcccaccttggccgcccgaagggcaaggtcgttcctgagctgagcctggccccggttgccgcccgcctcggcgagctgctcggcgccaacgtgccgctggccaaggacacctacggcgaggacgctcaggccaaggtcgccgccatgaacgatggcgacgttgtgctgcttgagaacgttcgtttcaacccggaggagacctctaaggacgccgacgaacgcgccgcttacgccaagaagatcgccgccctcggcgaggccttcgtttccgatggcttcggcgtggtccaccgcgctcagggctccaactacgacgttgccgccgatctgccggccgccgcaggcctgctggtcgagaaggaagtcaaggccttgtccaaggccaccgagaacccggagcgtccgttcaccgtggtgctcggcggttccaaggtctccgacaagctcggcgtcatcgagaacctgctcgacaaggccaaccgtctggtcatcggcggtggcatggtgttcaccttcctcaaggccaagggctacgaggtcggcacctccctgcttgaagaggaccagcttgagaaggtcaagggctacatcgagaccgccgagaagaacggcgttgagctcgtgctgccgaccgacgtcgtcgtgaacgccggcttcccggccggtgacaccccggttgctccggaagtcgttgccgccgacgccatcccggccgacaagatgggtctggacatcggcccggagtcccagaagctcttccacgacaagatcgtcgactccaagaccgtcgtgtggaacggcccgatgggcgtgttcgaggttcctgagttcgccgccggcaccaaggccgtggcccagggtctggtcgacgccaccgcagccggtgcgttcaccatcgtcggtggcggcgactccgcctccgccgtgcgcaacctcggcttcccggaggacggcttctcccacatctccaccggtggtggcgcttccctcgagttcctcgaaggcaaggagctccctggcctgaaggtgcttgagtaatccattttctagctcccctccttgaggggagctacgtattttttagaggggaaacatatggcgtccaaacgcattccgttggtggccggcaactggaagatgaatttcgaccatcttgaagccacttacttcgtgcagaagctggtatggctgttgcgtgacgctcacttcgactttaaacgctgcgaagtcgcgcttttcccctcgttcacatcattgcgcagcgtgcaggtgctggtcgaagccgacaagctccatgtcgcctacggcgcacaatccgtttccgtgaccacccaaggtgccttcaccggcgatgtgtccgcggacatgatcgcccatctcggctgctcatacgtcatcgtcggccactccgaacgccgcaaataccatcctgaagatgacgccaatatcgtcgatcaggtacgtgccgtgctcgccgccggcatgcagccgattttgtgcgtcggcgaaagcttcgaggaacgacgtcaaggcattgaactcgatttcgccgtgggccaggtacgtgacgtcacccgcgatctcaacgaagaacaagccgccaaactcatcgtggcctacgaacctgtctgggccattggcaccggcatggtggccactccgcaatccgcccaggatgccgcaaacgccatccgcaacgatttgaagaccacttttggcacgaaggtatccgatagcgtacgtatcctgtacggcggatcggtcacctcgaaaaatgcggcggaactcatttcccagcccgacgttgacggcttcctgatcggaggggcggccctggacgttgaggaactcgccaaaatcgctcgactggcactgaaatccacgaaatcacggaactaataccacggttttcccgtgtgtgcgctatgctggtcaacagtccaatcaatccggaggtaccctgtgaccgctcttaagatcacgctgcaagtcatcgtcgtgctgctcagcttcgtgctgaccctgctcatccttatgcacaagggcaagggcggcggtttgtccgacatgttcggcggcggtctgacccagaacgccggtacttccggtgtcgccgaaaagaacctgaaccgttggaccgttatcatcgctctggtgtgggtggccttgattatcggcctcgacatgatgaccaagttcaacctcggctgatcggcttgcacgccatatagacttgtcgctcgcgacccatgaccgttaccgtcggtcatgggtcgtatgcgttctatcgagtattacgaaaggacatcaccatggtcactatgaaccgcaacaaagtcgttatcgtcggcaccggccaggtcggtgccaccgccgccttcggcatcgtcacgcacggcctgtgcaatgagcttgtgctcatcgactgttccgccgccaaggccctgggggaggcccgcgacctcgatgatggcagcgaattccaggaccgccacgtcaaggtgcgcgccggcgactacgccgactgcaaggatgcggacatcgtcgtcatcaccgtgggccgcaagccgccggccaactccaaccgcatggccgaactcggcttcaccgtgggtcttgtgggcgaagtggtcgacaacgtcatggcctccggttttgacggcgtgatcgtcatggtctccaacccggtcgacgtgatggcttggtatgcctggaaacgttccggtctgcctcgcacccaggtgctcggtaccggcaccgcgctcgacacctcgcgtctcaagaccatcatcggcgaagagaccggcctcgacccgcgcaacgtgggcggcttcgtgatgggcgagcacggcgactcccagttcaccgcatggtccaccgtctcgctcggcggcaagccattcgcccgcttcctggccgacaaccaagaccgtttcgcctccgtgtccaccaccgaaatcgaagagaagacccgcacccgtggcaatgagatcgtcgcggccaagggcggcaccaacttcggcatcgcctccaccgtggccggcatcgtacagaccatcctgtgggacgaacgccgcatcgtgcccgtctccaccctgttggacggcgaatacggcgaacatgacgtgttcctcggcgtccccactgaactgcgcgccaatggtgccaacgagatcgtcgaactcgatctgagcgaggacgagcgggccaaactgcaccattccgccgaactcgtgcgtgaacactgcgaggggctgctgtgattctcgacgccatcacgccgaaacaaccccgactgctggtcgccgacctcgacggcacgttgctgcacgacgccgaggtattcgaggaccggttcatcacccagcgcagcatcgacaccatcaaccgcgcgcacgatgccggaatgcaattcgccatcgccaccgcgcggccggtgagtaccggtctccagttcgccgaaaaactgccggtggacgccgtaatctatctgaacggcgccctcatcgatttcgacccggcccactccgacttcgacctgctcacctcaggtgccacgccggccgatgagaaccatttgatcaagattggcttctcctcacggcgtgcctgcgaagtctgtctgttcctgctcgatcgcatgcccggcctgaagctcggcatcgtgatgaacgacgtgcgctacaccaacttcgatgtgcgcgtgtattggaaaactcaggccttccaatacacgaacttccacgacgtgcccgaaggcgtggcggacaagatcaccatcttccccgagcctgaacagtggaacgagctgcgtgcgctgattccgccggacttcgacatctccatcagcgaaggcgtgatgtggatgctcatgaacccgcaggccaacaaggagcgcgcgctgcacctgctgtgcgagcgactggacgtgccgcttgaacagacagccgccttcggcgacgacctcatcgatatcaacatgatgagcgaatccggccggggcgtggccgtggccaacgcgaaccccaaggtgttgtccatcgccgacgagatctgcccgtccaacaacgaggacggcgtcgcccaatggattgaagcgcagttgggctgaaccggtcgagactcgagaacacgccaaaattgaacttgtgttgaaccgggggtatgctttgaaccgttgttcaaaagataaattgaactcccggttggaggcataaggatatgagcgtatcggtgtttgcggaacgtctgcgcaatgcgatgaacagcaggggactgaagcaggtcgatttggtgcacgccgccgaacatcgtggtgtaaagatgggcaagagccacatcagccaatacgtggccggcaagaccatgccccgcgaggacgtgctcgaattcctggccagcgaactggacgtcgacatgaactggctgcgcggcgaggaatccaccacgcaattgaactcggacgcctccaacagcgtcacggacggcgaacacgccgccacaccgcttgccacgggtgcctccaagccccagacggacagcgagattcccgtgggccgccgccgcaccttcggcaaatcgcacaagctcgacaacgtgctctacgacgtgcgcggcccggtcgccgacgaggcgatgcgcatggaggccaacggcacccacatcctgaaattgaacatcggcaacccggcacccttcggcttccgcacgccggacgaagtcgtctacgacatggcccaccagctcaccgacaccgaaggctactcgccgtccaagggcctgttctccgcgcgcaaggccatcatgcagtacgcgcagctgaagaacatcccgaacgtcaccatcgacgacatctacaccggcaacggcgtcagcgagctcatcaacctgtccatgtccgcgctgctcgacaccggcgacgaagtgctcgtgccctccccggactacccgctgtggaccgcctgcgtgaacctggccggcggcaccgccgtgcactacctgtgcgacgaacagtccgaatggtatccggacatcgacgacatccgctccaagatcaccagcaacaccaaggcgattgtcatcatcaacccgaacaaccccaccggcgcactttacccaaaggaagtgctccagcagatcgtcgacatcgcgcgcgaacaccagctcatcatcttctccgacgaaatctacgatcgcctcgtcatggacggcctgcagcacatctccatcgcctcgatggccccggacctgttctgcgtgaccttctccggcctgtcgaaatcgcacatgatcgccggctaccgcatcggctggatgatcctgtccggcaacaagcgcattgccaaggactacatcgagggcctcaacatgctcgccaacatgcgcatgtgttcgaacgtgcccgcccagtccgtggtgcagaccgcgcttggcggccaccagagcgtcaacgactacatcgtgccgggcggccgcgtgcacgaccagcgcgacctcgtctacgacatgctcaaccagattcccggcatcaccgccgtcaagccgaaggccgcgttctacatcttcccgaagatcgacgtcaaacgcttcaacatccactcggacgagcagttcgcgctcgacctgctgcatgacaagcacatcctcatcagccacggcggcgcgttcaactggcatcgccccgaccacttccgcgtggtgtacctgccgcgcatgggcatgctgcgcgaaaccatgggggagatctccgacttcttcagctactactggcagagctgatccttggcgcaaacgaacacgctcgattgtttcgtgatatgaaggagatcttatgccggtggtgtcgcgtcgtgcgcaggaagcgctgtatcccagcgatcgcgcgaaccgcggcatggtggtccgcgctatgccaaggtgaaggcgatgacgaaggccgtggcggacagtgcggttgccaggagcagatagcacacggcggctgaatttcgagagccatcggcattggcagcgttaccgccgttatttgcgttgcgtgcagccaacgtgatggccgtaatcgccgaaagcagggagaacaatggcagcacgcacaacacgacggtcagcagtcccaaagcttcatggccgatgcaataagcgacaagacctgcattgtcagttgccgatagcgctgggcagaaatcggtgtgtctaccagtgttgtagctgtaggtaaagaacgtgatacctgaccagaacagggcaacgggaacagagcaattgcgtatggcggatgcgttgatgctgatggtgtggaacaggtcgtgcaaggaggtagcccgtataccactgcgttctggcgtgattcgattactgttgttttgcgagtcgatggtaagagaggcgcattgcaccagcgcatatgccgcaagtccaagtccgcaagcgatggttgcgccgccgctgaagttgacctcgtcggatactgaatattcggtgacgaataccggcatcacgccaatctgccatacgaacaacagtcgcgcgattcgtatccaaccgttgctcagatatgaggtgactatggcgtgcaccagccacgtcaccgcatacatcgcccacaacgttacaatcttggtattcgcactcaacaccaatatgatcgcaacagccactgccgcaataagaacactaaacaccgaacagagccgatggcgcgaaaagccctgtactcccgcaacagtcagacagagaatcgcgacaacactcagcgcagtcaccgtcataaaccacagtggtgaggtgacgcaggctccataatcgtcagttgcttggcccgagagatagtaggtcattctgccaatcgccggacaattcggatgcaacatcatgccgccccaaatgcgctcatataatggcgcgaacgatacaccggcaccactgagcgtcgcaacaaccgccatcaccatggccggaatcagcccaagctcgcgattccggccggtttccgctatctgtctatcactggtgtccatgactcaccccaccttatgccgttatcgccgtcgtcgatgatgctagtataactatggcagatgggcggagaccagcggcatacaggaattctgtatgccgctttataggagggatactgcggcagccgccatcaccgaccgaccgccagactccggcacagaccgggaagaactaccgtcgcggagcatcggcgataccaatggcaacaccgaggatagccgggaccacccagccgagctggtattgctgcaaaggcagcatagccagcgccgcgtccagccagccgatggaaccgccgaagacggcgaccaaactggagatgcaggtggcgaaggatgcgatgcccaccagcagcacggtccagaagtagacgcgcgggaatcgcgcgccgagcgacttgtgggtcagcgtcagcagtaccagcacgatggcgatcggatacagtgcggacaacaccggcacggaaaccttgatgatcgcgcttagcccggcattggacacgatgaaactgaacacggtgaagatgacctgccaggtgcggtagctcaacgttcggccggcgacggtccggaaccgagtatggaagtaggtggcgcaggtgccgatcagtccggtgcatacgttgaggcaggcgatgacgaacacgatgccaaggaacgcggtaccgaacgtgccgaacagggatgaggtgaggttggtgagcacggtcgcgcccgtgtctttggtggggtcgatggtggcgatggcgccggacaccacgcccacgtagcttagcgcgccgtaaatcacgatcagcagtacgccggtgccgagcccggcatacgcggtctccttctgcacttgcgattcgtcatcgacttgttgggcgcggatattcgcagagatcacgatgccgaagtagagcgcggcgagcaggtccatggtctggtagccgtcgaggaagccgcgtgcgatctggtttgtggagtagtcgcccatcgggttggccggggtgccgatgccgtggatcaggcaggcgatgaacaggacagcaatgagcaccagcagcaacggtcccatgaatcggccgagcactttggagagtttctcgggatgctgggcaaacaggaacgccagcgtgaagaacacgagcgagtagatgagttgggccagccagccataggaggacggtacgaaaggagccaccatcatttcgaatgaggtggtcgccgtacgcggaatcgcaaagcacgggccgatggtgagcatgatcgccacgccgaggaacaaggcgaatttgggggagacccggctggcgagtttgtcgaaaccgccggcgaaggtgaccgccagcacgccgagaatcggcaggccgactgcggagacgatgaaaccgatggccgccggtatggtcgcggaaccggcctgcgcgccgacgaacggcggaaaaatcagattgcccgctccgaagaacatcgaaaagaaggtgaaggtcatcaccaaccgctggcgtgcgacaagtttgttcattacgattcggcctttctctcatatgctcgtaccactgtagcaacaaacgaaagaagccccgaccgttggggtcggggcttctgtgagctaatcaactagtgcgctaaacacgcatcagtcgtcaaatctcaggcgttcacgcggtcgatgccggactggacgtcagacagcacggaatcccaggacttgatgaaggcagcgacaccgtcggcctccagcttgtcggtgacgtccttgaggttgatgccgagctcagccagcttgttgatgatggcgtgggactcttcgtaggtgccctcgatggacggagcgccgttgccgtggtcggccagagcgttcagggtcttctccggcatggtgttgacgatgtgcttggcaacgagctcgtcaacgtacttgcagtcggagtaggcggcgttcttggtgccggtggaagcccacagcggacgctgaaccttggcgcccttggcagccaggtcggcccaacgcggatcctcggcgaacttcttctcgaagagttcgtaagccaggcgagcgttggccacagcggccttgccctccagagccttggcctcgtcggagccgttggcttccagcagcttgtcgacagcggtgtccacgcgggacacgaagaaggaagcgacggagccgatgtgcttcaggtcgtggccgttggcggcagcctgagcgatgccctcgatgtaagcgtcgatgacctgctcgtagcgctcgagcgagaagatcagggtgacgttcacggagatacccttggccagggtggcggtgatggccggcaggccttcgagggttgccggaatcttgatcatggcgttcgggcggttgaccttctcccagagttccacagcctgcttggcggtgttctcggtgtcgtgggccagacgcgggtcgacctcgatggagacgcggccgtcgacgaagtcggtagcctcagcgatctcgcggaagatgtcggtggcgttgcgcacgtcggtggtggtgagctcgcggacagcggtctcaacgtcaaccttgccgagctccttgagctgagcgtcgtacgggccgacctggctcagggccttctggaagatggacgggttggtggtcacaccgacgacgttcttgttggcgatgaggtcctgcagggagccggactcgatgcgggagcgggacaggtcgtccagccagatggaaacgccgttgtcagacgtacgctgagttgcttcagtcatttatttttctccttatattccgtattggaacaaatctttaagtagaccccctctaacgagagggccgatcaggtggagtcttgagtacaagcctccctcgtcagagggaggctaggggactcacttggcggcttcgacttcggcgatggaggccttggcggcttccaccacgtgctcggcggtgatgccgaggtcgatcatgttctgagcgccgtcgccctgcaggccgaactgctcgatggagacgggcttgccgtaggagccgaggtacttgtaccacggcatggcaacgccggcctcgacggagacacgagccttgacagcggccggaagcacggcctccttgtactcggcgtcctgctcctcgaaccattccatggacggcacggacacgacgcgagccttgacgccctcgccggccagggtcttggcggcagccacagcccactggacctcggaaccggaagccatgaggatgacgtccggagtgccctcggtgtcgaccagaacgtaagcgcccttcttgacaccgtccttggccttggcggcggtctcggcaagaaccgggacaccctgacgggtcagaaccatggcaccaggcagggtgttcttcttctcgaagaagtaacggtaagcctcggcggtctcgaaggcgtcggccgggcgaatgacctcaagctgaggaatcgcgcggaaggaagcaaggtgctcaaccggctggtgggtcgggccatcctcgccgacggcgacggagtcgtgggaccagatgtacaggttcggaatctccatgagggcggccagacgaacggcggaacgctcgtagtcggagaacatgaagaaggtgccgccgaacggacgggtgtgggagcccagcaggatgccgttggtgatgcagcccatggtgaactcgcgcacgccgaagtgcagctggcgaccgaactcgttgcagttcggccactgcttggtggcgcactcggccggggcgaaggtggcagcgcccttgagatcggtcttgttggagccaccgaggtcggcggagccgccccagagttccggcatgacagcggcgatggcgttgagcacggagccggaggcgccacgagtggcgacacccttgccgacttcgaaggtggcctcaaggtcgtcaagagccttgtcgaagccttccggcagttcaccggccttcagacggtcgtacagggcagccttgtccgggttggccttgcgccaagcgtcgaacttctcgtcccattccttgtgggcttcgagaccgcgctcggcaaccttgcgagcgtgagccagagcctcttcgtcaacgtggaagttctcttccggatcgtagccgagggcttccttgaggccggcaacagcctcggtacccagcttggaaccgtgggaggacgggtcgttggtcttgcccggggtcggccaagcgatcagggagtgaaccttgatgagcttcggctggtccggagcggccttctcggccttggcgatgacgtcagccaagccctcgatgtcctccttgtaggagccgtcgggctggatgaagctgaactcgtcggtgtaccagccgtaggcctggaagcgcttgagcacgtcctcggccagcaccaggttggtgtcgccttcgatctggatgcggttggcgtcgaagatcacggtcaggttgccgagcttctggttggcggccagggaagcggcctcgccggagatgccctcctcgatgtcgccttcaccgcagatggcccagatcttgtggtagaacggggaatcttccttcggggtctccgggtcaagcagaccgcgctggaaacgctcgccgtaggcaaagccgatggcggaggcgaagccctggcccagagggccggtggtcatttcgatgcccggggtcaggccgtactccgggtggcccggggtgcgggtggcagcgccgccacggaagttcttaaggtcgtccagggtcacgccgtagccggagaagtacagctggacgtactgggtgagggaggcgtggccaccggaaaggatgaagcgatctcggccttcccagttgggatcattcggatcgtgcttgatgaagtgctggtacagcgtgtaggcgacgggcgccagggagatgggggagccggggtggccggagcctgccttctcaaccgcgtcagccgaaaggaccttcgccatcttgatggcgcgctcgtcgagctcggtctccttgaattcggtcatggattactttccttccaattggtcgggccgcgtatccggcttgtgccgggcgcttgacgccctcacattgcgattaccatgctagcgtcggtttgcgacgttgtggtgcaattttggcgtgttttggtagtttgtgttctgttagcgttcacagtgaacattgctacgctgcaaacgaacgcattagcactcaagcctaaggagtgctaatacaatgttctaaggtgaagtgcgccacctgcacgtggcggagccaagaaagaggcaatatttctgggttcccgcgtgtcgcggcgtggcgaaccgaccgtcggggtacgccctgagtgaaccgtgactgatatgaatatgtatgcatatatgaggaggcgcgcatgacgcaatcaagacgcatgctggtgctgcgcgccgtggtggaggattacatccgttctcaggagcctgtgggctccacttcgctgacgcgcgaccatgatctcggcgtcagttcggccaccatccgtaacgatatggccgctctggaggacgaaggctatctgattcagccgcacacttcggccggtcgcgtgcccaccgaaaagggctatcgatactttgtggaccgacttgctaccgtggtgccgctcagcgaggcgcaacgccgcggcatcaacagcttcctgtccggatcggtgagtctcaaggacgcgctgcaacgttcggcacgactgctgtccgaaatcaccggtcaagtggccgtagtcgcctcgccatcgctggccaaggccacattgcggcacgtggagatggtgcccgttgccatgaccacgttgctcgcggtggtgattaccgacaccggccgcgtggcccagcacggcctgaccatcgcatccatgcccgccgtggacgagatcaaccggctctccaacaccgtcaacgaacaatgtgtcggactgtccctatcgaaatccgcggagaccgtgcgatccatcgccgccagcgccggctacgagtcggtgcgcggcgtggccgacgcgctggccgacgccttcgaatcgatggcattggacgaacgcgcggacgaactgtacatgtccggcacctcgcacctggcccactcccggtccctggccgatctggccccgctcttcgacgcgctggaagaacaggtcgtgctgatgaagctcatgagcaacctgagcgaggagacgaatgcatccggcgtgggcgtggccatcggctccgaaatgcacactcccggcctactgcatgcctccgtggtcagcagtggctatgggcgcagcggtgcggcgggcgaaccggcggggaacgatcccgtaggcgaacccgaaaccgaatccgagacggagagccagacgaacgacacggaacccatcgccttcgtcggctccatagggccgacccacatggactatgcggccactatggccgccgtcagggccgtagccagatatttgaccgccttcctctccgagggccggacccaagactgaccgccgtctgtggcacaatgacccgcagaccaaacgaacacaaaggatcaatcaagtggcagattattacgagacgctgggtgtggaacgcggcgccagtgacgacgagatcaagaaggcataccgcaagctcagccgtaagtaccaccccgacatcgcgggccctgaattcgaggacaagttcaaggaagtgaacaacgcctacgatgtgctgtccaatccggacaagcgccgtatgtatgattcgggcgtcgacccgaacaacccgaacgccggtgccggcggcttctccggggcgggcttcggcgatatgagcgacgtgttctccacgttcttcggttccgcgttcggcggtggctcacagggcccggtgccgcgtacccagcccggccgcgatgccttggcctcggcgtccatcgatttgaagacggcggtgttcggcggcaccgcgcatgtcaagatcaatacgttctccctgtgccaggagtgcggtggctccggtgcccagggcggcgcacagccggtcacctgccccgactgccacggacagggattcatgcagaaggtcgtgcgcaccatgctcggccagatgatgacctccgccccctgtgaacgttgcgagggccacggtaccatcatccagaacccgtgccccagctgcatgggccacggccgtgtgcgcaccacgcgtaccgtgggcgttaccgtgcccgccggcatcaacgacaacgcgcgtctgcggttggccaaccagggcgaagtgggtgagggcggcggcgctgccggcgacctgtacatcgacatccgcatcaaggcggataagcagttcacccgcgatggcgacgacctgcactgctggattcaggtgccgatgagctgggccgtgcttggccacgatctgtccattgatacgttcgatggtgagaagaccgtgtccatcccggccggctgccagactgaggacacggtgacgcttaagggactgggcgtcacgaacatccgcaacaaggacgagcgcggcaacctcatcgcccacgtcaatgtgctgattcccaccaagctcaacgaaaccgagcgcggcctcatcgaacagttcgccgcctcgcacgattcaggcgccacgcacgtctcccaggcatcccgtccacaggctggccaaaagaaaggcttcttcagcaagttgaaggacgcgctgagctgagagcgggttggaaaatggccgttttgccttgcgggagtagggctgagcggctttttcgttttaaccggttttaacggtttttaacctgtttttacgaaaaatgtgggcaaaatgtgggcagaaatcgagcccgcgaagccctctgccacaacgcgaaatcggccccgtccggcagcagtcaagctctgtgcgagctgtctgcgatgccggacggggccgaactatgtgtggtggtcatgcggcgaggtcgatgcgttgtttgatggcgctgacgccgatgagcgcgccggcgaggatgccgagcgcgttgagcgtggtcactatcgcgtccacgtgcggccagccccatgcggggccgaccgtgttgacgaacacggcgagtgctggcaggacgatgaggccgagccatttgaggatgtcgtagacgcggctggggatgagccagtctggcacgatgtcggtggatgccggtgtatcgg

SEQ ID NO: 933 - DNA, 3126 bp, Unknown
  gut microbiota DNA sequence
accagtctaaagcaccacaaaagttcctataggcccgaaatggcccacaacgtggacatcctactcttggctcccctccggaggggagccaagggacgggattagtggcgcatgttggcgtagcgcatggcgcgtagggcttcgcgcttgtcctgctcttcgcgcagggcctgacgtttgtcgaattccttcttgcctcgggccagtgcgatctccgccttgacgcgaccgtccttgaagtacaggctcagcggcacaatcgtgtatcccttggcctcgatgccgcgggcgagcttggtgatctgcagtcggtgcaacagcagcttgcgcttgcgcttgggcgcatggttgttccatgtgccgttcaggtattcggggatgttcgcgccctccagccacatctcgccgcggcgatcgatggagatgaacgcctcggacagcgatgcgcggccttcgcgcaacgacttgacctcggtgccggtcagggccagccctgcctcgtacttgtcttcgatggcatagtcatgccgggccttcttgttctgtacgatgagtttctcaccggtttccttgggcatgtctcctcctttcgtgggtagcaacgcaacatccgacgatatcacggaccggcctcgaatacgaaaaagggttccccttcaagaggaacccttcaaccgcatatatcgccgaaccaaccggtcagtggacgaaccagtactgacccaaattggtcaaggtgcggtagtgcatgttccacggaccaccccagttcatttcggagatctggaatgtgccgtcgccatacacggcttcgactacggcaacatggccataggtaccgtcggcaccatcctgaccaggcaggaaggagagcgccgcaccgacctgagggttgtggtccacgcgcaagccgtacgagggggcgctgcgccaccagttgccgccattgccgagataggacggcgtgccaatgcccatctgcctacggcgttcatacgcccagtacgtgcactggccggcggcataggcgttgccgtaatcaccgttcgacgtgccttggccgccgacgctgggggcgggggcgggggccggcgccggagccggagccggagcgggcgccggagcgggggtcaccggagtggacggcgtgccgccctggttaccggtatccacccggttggcggcgtcctgctgctccttctggaactgacgattgtaggaatcgacctgggaagcgatcagtacggtccgggccgcctgcttggcggattgggaatccagactgtcgatcatggaagacagttcgtcacgccttgcttcgccttcctggcgcagcttgtccaaagcgtcacgttcgctttgcgcggtttcggcggcggtctgtgcggaagcggccttctcatcggcctgggtcttgagcacagcgatctgcttttcgatggccgccaagcgctcgccacggttcttcgacgtgctcagtgaggtcgcggcggaggaagccgcattcgcctcgttgcgggacaacgcgtcccgggactgcatggagttgacgaagtcctgtgtgctggtggcacccgtcaccacgctcatcacgtcggaagcattcgagccgtgcatctcgtcacgggccagctgggccacggcggcgtgcgcgtcatcgtagtccttgccggtctgcttgatctgctcctcgagcgtctccttgtctttctgcgcggcggaaagacgtccggatgcggcatcggcctcgtcctgagcggtggcggcatcctcgttggcctgtgtgaccttggcctgcgcggcgacaatcttgttgttggtcagatcgtccagctcaagtaccttattcgccaggtcctggctggcaccggccagctgctgcttgagttcggcctcgcgctgtaccgacgcggcgtgctggttctgcgcattgatcaggtcggaataggtgtctgcctgggcaggctgtgccgagctgaacgccagacctcccacacaggctgcggcggccaccagtgccgccagtgcgggcttgatcacacgtacgttcgtcatatgtgaatagtcctttcgctcacttaagccaataccataacatgcgaacctgagaggcttgcacacgatgtcatcacatttctcgcgggtaagccggtcgcgttacgccctcaaataacgccgcaacgagatggttgaagcgatgacggacagcagtatcgcgcccacaaccaggaacggcgatatcaccagtaccgtgagctgattcacataaggaatccatgtaacggatttcgccagccagccggtgacgaacacgttgacgatagccgaaagcatcaggcacgagagcaccgagccgatcagcgaggcgatggtgccctccagaatgaacggcagacgaatcgtccagttcgaggcacccacgtacctcatgatttcggtttcggttcgtctggatgcggcggacatacgaatggtggttccggtcagcaggatggcgaccaccaccatcacgccggcgagcacagccgtaaccgccgtggctcggttgagcacggcgaacaccgggtcgaagatctggcgctggtcggtgacgtcttccacgccctccttgccggagagcacttcggagaccacctgatatttggtcggatccttcagcttgagccagagagagtcctgcatatcgtccgcggtcagcgtacggccttggaattcgccattcgggtactgcttggtgaatgtgctgtcgtagaagtcctgcttgctgacgtagtcaatgttggagaccacgtcgttgagttcgtcgcgaatggttttctgcagtgccgtgatctcattggctgagggcgatttgccggaagcgcagttcgcggattggctggtgccgtcggggcatagccacaccacgacctcgaccttgtcgtaccagtcgcccttggctttggtgatctgcgcctgagtaagcaccgaagcgccgatgaacaggaatgagatgaaggtgaccagcgtcagcgacagcagcatcgacaggttacgggtgaggttggcccacgtttcggacagaatgaatcgtgctcgcatatgatcccccttactccttcgcgccctcagcgggttgatcgtcgg
